United States Patent Application Publication US 2011/0183924 A1 - sequence listing, part 135

SEQ ID NO: 364870 - DNA, 6457 bp, Homo sapiens
cactccagcctgagtgacagagtgaaaccttgtctcaaaaaagagagtgatgagtgctatggaaaaagaagaagtagagcaagagagggacttcaggccccggaggcacagtggggctgagcatgcagatgtctcggggagagcctcccagaagagaactgtccccgaggtgggaatcgccctggtgtgcttgaggaccagccgggggtagatgtggctggagatgggtgagggagagtagtaggaggtgacaccgggaggtgagggtagatcacacagaccttacagcatgccaggcttttcctcacttgagctcagaaaacttgcacttggagactcccgcagcctgccctgcaaagacctgactgcaaggcggctgttgcgtagcccaggagagctctaatggctatcgtggaggcttaccagtggagatggtaagagcggattacatgggcactgttcggatctcaagcctgcatggtgcctgtcagtcactccagccctggtccccagtcctgcctcaaggtggcccgcaggagcttgcccctgggcaggatacgcgaaccctggcctgacctctctttctctccacagagtgttcaagaaggccagtccaaatggaaagctcaccgtctacctgggaaagcgggactttgtggaccacatcgacctcgtggaccctgtggatggtgtggtcctggtggatcctgagtatctcaaagagcggagagtctatgtgacgctgacctgcgccttccgctatggccgggaggacctggatgtcctgggcctgacctttcgcaaggacctgtttgtggccaacgtacagtcgttcccaccggcccccgaggacaagaagcccctgacgcggctgcaggaacgcctcatcaagaagctgggcgagcacgcttaccctttcacctttgagatccctccaaaccttccatgttctgtgacactgcagccggggcccgaagacacggggaaggcttgcggtgtggactatgaagtcaaagccttctgcgcggagaatttggaggagaagatccacaagcggaattctgtgcgtctggtcatccggaaggttcagtatgccccagagaggcctggcccccagcccacagccgagaccaccaggcagttcctcatgtcggacaagcccttgcacctagaagcctctctggataaggagatctattaccatggagaacccatcagcgtcaacgtccacgtcaccaacaacaccaacaagacggtgaagaagatcaagatctcagtgcgccagtatgcagacatctgccttttcaacacagctcagtacaagtgccctgttgccatggaagaggctgatgacactgtggcacccagctcgacgttctgcaaggtctacacactgacccccttcctagccaataaccgagagaagcggggcctcgccttggacgggaagctcaagcacgaagacacgaacttggcctctagcaccctgttgagggaaggtgccaaccgtgagatcctggggatcattgtttcctacaaagtgaaagtgaagctggtggtgtctcggggcggcgacgtggccgtggaactgcccttcaccctaatgcaccccaagcccaaagaggaacccccgcatcgggaagttccagagaacgagacgccagtagataccaatctcatagaacttgacacaaatgatgacgacattgtatttgaggactttgctcgccagagactgaaaggcatgaaggatgacaaggaggaagaggaggatggtaccggctctccacagctcaacaacagatagacgggccggccctgcctccacgtggctccggctccactctcgtgcactcggatgcttactcgtcttcttcctgttctggtttcttttcccctttgttcttccagtttctaccagggggccccgtgggcttccagatcacggtgatgaacctctggcctcaggattggccccacatcaccacgccaacaggaccacagcgcactggctccaccccatctctgccatctccactcccctccttttcatgctgtctcccagaaaagctgccagggctctggccttggaattggacttgagatggggagcagacaggggaggatggggaatgtgggacacggtgtggtgggcatgagggcttggaggggtggggatgagggctcaagacacgagagaagatgtccacggtcccaggtggttaacaaagttctggcagctaaaagatgaccgcgttgaaggccacctccttctggctgggaggggcagaactgtggacagattctcaatgcctttttgaagttctgacccaccaaagaccttctgccttcaccctcctccccacctgatgtccctctgtgtctgatagtgatgttggtgaaagttcgtagaccccaggagtagagaaaagcaactggactgactttcttaccagcagttacctagactgaggcaagctgtgtggactcacccaagtatatttcagtactgtcaggctgtgacatcttagctaccttgtatttcaagtgcatggccctgtctagagatatgcacagagagaaaagcagagggagggagggagggggtcttcagcaagcaccagcccccagcagagtgagctgaagctcctgaggagggttcccgaaggggggcgctcagagatgggggcagggggcggggagaggagagtctgccttatgtcccttccttgtggacttcacatggtcatgcaggaagtgaggatgggtgtccagcgggggccgaggccactagtatcctcctgcttccccctgccattctccagggctggactgaccctatggactgggagagagtgcctgaggccaccatgccacagtcaaagggggtcctatctcagaaggtggcagcatccactgagatatcctcacccgaagggaaggaggctgctgggtagcaaataagccccttcttttcttggtgagttgatgacctccaatagctcccagtgtcatgggtacccagtacgcattagctggtgttgggttgattgagacctggggcagttcctggggcaagaagccagatgggagatgagatagaaagtgttaggagttatcctctttgcctggcctttgagaataacttactgtgtgactttgggcaagttccttccccactctgggcctcagtttctcacttgggaaagcaaggagtttgaccagatgatcacaatgggccttcctagctctggccaccaagaatttgtgaacattagagctcctggtctggtgggtagagccagagctgctgactggtctctctgcctccagaggggatttattggacctcagaggtggcagggccctatggagcaccaactgccctcaaccccaccctgtgcccaagactgggaagggattgatgtcaggctgtggccataggtagcatgagttgcccaaggagggacagagcatatctttgctgaggcttggctgaggggcttatgatagggcttgcagtacctcacagccccctgtgggcacagacaccctgaggtttacccaggcaaatatattgattagcaggacaagggctctctcctcagtttctgctcccttccatctctctcccatacttgtctgaaaagggagacaaaaaatcttatacaagtggcatctcaatcctttccagtccagcacctcctggggcaggcagtgtgacttatttcctgtggtgaaatcacctgtttcacaagcctggcagcgcgacttctgagtctcatgaccactcaacccaagggacccctccccagaccagaaccaagtcagctgggggctgtcgtactaccctgtccagtcttgagggcctagttgcaggtcccccaggcatccagcccctcctagagcttgctgggcaggctgcacctcatctgggcaggcgcagagctgatgaaatgctggagcaatgcatggcaaacatatgccctccagtgtcttctgaaacctttggggctgacacaagatcctttagtgtttgggatgacctctttcctgcagacttcttccccaccagtcttcatcgcttgccctgcttctcacttaggcagatgtcaaccagaatgagatacagccaatttggctttgatgacccagctgagagggaaatttagatacaattcaggaatatcatgcccaaaaatagtggtcccagcaaccaggacacagagggaagacctggatattgtcagtgattggtggagggggacatcttggaccctcctaggcctggtgtcacatctcccatctctcagaccccacagaggccaaggggccttggctctgacccaggttaaagagagccaccagcccccaggctcagggagctgaaaccacccatccgcagaaatctaagggcaaggagaaatagaaattgtctgttccttcccttcaaagtgtaaggcctcttccaggagcaactggagccaccacagcttctcagtgacattgggagggcttcgggcccaggaaaaacccaagccttttgtcctgagagccgagccacagcggatgcagtggcgtcagcatcccagagcggcagcttctctcctgcctgtcactggggactggttgctctccacccatccaggaggaaggggttaggtcccagtcttacactcttatagggtctcatggacataggcctatgcctgttctgatatctataattttttaaactcaaaaggaccaaaacactcctgaaccctcatctatacggcctgcactgggcttggtgtttcctcctggcccaggcagctccatctcttctgccattcctcctggacgaaagtggcaggaccccacctctaccacttccccacagggtcactgcacagcggcttcaaagacacgccctgttgaaggggaaacatcctccccccatcacactccaactcgtcaccccaaaagggaagtcaaagcacaggtccgtggggcctatggtttgtagacactgacacagtggttttcaaaccaggtgctgcggaacccctgatattccacagagctttgtcaggggatgctaaagtgggaagatgggagtggaggcaaaggataggtttccagccctcctcccatttccgccgccaccagaataactctgcttttatctgtcttgcctactgagatttcattttcaagctttctttgaagaagaacttcaaaccaccatctcgaggtttgatcttagaccagccagcacaggttctattcttgctgttcatgttggaatggctccagcgttccagtacaaagtgtctttgtgttggaacttgggtcacagacccaggcacaagcatttatacacacacacacacacacacacacacacacacacacacgtacatagttgatggtttttctagccaacccaccctgaagctctggccaaggtttgatttggacagggacctggtgctcagtggggatgggtcgtgaccctgatattggcccatgaagcatggggagctctggagcaaggaaacaggctcaatcccccactgaggacttgtgtctgcacccctatctggcaccccactttcctggcctaggcccaagggacacagcaggagaagcagtgtgataggagagaggctagggttaaattcatctttacacagcgccggatggatggaaatcttggctcacataaaagacagactcagggaggattttatgacaaaagtccctcctttgagggcaggattcccccaggaatcctggacactttagtgagaactggaccagcccttggcacaaaaccctgcctgccctgtcccccactcccaccccccagggaattctaggtgaaaatgtgaagctcagggcacagcaagcgcatgacacgggtgtattacattcggtccgagtgtgtccttagtttccctgtgtgcaaaatggggctagtccaggctcttcccacctcactgggacaattgcaagggtcataggagaggtgggtatgataggtggtcatatgaggtggtgagtatgagaggtgggtgcctcacaaactcggggtatggtcctgacctgcatggcagatgagcagagcacttgggaacgagcataggaagtgccatcttcccgggcatctctgctcagtgttaaggtctagccacagacactgtgggacctgcctcttcctatggaatgggggcctgcatgggttgtgtcctggggcaggagtgagggatggctgggaagaatctccaggtctgtggcccttgtgttgagtgattattttgtgacactctcattcctggaccacctgccaggtttatctgttatacctgtggcattcttattatgtcagacaagttattatagttcattcaactctaacaaatgaacaaaagaacaataaataggaggccattaaaggtcttttgtggcagag

SEQ ID NO: 364871 - DNA, 5615 bp, Homo sapiens
gcctggattccatggcttgaccctgcccccttcacaaacagttcacaacaggagctggcggaggcaagctgcagccgggctcatgcaccaagactggtcaccgtttaagcagccagcatttagcgaggacctcaggcattacctgcttagtttgctctctctgaaatacctctagctgctccacctgggcagtgagtttctgcctctcttcctggagaagtgcgcctgggtgcgcacccaggcgcacttctggggaaccccagaagatcgcgtgggggcttttctccctcccctttccctagaaccttgctgtcctcccagccaaccccgtcccttcttatgccccccagatctattaccatggagaacccatcagcgtcaacgtccacgtcaccaacaacaccaacaagacggtgaagaagatcaagatctcagtgcgccagtatgcagacatctgccttttcaacacagctcagtacaagtgccctgttgccatggaagaggctgatgacactgtggcacccagctcgacgttctgcaaggtctacacactgacccccttcctagccaataaccgagagaagcggggcctcgccttggacgggaagctcaagcacgaagacacgaacttggcctctagcaccctgttgagggaaggtgccaaccgtgagatcctggggatcattgtttcctacaaagtgaaagtgaagctggtggtgtctcggggcggcgacgtggccgtggaactgcccttcaccctaatgcaccccaagcccaaagaggaacccccgcatcgggaagttccagagaacgagacgccagtagataccaatctcatagaacttgacacaaatgatgacgacattgtatttgaggactttgctcgccagagactgaaaggcatgaaggatgacaaggaggaagaggaggatggtaccggctctccacagctcaacaacagatagacgggccggccctgcctccacgtggctccggctccactctcgtgcactcggatgcttactcgtcttcttcctgttctggtttcttttcccctttgttcttccagtttctaccagggggccccgtgggcttccagatcacggtgatgaacctctggcctcaggattggccccacatcaccacgccaacaggaccacagcgcactggctccaccccatctctgccatctccactcccctccttttcatgctgtctcccagaaaagctgccagggctctggccttggaattggacttgagatggggagcagacaggggaggatggggaatgtgggacacggtgtggtgggcatgagggcttggaggggtggggatgagggctcaagacacgagagaagatgtccacggtcccaggtggttaacaaagttctggcagctaaaagatgaccgcgttgaaggccacctccttctggctgggaggggcagaactgtggacagattctcaatgcctttttgaagttctgacccaccaaagaccttctgccttcaccctcctccccacctgatgtccctctgtgtctgatagtgatgttggtgaaagttcgtagaccccaggagtagagaaaagcaactggactgactttcttaccagcagttacctagactgaggcaagctgtgtggactcacccaagtatatttcagtactgtcaggctgtgacatcttagctaccttgtatttcaagtgcatggccctgtctagagatatgcacagagagaaaagcagagggagggagggagggggtcttcagcaagcaccagcccccagcagagtgagctgaagctcctgaggagggttcccgaaggggggcgctcagagatgggggcagggggcggggagaggagagtctgccttatgtcccttccttgtggacttcacatggtcatgcaggaagtgaggatgggtgtccagcgggggccgaggccactagtatcctcctgcttccccctgccattctccagggctggactgaccctatggactgggagagagtgcctgaggccaccatgccacagtcaaagggggtcctatctcagaaggtggcagcatccactgagatatcctcacccgaagggaaggaggctgctgggtagcaaataagccccttcttttcttggtgagttgatgacctccaatagctcccagtgtcatgggtacccagtacgcattagctggtgttgggttgattgagacctggggcagttcctggggcaagaagccagatgggagatgagatagaaagtgttaggagttatcctctttgcctggcctttgagaataacttactgtgtgactttgggcaagttccttccccactctgggcctcagtttctcacttgggaaagcaaggagtttgaccagatgatcacaatgggccttcctagctctggccaccaagaatttgtgaacattagagctcctggtctggtgggtagagccagagctgctgactggtctctctgcctccagaggggatttattggacctcagaggtggcagggccctatggagcaccaactgccctcaaccccaccctgtgcccaagactgggaagggattgatgtcaggctgtggccataggtagcatgagttgcccaaggagggacagagcatatctttgctgaggcttggctgaggggcttatgatagggcttgcagtacctcacagccccctgtgggcacagacaccctgaggtttacccaggcaaatatattgattagcaggacaagggctctctcctcagtttctgctcccttccatctctctcccatacttgtctgaaaagggagacaaaaaatcttatacaagtggcatctcaatcctttccagtccagcacctcctggggcaggcagtgtgacttatttcctgtggtgaaatcacctgtttcacaagcctggcagcgcgacttctgagtctcatgaccactcaacccaagggacccctccccagaccagaaccaagtcagctgggggctgtcgtactaccctgtccagtcttgagggcctagttgcaggtcccccaggcatccagcccctcctagagcttgctgggcaggctgcacctcatctgggcaggcgcagagctgatgaaatgctggagcaatgcatggcaaacatatgccctccagtgtcttctgaaacctttggggctgacacaagatcctttagtgtttgggatgacctctttcctgcagacttcttccccaccagtcttcatcgcttgccctgcttctcacttaggcagatgtcaaccagaatgagatacagccaatttggctttgatgacccagctgagagggaaatttagatacaattcaggaatatcatgcccaaaaatagtggtcccagcaaccaggacacagagggaagacctggatattgtcagtgattggtggagggggacatcttggaccctcctaggcctggtgtcacatctcccatctctcagaccccacagaggccaaggggccttggctctgacccaggttaaagagagccaccagcccccaggctcagggagctgaaaccacccatccgcagaaatctaagggcaaggagaaatagaaattgtctgttccttcccttcaaagtgtaaggcctcttccaggagcaactggagccaccacagcttctcagtgacattgggagggcttcgggcccaggaaaaacccaagccttttgtcctgagagccgagccacagcggatgcagtggcgtcagcatcccagagcggcagcttctctcctgcctgtcactggggactggttgctctccacccatccaggaggaaggggttaggtcccagtcttacactcttatagggtctcatggacataggcctatgcctgttctgatatctataattttttaaactcaaaaggaccaaaacactcctgaaccctcatctatacggcctgcactgggcttggtgtttcctcctggcccaggcagctccatctcttctgccattcctcctggacgaaagtggcaggaccccacctctaccacttccccacagggtcactgcacagcggcttcaaagacacgccctgttgaaggggaaacatcctccccccatcacactccaactcgtcaccccaaaagggaagtcaaagcacaggtccgtggggcctatggtttgtagacactgacacagtggttttcaaaccaggtgctgcggaacccctgatattccacagagctttgtcaggggatgctaaagtgggaagatgggagtggaggcaaaggataggtttccagccctcctcccatttccgccgccaccagaataactctgcttttatctgtcttgcctactgagatttcattttcaagctttctttgaagaagaacttcaaaccaccatctcgaggtttgatcttagaccagccagcacaggttctattcttgctgttcatgttggaatggctccagcgttccagtacaaagtgtctttgtgttggaacttgggtcacagacccaggcacaagcatttatacacacacacacacacacacacacacacacacacacacgtacatagttgatggtttttctagccaacccaccctgaagctctggccaaggtttgatttggacagggacctggtgctcagtggggatgggtcgtgaccctgatattggcccatgaagcatggggagctctggagcaaggaaacaggctcaatcccccactgaggacttgtgtctgcacccctatctggcaccccactttcctggcctaggcccaagggacacagcaggagaagcagtgtgataggagagaggctagggttaaattcatctttacacagcgccggatggatggaaatcttggctcacataaaagacagactcagggaggattttatgacaaaagtccctcctttgagggcaggattcccccaggaatcctggacactttagtgagaactggaccagcccttggcacaaaaccctgcctgccctgtcccccactcccaccccccagggaattctaggtgaaaatgtgaagctcagggcacagcaagcgcatgacacgggtgtattacattcggtccgagtgtgtccttagtttccctgtgtgcaaaatggggctagtccaggctcttcccacctcactgggacaattgcaagggtcataggagaggtgggtatgataggtggtcatatgaggtggtgagtatgagaggtgggtgcctcacaaactcggggtatggtcctgacctgcatggcagatgagcagagcacttgggaacgagcataggaagtgccatcttcccgggcatctctgctcagtgttaaggtctagccacagacactgtgggacctgcctcttcctatggaatgggggcctgcatgggttgtgtcctggggcaggagtgagggatggctgggaagaatctccaggtctgtggcccttgtgttgagtgattattttgtgacactctcattcctggaccacctgccaggtttatctgttatacctgtggcattcttattatgtcagacaagttattatagttcattcaactctaacaaatgaacaaaagaacaataaataggaggccattaaaggtcttttgtggcagag

SEQ ID NO: 364872 - DNA, 3616 bp, Homo sapiens
tctcctggagccaggactgcacaaggcaatggccaaatttagttgaattcagcctaccatcctttgctgatgactcagctctatgccaagtactggagccacagagatgggtcagtcccagcccctgtcctcaggaagcccatggtcagggaaacgttgtagggataagtaatagagggcagttgccttcagggctcctggtggctgctggtccctatggtgccttgatgtgaattagaagacggtgccctttccaggtggattcagacctacactagaacgcacagctttgggagtgacacacaggttggattttagcaccccttgccccttggccagaggtgccctgctgcacggccatacgctgcagcctcgagggacacacaggccaaagtgtttccttcagcctcttcctggagaggaagccgcaggtcatgtttccaagcttctggtcaactccaggcaccacctcccagcccccaaacatggccgagccagtgcttctctgcagggcccctttcctttctggagtcagcctgcccaggtgataccttgaagtgaaactaggggtgggggagcctcactaggccccaggcaccatcccacagtactggcggtttctctgccaagtgtttggggcctgcactggccaagccatccgtcactgggactttgcagtgtgccctgtgggtggcgtgtggacaccggtccgggcaggaaggaaaagcatgccccggtgaaaacccaccgagcagagagccagcgggacctcctcagcattccacccaggggaagagttcagtccccatgaagataaggactgagttatttggctgcacctctcctcagcctcaaagctcagacctgctagagtgggttcacctggctgttggttctgtgggagagttcctgacaagctggttcctacatggtgcagtgaaaggaactctgtcctggaagtccccaatgccgcctctcagtcctgcctgtcaccaaccacctggggggcttgggcaagctactcaacctctggggctcaatttccctaactgtaaaatgggattgtaatcccttccctgcctgacgcaggaattgttatgaggcccagatgagatgaaagtcagcggtcagggctctgtaagttgaaaatggctggatgtgtgtggccctgccactgcagggatggcccaaggtcacacagaaagtttgctgcaggaggagccctccccaccagtcttcatcgcttgccctgcttctcacttaggcagatgtcaaccagaatgagatacagccaatttggctttgatgacccagctgagagggaaatttagatacaattcaggaatatcatgcccaaaaatagtggtcccagcaaccaggacacagagggaagacctggatattgtcagtgattggtggagggggacatcttggaccctcctaggcctggtgtcacatctcccatctctcagaccccacagaggccaaggggccttggctctgacccaggttaaagagagccaccagcccccaggctcagggagctgaaaccacccatccgcagaaatctaagggcaaggagaaatagaaattgtctgttccttcccttcaaagtgtaaggcctcttccaggagcaactggagccaccacagcttctcagtgacattgggagggcttcgggcccaggaaaaacccaagccttttgtcctgagagccgagccacagcggatgcagtggcgtcagcatcccagagcggcagcttctctcctgcctgtcactggggactggttgctctccacccatccaggaggaaggggttaggtcccagtcttacactcttatagggtctcatggacataggcctatgcctgttctgatatctataattttttaaactcaaaaggaccaaaacactcctgaaccctcatctatacggcctgcactgggcttggtgtttcctcctggcccaggcagctccatctcttctgccattcctcctggacgaaagtggcaggaccccacctctaccacttccccacagggtcactgcacagcggcttcaaagacacgccctgttgaaggggaaacatcctccccccatcacactccaactcgtcaccccaaaagggaagtcaaagcacaggtccgtggggcctatggtttgtagacactgacacagtggttttcaaaccaggtgctgcggaacccctgatattccacagagctttgtcaggggatgctaaagtgggaagatgggagtggaggcaaaggataggtttccagccctcctcccatttccgccgccaccagaataactctgcttttatctgtcttgcctactgagatttcattttcaagctttctttgaagaagaacttcaaaccaccatctcgaggtttgatcttagaccagccagcacaggttctattcttgctgttcatgttggaatggctccagcgttccagtacaaagtgtctttgtgttggaacttgggtcacagacccaggcacaagcatttatacacacacacacacacacacacacacacacacacacacgtacatagttgatggtttttctagccaacccaccctgaagctctggccaaggtttgatttggacagggacctggtgctcagtggggatgggtcgtgaccctgatattggcccatgaagcatggggagctctggagcaaggaaacaggctcaatcccccactgaggacttgtgtctgcacccctatctggcaccccactttcctggcctaggcccaagggacacagcaggagaagcagtgtgataggagagaggctagggttaaattcatctttacacagcgccggatggatggaaatcttggctcacataaaagacagactcagggaggattttatgacaaaagtccctcctttgagggcaggattcccccaggaatcctggacactttagtgagaactggaccagcccttggcacaaaaccctgcctgccctgtcccccactcccaccccccagggaattctaggtgaaaatgtgaagctcagggcacagcaagcgcatgacacgggtgtattacattcggtccgagtgtgtccttagtttccctgtgtgcaaaatggggctagtccaggctcttcccacctcactgggacaattgcaagggtcataggagaggtgggtatgataggtggtcatatgaggtggtgagtatgagaggtgggtgcctcacaaactcggggtatggtcctgacctgcatggcagatgagcagagcacttgggaacgagcataggaagtgccatcttcccgggcatctctgctcagtgttaaggtctagccacagacactgtgggacctgcctcttcctatggaatgggggcctgcatgggttgtgtcctggggcaggagtgagggatggctgggaagaatctccaggtctgtggcccttgtgttgagtgattattttgtgacactctcattcctggaccacctgccaggtttatctgttatacctgtggcattcttattatgtcagacaagttattatagttcattcaactctaacaaatgaacaaaagaacaataaataggaggccattaaaggtcttttgtggcagag

SEQ ID NO: 364873 - DNA, 1381 bp, Homo sapiens
cgggcggggaccgggggcgggggcggcggcggcggccgggagagcggaggaggcggagcagggagccgggagcgggctggcccgcgctcctcctgctggctggggattttccagcctgggcgctgacgccgcggacctccctgcgaccgtcgcggaccatgggcgacaaagggacccgagtgttcaagaaggccagtccaaatggaaagctcaccgtctacctgggaaagcgggactttgtggaccacatcgacctcgtggaccctgtggatggtgtggtcctggtggatcctgagtatctcaaagagcggagagtctatgtgacgctgacctgcgccttccgctatggccgggaggacctggatgtcctgggcctgacctttcgcaaggacctgtttgtggccaacgtacagtcgttcccaccggcccccgaggacaagaagcccctgacgcggctgcaggaacgcctcatcaagaagctgggcgagcacgcttaccctttcacctttgagatccctccaaaccttccatgttctgtgacactgcagccggggcccgaagacacggggaaggcttgcggtgtggactatgaagtcaaagccttctgcgcggagaatttggaggagaagatccacaagcggaattctgtgcgtctggtcatccggaaggttcagtatgccccagagaggcctggcccccagcccacagccgagaccaccaggcagttcctcatgtcggacaagcccttgcacctagaagcctctctggataaggagatctattaccatggagaacccatcagcgtcaacgtccacgtcaccaacaacaccaacaagacggtgaagaagatcaagatctcagtgcgccagtatgcagacatctgccttttcaacacagctcagtacaagtgccctgttgccatggaagaggctgatgacactgtggcacccagctcgacgttctgcaaggtctacacactgacccccttcctagccaataaccgagagaagcggggcctcgccttggacgggaagctcaagcacgaagacacgaacttggcctctagcaccctgttgagggaaggtgccaaccgtgagatcctggggatcattgtttcctacaaagtgaaagtgaagctggtggtgtctcggggcggaggccaggcctggcgtggaagaggctgtgaaaggcctgcatggcacaggctgtcaccagcacatggctcaaggtcatgaccctgaggagagtctcactgcagctcttcaccaggccttccgggaagcagggcagcaggtccttcagcagcgtcagcatgtgcagcgtggtggtgccctccttggagcctccagacttctcatctcctgatgcacactgtcgattc

SEQ ID NO: 364874 - DNA, 298 bp, Homo sapiens
caagcctgcatggtgcctgtcagtcactccagccctggtccccagtcctgcctcaaggtggcccgcaggagcttgcccctgggcaggatacgcgaaccctggcctgacctctctttctctccacagagtgttcaagaaggccagtccaaatggaaaggtgagtctgtaacagctgcgcccagcgcctccctgacctcacactctggtcattttctcttgggaagcagaggaaacggcatgtcccctgaaatgcacacctctgtgggagggggcaggtgctgctccccgtcttaggggt

SEQ ID NO: 364875 - DNA, 429 bp, Homo sapiens
atctatttaaaccattgctgcgaggactgggctgggccaaaccctttagataaagaaagctctttatctaaagagttttagatggggcatggcttggcatggtctgatgggatagacatggcctgtcccctggggcccttggtctgatgggtgtatgggagtgtctgggctgcaatacatgagacaggacagtggtggatgtgacaggtggctcgttctgtcctcttcttgacagatccctccaaaccttccatgttctgtgacactgcagccggggcccgaagacacggggaaggtaggtcaccccaaggggaccatctctctggctccaggagtctcatgtccccaggtccctggctttctccctgggaggtgctggacacacaggaccactctccctgttgaacagtctttgtgtctaggctaagc

SEQ ID NO: 364876 - DNA, 681 bp, Homo sapiens
  misc_feature (611)..(611): n is a, c, g, or t
  misc_feature (656)..(656): n is a, c, g, or t
  misc_feature (674)..(674): n is a, c, g, or t
cgggcggggaccgggggcgggggcggcggcggcggccgggagagcggaggaggcggagcagggagccgggagcgggctggcccgcgctcctcctgctggctggggattttccagcctgggcgctgacgccgcggacctccctgcgaccgtcgcggaccatgggcgacaaagggacccgagtgttcaagaaggccagtccaaatggaaagctcaccgtctacctgggaaagcgggactttgtggaccacatcgacctcgtggaccctgtggatggtgtggtcctggtggatcctgagtatctcaaagagcggagagtctatgtgacgctgacctgcgccttccgctatggccgggaggacctggatgtcctgggcctgacctttcgcaaggacctgtttgtggccaacgtacagtcgttcccaccggcccccgaggacaagaagcccctgacgcggctgcaggaacgcctcatcaagaagctgggcgagcacgcttaccctttcacctttgagatccctccaaaccttccatgttctgtgacactgcagccggggcccgaagacacggggaaggcttgcggtgtggactatgaagtcaaagccttctgccgnccggggggagaaattttgggaagggaagaaagattccaacaaagncgggaaattctggtgcgntctgggt

SEQ ID NO: 364877 - DNA, 6041 bp, Homo sapiens
cgggcggggaccgggggcgggggcggcggcggcggccgggagagcggaggaggcggagcagggagccgggagcgggctggcccgcgctcctcctgctggctggggattttccagcctgggcgctgacgccgcggacctccctgcgaccgtcgcggaccatgggcgacaaagggacccgagtgttcaagaaggccagtccaaatggaaagctcaccgtctacctgggaaagcgggactttgtggaccacatcgacctcgtggaccctgtggatggtgtggtcctggtggatcctgagtatctcaaagagcggagagtctatgtgacgctgacctgcgccttccgctatggccgggaggacctggatgtcctgggcctgacctttcgcaaggacctgtttgtggccaacgtacagtcgttcccaccggcccccgaggacaagaagcccctgacgcggctgcaggaacgcctcatcaagaagctgggcgagcacgcttaccctttcacctttgagatccctccaaaccttccatgttctgtgacactgcagccggggcccgaagacacggggaaggcttgcggtgtggactatgaagtcaaagccttctgcgcggagaatttggaggagaagatccacaagcggaattctgtgcgtctggtcatccggaaggttcagtatgccccagagaggcctggcccccagcccacagccgagaccaccaggcagttcctcatgtcggacaagcccttgcacctagaagcctctctggataaggagatctattaccatggagaacccatcagcgtcaacgtccacgtcaccaacaacaccaacaagacggtgaagaagatcaagatctcagtgcgccagtatgcagacatctgccttttcaacacagctcagtacaagtgccctgttgccatggaagaggctgatgacactgtggcacccagctcgacgttctgcaaggtctacacactgacccccttcctagccaataaccgagagaagcggggcctcgccttggacgggaagctcaagcacgaagacacgaacttggcctctagcaccctgttgagggaaggtgccaaccgtgagatcctggggatcattgtttcctacaaagtgaaagtgaagctggtggtgtctcggggcggcgacgtggccgtggaactgcccttcaccctaatgcaccccaagcccaaagaggaacccccgcatcgggaagttccagagaacgagacgccagtagataccaatctcatagaacttgacacaaatgatgacgacattgtatttgaggactttgctcgccagagactgaaaggcatgaaggatgacaaggaggaagaggaggatggtaccggctctccacagctcaacaacagatagacgggccggccctgcctccacgtggctccggctccactctcgtgcactcggatgcttactcgtcttcttcctgttctggtttcttttcccctttgttcttccagtttctaccagggggccccgtgggcttccagatcacggtgatgaacctctggcctcaggattggccccacatcaccacgccaacaggaccacagcgcactggctccaccccatctctgccatctccactcccctccttttcatgctgtctcccagaaaagctgccagggctctggccttggaattggacttgagatggggagcagacaggggaggatggggaatgtgggacacggtgtggtgggcatgagggcttggaggggtggggatgagggctcaagacacgagagaagatgtccacggtcccaggtggttaacaaagttctggcagctaaaagatgaccgcgttgaaggccacctccttctggctgggaggggcagaactgtggacagattctcaatgcctttttgaagttctgacccaccaaagaccttctgccttcaccctcctccccacctgatgtccctctgtgtctgatagtgatgttggtgaaagttcgtagaccccaggagtagagaaaagcaactggactgactttcttaccagcagttacctagactgaggcaagctgtgtggactcacccaagtatatttcagtactgtcaggctgtgacatcttagctaccttgtatttcaagtgcatggccctgtctagagatatgcacagagagaaaagcagagggagggagggagggggtcttcagcaagcaccagcccccagcagagtgagctgaagctcctgaggagggttcccgaaggggggcgctcagagatgggggcagggggcggggagaggagagtctgccttatgtcccttccttgtggacttcacatggtcatgcaggaagtgaggatgggtgtccagcgggggccgaggccactagtatcctcctgcttccccctgccattctccagggctggactgaccctatggactgggagagagtgcctgaggccaccatgccacagtcaaagggggtcctatctcagaaggtggcagcatccactgagatatcctcacccgaagggaaggaggctgctgggtagcaaataagccccttcttttcttggtgagttgatgacctccaatagctcccagtgtcatgggtacccagtacgcattagctggtgttgggttgattgagacctggggcagttcctggggcaagaagccagatgggagatgagatagaaagtgttaggagttatcctctttgcctggcctttgagaataacttactgtgtgactttgggcaagttccttccccactctgggcctcagtttctcacttgggaaagcaaggagtttgaccagatgatcacaatgggccttcctagctctggccaccaagaatttgtgaacattagagctcctggtctggtgggtagagccagagctgctgactggtctctctgcctccagaggggatttattggacctcagaggtggcagggccctatggagcaccaactgccctcaaccccaccctgtgcccaagactgggaagggattgatgtcaggctgtggccataggtagcatgagttgcccaaggagggacagagcatatctttgctgaggcttggctgaggggcttatgatagggcttgcagtacctcacagccccctgtgggcacagacaccctgaggtttacccaggcaaatatattgattagcaggacaagggctctctcctcagtttctgctcccttccatctctctcccatacttgtctgaaaagggagacaaaaaatcttatacaagtggcatctcaatcctttccagtccagcacctcctggggcaggcagtgtgacttatttcctgtggtgaaatcacctgtttcacaagcctggcagcgcgacttctgagtctcatgaccactcaacccaagggacccctccccagaccagaaccaagtcagctgggggctgtcgtactaccctgtccagtcttgagggcctagttgcaggtcccccaggcatccagcccctcctagagcttgctgggcaggctgcacctcatctgggcaggcgcagagctgatgaaatgctggagcaatgcatggcaaacatatgccctccagtgtcttctgaaacctttggggctgacacaagatcctttagtgtttgggatgacctctttcctgcagacttcttccccaccagtcttcatcgcttgccctgcttctcacttaggcagatgtcaaccagaatgagatacagccaatttggctttgatgacccagctgagagggaaatttagatacaattcaggaatatcatgcccaaaaatagtggtcccagcaaccaggacacagagggaagacctggatattgtcagtgattggtggagggggacatcttggaccctcctaggcctggtgtcacatctcccatctctcagaccccacagaggccaaggggccttggctctgacccaggttaaagagagccaccagcccccaggctcagggagctgaaaccacccatccgcagaaatctaagggcaaggagaaatagaaattgtctgttccttcccttcaaagtgtaaggcctcttccaggagcaactggagccaccacagcttctcagtgacattgggagggcttcgggcccaggaaaaacccaagccttttgtcctgagagccgagccacagcggatgcagtggcgtcagcatcccagagcggcagcttctctcctgcctgtcactggggactggttgctctccacccatccaggaggaaggggttaggtcccagtcttacactcttatagggtctcatggacataggcctatgcctgttctgatatctataattttttaaactcaaaaggaccaaaacactcctgaaccctcatctatacggcctgcactgggcttggtgtttcctcctggcccaggcagctccatctcttctgccattcctcctggacgaaagtggcaggaccccacctctaccacttccccacagggtcactgcacagcggcttcaaagacacgccctgttgaaggggaaacatcctccccccatcacactccaactcgtcaccccaaaagggaagtcaaagcacaggtccgtggggcctatggtttgtagacactgacacagtggttttcaaaccaggtgctgcggaacccctgatattccacagagctttgtcaggggatgctaaagtgggaagatgggagtggaggcaaaggataggtttccagccctcctcccatttccgccgccaccagaataactctgcttttatctgtcttgcctactgagatttcattttcaagctttctttgaagaagaacttcaaaccaccatctcgaggtttgatcttagaccagccagcacaggttctattcttgctgttcatgttggaatggctccagcgttccagtacaaagtgtctttgtgttggaacttgggtcacagacccaggcacaagcatttatacacacacacacacacacacacacacacacacacacacgtacatagttgatggtttttctagccaacccaccctgaagctctggccaaggtttgatttggacagggacctggtgctcagtggggatgggtcgtgaccctgatattggcccatgaagcatggggagctctggagcaaggaaacaggctcaatcccccactgaggacttgtgtctgcacccctatctggcaccccactttcctggcctaggcccaagggacacagcaggagaagcagtgtgataggagagaggctagggttaaattcatctttacacagcgccggatggatggaaatcttggctcacataaaagacagactcagggaggattttatgacaaaagtccctcctttgagggcaggattcccccaggaatcctggacactttagtgagaactggaccagcccttggcacaaaaccctgcctgccctgtcccccactcccaccccccagggaattctaggtgaaaatgtgaagctcagggcacagcaagcgcatgacacgggtgtattacattcggtccgagtgtgtccttagtttccctgtgtgcaaaatggggctagtccaggctcttcccacctcactgggacaattgcaagggtcataggagaggtgggtatgataggtggtcatatgaggtggtgagtatgagaggtgggtgcctcacaaactcggggtatggtcctgacctgcatggcagatgagcagagcacttgggaacgagcataggaagtgccatcttcccgggcatctctgctcagtgttaaggtctagccacagacactgtgggacctgcctcttcctatggaatgggggcctgcatgggttgtgtcctggggcaggagtgagggatggctgggaagaatctccaggtctgtggcccttgtgttgagtgattattttgtgacactctcattcctggaccacctgccaggtttatctgttatacctgtggcattcttattatgtcagacaagttattatagttcattcaactctaacaaatgaacaaaagaacaataaataggaggccattaaaggtcttttgtggcagag

SEQ ID NO: 364878 - DNA, 6011 bp, Homo sapiens
cgggcggggaccgggggcgggggcggcggcggcggccgggagagcggaggaggcggagcagggagccgggagcgggctggcccgcgctcctcctgctggctggggattttccagcctgggcgctgacgccgcggacctccctgcgaccgtcgcggaccatgggcgacaaagggacccgagtgttcaagaaggccagtccaaatggaaagctcaccgtctacctgggaaagcgggactttgtggaccacatcgacctcgtggaccctgtggatggtgtggtcctggtggatcctgagtatctcaaagagcggagagtctatgtgacgctgacctgcgccttccgctatggccgggaggacctggatgtcctgggcctgacctttcgcaaggacctgtttgtggccaacgtacagtcgttcccaccggcccccgaggacaagaagcccctgacgcggctgcaggaacgcctcatcaagaagctgggcgagcacgcttaccctttcacctttgagatccctccaaaccttccatgttctgtgacactgcagccggggcccgaagacacggggaaggcttgcggtgtggactatgaagtcaaagccttctgcgcggagaatttggaggagaagatccacaagcggaattctgtgcgtctggtcatccggaaggttcagtatgccccagagaggcctggcccccagcccacagccgagaccaccaggcagttcctcatgtcggacaagcccttgcacctagaagcctctctggataaggagatctattaccatggagaacccatcagcgtcaacgtccacgtcaccaacaacaccaacaagacggtgaagaagatcaagatctcagtgcgccagtatgcagacatctgccttttcaacacagctcagtacaagtgccctgttgccatggaagaggctgatgacactgtggcacccagctcgacgttctgcaaggtctacacactgacccccttcctagccaataaccgagagaagcggggcctcgccttggacgggaagctcaagcacgaagacacgaacttggcctctagcaccctgttgagggaaggtgccaaccgtgagatcctggggatcattgtttcctacaaagtgaaagtgaagctggtggtgtctcggggcggcctgttgggagatcttgcatccagcgacgtggccgtggaactgcccttcaccctaatgcaccccaagcccaaagaggaacccccgcatcgggaagttccagagaacgagacgccagtagataccaatctcatagaacttgacacaaatgatgacgacattgtatttgaggactttgctcgccagagactgaaaggcatgaaggatgacaaggaggaagaggaggatggtaccggctctccacagctcaacaacagatagacgggccggccctgcctccacgtggctccggctccactctcgtgcactcggatgcttactcgtcttcttcctgttctggtttcttttcccctttgttcttccagtttctaccagggggccccgtgggcttccagatcacggtgatgaacctctggcctcaggattggccccacatcaccacgccaacaggaccacagcgcactggctccaccccatctctgccatctccactcccctccttttcatgctgtctcccagaaaagctgccagggctctggccttggaattggacttgagatggggagcagacaggggaggatggggaatgtgggacacggtgtggtgggcatgagggcttggaggggtggggatgagggctcaagacacgagagaagatgtccacggtcccaggtggttaacaaagttctggcagctaaaagatgaccgcgttgaaggccacctccttctggctgggaggggcagaactgtggacagattctcaatgcctttttgaagttctgacccaccaaagaccttctgccttcaccctcctccccacctgatgtccctctgtgtctgatagtgatgttggtgaaagttcgtagaccccaggagtagagaaaagcaactggactgactttcttaccagcagttacctagactgaggcaagctgtgtggactcacccaagtatatttcagtactgtcaggctgtgacatcttagctaccttgtatttcaagtgcatggccctgtctagagatatgcacagagagaaaagcagagggagggagggagggggtcttcagcaagcaccagcccccagcagagtgagctgaagctcctgaggagggttcccgaaggggggcgctcagagatgggggcagggggcggggagaggagagtctgccttatgtcccttccttgtggacttcacatggtcatgcaggaagtgaggatgggtgtccagcgggggccgaggccactagtatcctcctgcttccccctgccattctccagggctggactgaccctatggactgggagagagtgcctgaggccaccatgccacagtcaaagggggtcctatctcagaaggtggcagcatccactgagatatcctcacccgaagggaaggaggctgctgggtagcaaataagccccttcttttcttggtgagttgatgacctccaatagctcccagtgtcatgggtacccagtacgcattagctggtgttgggttgattgagacctggggcagttcctggggcaagaagccagatgggagatgagatagaaagtgttaggagttatcctctttgcctggcctttgagaataacttactgtgtgactttgggcaagttccttccccactctgggcctcagtttctcacttgggaaagcaaggagtttgaccagatgatcacaatgggccttcctagctctggccaccaagaatttgtgaacattagagctcctggtctggtgggtagagccagagctgctgactggtctctctgcctccagaggggatttattggacctcagaggtggcagggccctatggagcaccaactgccctcaaccccaccctgtgcccaagactgggaagggattgatgtcaggctgtggccataggtagcatgagttgcccaaggagggacagagcatatctttgctgaggcttggctgaggggcttatgatagggcttgcagtacctcacagccccctgtgggcacagacaccctgaggtttacccaggcaaatatattgattagcaggacaagggctctctcctcagtttctgctcccttccatctctctcccatacttgtctgaaaagggagacaaaaaatcttatacaagtggcatctcaatcctttccagtccagcacctcctggggcaggcagtgtgacttatttcctgtggtgaaatcacctgtttcacaagcctggcagcgcgacttctgagtctcatgaccactcaacccaagggacccctccccagaccagaaccaagtcagctgggggctgtcgtactaccctgtccagtcttgagggcctagttgcaggtcccccaggcatccagcccctcctagagcttgctgggcaggctgcacctcatctgggcaggcgcagagctgatgaaatgctggagcaatgcatggcaaacatatgccctccagtgtcttctgaaacctttggggctgacacaagatcctttagtgtttgggatgacctctttcctgcagacttcttccccaccagtcttcatcgcttgccctgcttctcacttaggcagatgtcaaccagaatgagatacagccaatttggctttgatgacccagctgagagggaaatttagatacaattcaggaatatcatgcccaaaaatagtggtcccagcaaccaggacacagagggaagacctggatattgtcagtgattggtggagggggacatcttggaccctcctaggcctggtgtcacatctcccatctctcagaccccacagaggccaaggggccttggctctgacccaggttaaagagagccaccagcccccaggctcagggagctgaaaccacccatccgcagaaatctaagggcaaggagaaatagaaattgtctgttccttcccttcaaagtgtaaggcctcttccaggagcaactggagccaccacagcttctcagtgacattgggagggcttcgggcccaggaaaaacccaagccttttgtcctgagagccgagccacagcggatgcagtggcgtcagcatcccagagcggcagcttctctcctgcctgtcactggggactggttgctctccacccatccaggaggaaggggttaggtcccagtcttacactcttatagggtctcatggacataggcctatgcctgttctgatatctataattttttaaactcaaaaggaccaaaacactcctgaaccctcatctatacggcctgcactgggcttggtgtttcctcctggcccaggcagctccatctcttctgccattcctcctggacgaaagtggcaggaccccacctctaccacttccccacagggtcactgcacagcggcttcaaagacacgccctgttgaaggggaaacatcctccccccatcacactccaactcgtcaccccaaaagggaagtcaaagcacaggtccgtggggcctatggtttgtagacactgacacagtggttttcaaaccaggtgctgcggaacccctgatattccacagagctttgtcaggggatgctaaagtgggaagatgggagtggaggcaaaggataggtttccagccctcctcccatttccgccgccaccagaataactctgcttttatctgtcttgcctactgagatttcattttcaagctttctttgaagaagaacttcaaaccaccatctcgaggtttgatcttagaccagccagcacaggttctattcttgctgttcatgttggaatggctccagcgttccagtacaaagtgtctttgtgttggaacttgggtcacagacccaggcacaagcatttatacacacacacacacacacacacacacacacacacacacgtacatagttgatggtttttctagccaacccaccctgaagctctggccaaggtttgatttggacagggacctggtgctcagtggggatgggtcgtgaccctgatattggcccatgaagcatggggagctctggagcaaggaaacaggctcaatcccccactgaggacttgtgtctgcacccctatctggcaccccactttcctggcctaggcccaagggacacagcaggagaagcagtgtgataggagagaggctagggttaaattcatctttacacagcgccggatggatggaaatcttggctcacataaaagacagactcagggaggattttatgacaaaagtccctcctttgagggcaggattcccccaggaatcctggacactttagtgagaactggaccagcccttggcacaaaaccctgcctgccctgtcccccactcccaccccccagggaattctaggtgaaaatgtgaagctcagggcacagcaagcgcatgacacgggtgtattacattcggtccgagtgtgtccttagtttccctgtgtgctaggagaggtgggtatgataggtggtcatatgaggtggtgagtatgagaggtgggtgcctcacaaactcggggtatggtcctgacctgcatggcagatgagcagagcacttgggaacgagcataggaagtgccatcttcccgggcatctctgctcagtgttaaggtctagccacagacactgtgggacctgcctcttcctatggaatgggggcctgcatgggttgtgtcctggggcaggagtgagggatggctgggaagaatctccaggtctgtggcccttgtgttgagtgattattttgtgacactctcattcctggaccacctgccaggtttatctgttatacctgtggcattcttattatgtcagacaagttattatagttcattcaactctaacaaatgaacaaaagaacaataaataggaggccattaaaggtcttttgtggcagag

SEQ ID NO: 364879 - DNA, 6020 bp, Homo sapiens
gggagagctgagcctgcggggctggccctggcctggctgctgctgcctgcagcccccagctcaggctccctccacctcacagtccactgctttggcgctgcttctgggctggcctcttcactccactgaatctttgggctctcatctgtaaaatgggagtgttcaagaaggccagtccaaatggaaagctcaccgtctacctgggaaagcgggactttgtggaccacatcgacctcgtggaccctgtggatggtgtggtcctggtggatcctgagtatctcaaagagcggagagtctatgtgacgctgacctgcgccttccgctatggccgggaggacctggatgtcctgggcctgacctttcgcaaggacctgtttgtggccaacgtacagtcgttcccaccggcccccgaggacaagaagcccctgacgcggctgcaggaacgcctcatcaagaagctgggcgagcacgcttaccctttcacctttgagatccctccaaaccttccatgttctgtgacactgcagccggggcccgaagacacggggaaggcttgcggtgtggactatgaagtcaaagccttctgcgcggagaatttggaggagaagatccacaagcggaattctgtgcgtctggtcatccggaaggttcagtatgccccagagaggcctggcccccagcccacagccgagaccaccaggcagttcctcatgtcggacaagcccttgcacctagaagcctctctggataaggagatctattaccatggagaacccatcagcgtcaacgtccacgtcaccaacaacaccaacaagacggtgaagaagatcaagatctcagtgcgccagtatgcagacatctgccttttcaacacagctcagtacaagtgccctgttgccatggaagaggctgatgacactgtggcacccagctcgacgttctgcaaggtctacacactgacccccttcctagccaataaccgagagaagcggggcctcgccttggacgggaagctcaagcacgaagacacgaacttggcctctagcaccctgttgagggaaggtgccaaccgtgagatcctggggatcattgtttcctacaaagtgaaagtgaagctggtggtgtctcggggcggcgacgtggccgtggaactgcccttcaccctaatgcaccccaagcccaaagaggaacccccgcatcgggaagttccagagaacgagacgccagtagataccaatctcatagaacttgacacaaatgatgacgacattgtatttgaggactttgctcgccagagactgaaaggcatgaaggatgacaaggaggaagaggaggatggtaccggctctccacagctcaacaacagatagacgggccggccctgcctccacgtggctccggctccactctcgtgcactcggatgcttactcgtcttcttcctgttctggtttcttttcccctttgttcttccagtttctaccagggggccccgtgggcttccagatcacggtgatgaacctctggcctcaggattggccccacatcaccacgccaacaggaccacagcgcactggctccaccccatctctgccatctccactcccctccttttcatgctgtctcccagaaaagctgccagggctctggccttggaattggacttgagatggggagcagacaggggaggatggggaatgtgggacacggtgtggtgggcatgagggcttggaggggtggggatgagggctcaagacacgagagaagatgtccacggtcccaggtggttaacaaagttctggcagctaaaagatgaccgcgttgaaggccacctccttctggctgggaggggcagaactgtggacagattctcaatgcctttttgaagttctgacccaccaaagaccttctgccttcaccctcctccccacctgatgtccctctgtgtctgatagtgatgttggtgaaagttcgtagaccccaggagtagagaaaagcaactggactgactttcttaccagcagttacctagactgaggcaagctgtgtggactcacccaagtatatttcagtactgtcaggctgtgacatcttagctaccttgtatttcaagtgcatggccctgtctagagatatgcacagagagaaaagcagagggagggagggagggggtcttcagcaagcaccagcccccagcagagtgagctgaagctcctgaggagggttcccgaaggggggcgctcagagatgggggcagggggcggggagaggagagtctgccttatgtcccttccttgtggacttcacatggtcatgcaggaagtgaggatgggtgtccagcgggggccgaggccactagtatcctcctgcttccccctgccattctccagggctggactgaccctatggactgggagagagtgcctgaggccaccatgccacagtcaaagggggtcctatctcagaaggtggcagcatccactgagatatcctcacccgaagggaaggaggctgctgggtagcaaataagccccttcttttcttggtgagttgatgacctccaatagctcccagtgtcatgggtacccagtacgcattagctggtgttgggttgattgagacctggggcagttcctggggcaagaagccagatgggagatgagatagaaagtgttaggagttatcctctttgcctggcctttgagaataacttactgtgtgactttgggcaagttccttccccactctgggcctcagtttctcacttgggaaagcaaggagtttgaccagatgatcacaatgggccttcctagctctggccaccaagaatttgtgaacattagagctcctggtctggtgggtagagccagagctgctgactggtctctctgcctccagaggggatttattggacctcagaggtggcagggccctatggagcaccaactgccctcaaccccaccctgtgcccaagactgggaagggattgatgtcaggctgtggccataggtagcatgagttgcccaaggagggacagagcatatctttgctgaggcttggctgaggggcttatgatagggcttgcagtacctcacagccccctgtgggcacagacaccctgaggtttacccaggcaaatatattgattagcaggacaagggctctctcctcagtttctgctcccttccatctctctcccatacttgtctgaaaagggagacaaaaaatcttatacaagtggcatctcaatcctttccagtccagcacctcctggggcaggcagtgtgacttatttcctgtggtgaaatcacctgtttcacaagcctggcagcgcgacttctgagtctcatgaccactcaacccaagggacccctccccagaccagaaccaagtcagctgggggctgtcgtactaccctgtccagtcttgagggcctagttgcaggtcccccaggcatccagcccctcctagagcttgctgggcaggctgcacctcatctgggcaggcgcagagctgatgaaatgctggagcaatgcatggcaaacatatgccctccagtgtcttctgaaacctttggggctgacacaagatcctttagtgtttgggatgacctctttcctgcagacttcttccccaccagtcttcatcgcttgccctgcttctcacttaggcagatgtcaaccagaatgagatacagccaatttggctttgatgacccagctgagagggaaatttagatacaattcaggaatatcatgcccaaaaatagtggtcccagcaaccaggacacagagggaagacctggatattgtcagtgattggtggagggggacatcttggaccctcctaggcctggtgtcacatctcccatctctcagaccccacagaggccaaggggccttggctctgacccaggttaaagagagccaccagcccccaggctcagggagctgaaaccacccatccgcagaaatctaagggcaaggagaaatagaaattgtctgttccttcccttcaaagtgtaaggcctcttccaggagcaactggagccaccacagcttctcagtgacattgggagggcttcgggcccaggaaaaacccaagccttttgtcctgagagccgagccacagcggatgcagtggcgtcagcatcccagagcggcagcttctctcctgcctgtcactggggactggttgctctccacccatccaggaggaaggggttaggtcccagtcttacactcttatagggtctcatggacataggcctatgcctgttctgatatctataattttttaaactcaaaaggaccaaaacactcctgaaccctcatctatacggcctgcactgggcttggtgtttcctcctggcccaggcagctccatctcttctgccattcctcctggacgaaagtggcaggaccccacctctaccacttccccacagggtcactgcacagcggcttcaaagacacgccctgttgaaggggaaacatcctccccccatcacactccaactcgtcaccccaaaagggaagtcaaagcacaggtccgtggggcctatggtttgtagacactgacacagtggttttcaaaccaggtgctgcggaacccctgatattccacagagctttgtcaggggatgctaaagtgggaagatgggagtggaggcaaaggataggtttccagccctcctcccatttccgccgccaccagaataactctgcttttatctgtcttgcctactgagatttcattttcaagctttctttgaagaagaacttcaaaccaccatctcgaggtttgatcttagaccagccagcacaggttctattcttgctgttcatgttggaatggctccagcgttccagtacaaagtgtctttgtgttggaacttgggtcacagacccaggcacaagcatttatacacacacacacacacacacacacacacacacacacacgtacatagttgatggtttttctagccaacccaccctgaagctctggccaaggtttgatttggacagggacctggtgctcagtggggatgggtcgtgaccctgatattggcccatgaagcatggggagctctggagcaaggaaacaggctcaatcccccactgaggacttgtgtctgcacccctatctggcaccccactttcctggcctaggcccaagggacacagcaggagaagcagtgtgataggagagaggctagggttaaattcatctttacacagcgccggatggatggaaatcttggctcacataaaagacagactcagggaggattttatgacaaaagtccctcctttgagggcaggattcccccaggaatcctggacactttagtgagaactggaccagcccttggcacaaaaccctgcctgccctgtcccccactcccaccccccagggaattctaggtgaaaatgtgaagctcagggcacagcaagcgcatgacacgggtgtattacattcggtccgagtgtgtccttagtttccctgtgtgcaaaatggggctagtccaggctcttcccacctcactgggacaattgcaagggtcataggagaggtgggtatgataggtggtcatatgaggtggtgagtatgagaggtgggtgcctcacaaactcggggtatggtcctgacctgcatggcagatgagcagagcacttgggaacgagcataggaagtgccatcttcccgggcatctctgctcagtgttaaggtctagccacagacactgtgggacctgcctcttcctatggaatgggggcctgcatgggttgtgtcctggggcaggagtgagggatggctgggaagaatctccaggtctgtggcccttgtgttgagtgattattttgtgacactctcattcctggaccacctgccaggtttatctgttatacctgtggcattcttattatgtcagacaagttattatagttcattcaactctaacaaatgaacaaaagaacaataaataggaggccattaaaggtcttttgtggcagag

SEQ ID NO: 364880 - DNA, 5702 bp, Homo sapiens
ctctaggggcttcttgtcctcgggggccggtgggaacgactgtacgttggccacaaacaggtccttgcgaaaggtcgggcccaggaccatccaggtcctccccgccatagcggaaggcgcaggtcagcctcatcaagaagctgggcgagcacgcttaccctttcacctttgagatccctccaaaccttccatgttctgtgacactgcagccggggcccgaagacacggggaaggcttgcggtgtggactatgaagtcaaagccttctgcgcggagaatttggaggagaagatccacaagcggaattctgtgcgtctggtcatccggaaggttcagtatgccccagagaggcctggcccccagcccacagccgagaccaccaggcagttcctcatgtcggacaagcccttgcacctagaagcctctctggataaggagatctattaccatggagaacccatcagcgtcaacgtccacgtcaccaacaacaccaacaagacggtgaagaagatcaagatctcagtgcgccagtatgcagacatctgccttttcaacacagctcagtacaagtgccctgttgccatggaagaggctgatgacactgtggcacccagctcgacgttctgcaaggtctacacactgacccccttcctagccaataaccgagagaagcggggcctcgccttggacgggaagctcaagcacgaagacacgaacttggcctctagcaccctgttgagggaaggtgccaaccgtgagatcctggggatcattgtttcctacaaagtgaaagtgaagctggtggtgtctcggggcggcgacgtggccgtggaactgcccttcaccctaatgcaccccaagcccaaagaggaacccccgcatcgggaagttccagagaacgagacgccagtagataccaatctcatagaacttgacacaaatgatgacgacattgtatttgaggactttgctcgccagagactgaaaggcatgaaggatgacaaggaggaagaggaggatggtaccggctctccacagctcaacaacagatagacgggccggccctgcctccacgtggctccggctccactctcgtgcactcggatgcttactcgtcttcttcctgttctggtttcttttcccctttgttcttccagtttctaccagggggccccgtgggcttccagatcacggtgatgaacctctggcctcaggattggccccacatcaccacgccaacaggaccacagcgcactggctccaccccatctctgccatctccactcccctccttttcatgctgtctcccagaaaagctgccagggctctggccttggaattggacttgagatggggagcagacaggggaggatggggaatgtgggacacggtgtggtgggcatgagggcttggaggggtggggatgagggctcaagacacgagagaagatgtccacggtcccaggtggttaacaaagttctggcagctaaaagatgaccgcgttgaaggccacctccttctggctgggaggggcagaactgtggacagattctcaatgcctttttgaagttctgacccaccaaagaccttctgccttcaccctcctccccacctgatgtccctctgtgtctgatagtgatgttggtgaaagttcgtagaccccaggagtagagaaaagcaactggactgactttcttaccagcagttacctagactgaggcaagctgtgtggactcacccaagtatatttcagtactgtcaggctgtgacatcttagctaccttgtatttcaagtgcatggccctgtctagagatatgcacagagagaaaagcagagggagggagggagggggtcttcagcaagcaccagcccccagcagagtgagctgaagctcctgaggagggttcccgaaggggggcgctcagagatgggggcagggggcggggagaggagagtctgccttatgtcccttccttgtggacttcacatggtcatgcaggaagtgaggatgggtgtccagcgggggccgaggccactagtatcctcctgcttccccctgccattctccagggctggactgaccctatggactgggagagagtgcctgaggccaccatgccacagtcaaagggggtcctatctcagaaggtggcagcatccactgagatatcctcacccgaagggaaggaggctgctgggtagcaaataagccccttcttttcttggtgagttgatgacctccaatagctcccagtgtcatgggtacccagtacgcattagctggtgttgggttgattgagacctggggcagttcctggggcaagaagccagatgggagatgagatagaaagtgttaggagttatcctctttgcctggcctttgagaataacttactgtgtgactttgggcaagttccttccccactctgggcctcagtttctcacttgggaaagcaaggagtttgaccagatgatcacaatgggccttcctagctctggccaccaagaatttgtgaacattagagctcctggtctggtgggtagagccagagctgctgactggtctctctgcctccagaggggatttattggacctcagaggtggcagggccctatggagcaccaactgccctcaaccccaccctgtgcccaagactgggaagggattgatgtcaggctgtggccataggtagcatgagttgcccaaggagggacagagcatatctttgctgaggcttggctgaggggcttatgatagggcttgcagtacctcacagccccctgtgggcacagacaccctgaggtttacccaggcaaatatattgattagcaggacaagggctctctcctcagtttctgctcccttccatctctctcccatacttgtctgaaaagggagacaaaaaatcttatacaagtggcatctcaatcctttccagtccagcacctcctggggcaggcagtgtgacttatttcctgtggtgaaatcacctgtttcacaagcctggcagcgcgacttctgagtctcatgaccactcaacccaagggacccctccccagaccagaaccaagtcagctgggggctgtcgtactaccctgtccagtcttgagggcctagttgcaggtcccccaggcatccagcccctcctagagcttgctgggcaggctgcacctcatctgggcaggcgcagagctgatgaaatgctggagcaatgcatggcaaacatatgccctccagtgtcttctgaaacctttggggctgacacaagatcctttagtgtttgggatgacctctttcctgcagacttcttccccaccagtcttcatcgcttgccctgcttctcacttaggcagatgtcaaccagaatgagatacagccaatttggctttgatgacccagctgagagggaaatttagatacaattcaggaatatcatgcccaaaaatagtggtcccagcaaccaggacacagagggaagacctggatattgtcagtgattggtggagggggacatcttggaccctcctaggcctggtgtcacatctcccatctctcagaccccacagaggccaaggggccttggctctgacccaggttaaagagagccaccagcccccaggctcagggagctgaaaccacccatccgcagaaatctaagggcaaggagaaatagaaattgtctgttccttcccttcaaagtgtaaggcctcttccaggagcaactggagccaccacagcttctcagtgacattgggagggcttcgggcccaggaaaaacccaagccttttgtcctgagagccgagccacagcggatgcagtggcgtcagcatcccagagcggcagcttctctcctgcctgtcactggggactggttgctctccacccatccaggaggaaggggttaggtcccagtcttacactcttatagggtctcatggacataggcctatgcctgttctgatatctataattttttaaactcaaaaggaccaaaacactcctgaaccctcatctatacggcctgcactgggcttggtgtttcctcctggcccaggcagctccatctcttctgccattcctcctggacgaaagtggcaggaccccacctctaccacttccccacagggtcactgcacagcggcttcaaagacacgccctgttgaaggggaaacatcctccccccatcacactccaactcgtcaccccaaaagggaagtcaaagcacaggtccgtggggcctatggtttgtagacactgacacagtggttttcaaaccaggtgctgcggaacccctgatattccacagagctttgtcaggggatgctaaagtgggaagatgggagtggaggcaaaggataggtttccagccctcctcccatttccgccgccaccagaataactctgcttttatctgtcttgcctactgagatttcattttcaagctttctttgaagaagaacttcaaaccaccatctcgaggtttgatcttagaccagccagcacaggttctattcttgctgttcatgttggaatggctccagcgttccagtacaaagtgtctttgtgttggaacttgggtcacagacccaggcacaagcatttatacacacacacacacacacacacacacacacacacacacgtacatagttgatggtttttctagccaacccaccctgaagctctggccaaggtttgatttggacagggacctggtgctcagtggggatgggtcgtgaccctgatattggcccatgaagcatggggagctctggagcaaggaaacaggctcaatcccccactgaggacttgtgtctgcacccctatctggcaccccactttcctggcctaggcccaagggacacagcaggagaagcagtgtgataggagagaggctagggttaaattcatctttacacagcgccggatggatggaaatcttggctcacataaaagacagactcagggaggattttatgacaaaagtccctcctttgagggcaggattcccccaggaatcctggacactttagtgagaactggaccagcccttggcacaaaaccctgcctgccctgtcccccactcccaccccccagggaattctaggtgaaaatgtgaagctcagggcacagcaagcgcatgacacgggtgtattacattcggtccgagtgtgtccttagtttccctgtgtgcaaaatggggctagtccaggctcttcccacctcactgggacaattgcaagggtcataggagaggtgggtatgataggtggtcatatgaggtggtgagtatgagaggtgggtgcctcacaaactcggggtatggtcctgacctgcatggcagatgagcagagcacttgggaacgagcataggaagtgccatcttcccgggcatctctgctcagtgttaaggtctagccacagacactgtgggacctgcctcttcctatggaatgggggcctgcatgggttgtgtcctggggcaggagtgagggatggctgggaagaatctccaggtctgtggcccttgtgttgagtgattattttgtgacactctcattcctggaccacctgccaggtttatctgttatacctgtggcattcttattatgtcagacaagttattatagttcattcaactctaacaaatgaacaaaagaacaataaataggaggccattaaaggtcttttgtggcagag

SEQ ID NO: 364881 - DNA, 517 bp, Homo sapiens
ggcccgagtcctgatgtgactgtccccactgccacaggtggcatccacatgtgccagccagacaggcctttctgctcatggtcagccccagaggccagagacctcagagagggtggttctccccggccccagagccatactctgagtcacatctggccgggcctctggataagcctactctccctgcccctgcaaacacaccacattttccttgtctctcccaccagtgatgacgacattgtatttgaggactttgctcgccagagactgaaaggcatgaaggatgacaaggaggaagaggaggatggtaccggctctccacagctcaacaacagatagacgggccggccctgcctccacgtggctccggctccactctcgtgcactcggatgcttactcgtcttcttcctgttctggtttcttttcccctttgttcttccagtttctaccagggggccccgtgggcttccagatcacggtgatgaacctctggcctcaggattggccccacatcac

SEQ ID NO: 364882 - DNA, 318 bp, Homo sapiens
accaggagtttaagaccaacctgggcaatacagcaagaccccatctctacaaaacatttaaaaattagccagatgtggtggtcacgtgcctgtagtcccagctattcaggaggctgaggcaggaggatcccttgaggcgaggagtttgaggctgtagtgagctatgatcatgatcgtgccactgcactccaacctgggtgacggagtgagactcttgtctcttaaaaaaaataaaaagtacaagagtagctgtagtatgccaccctctatataataaagaagatatatgaaattcatatgtatgtatctactttgtac

SEQ ID NO: 364883 - DNA, 2842 bp, Homo sapiens
acccagtgagcggctagggtgcagcaggagtttgggggatagccccagtcttgggatctctgtcctgggctggggactgccccctcccctggcctggctcctgacgcccgtgctgccggtgaaacgctgttgacatgtcctgaattattaagcgtggggagggctccggagcacatgctgagcggagcggctggggctgcgcggcgtggcggagcagcgctcgctccctcgctcactcgctcgctcgcagggacacacgcaggggctgacagctgtgctggtgctgataagggaagccacaaggagacgatcgaggagagagacaagcggcagcagaggcagcagcggcagaggcagcaccagggctgcggagctgctgggagtgggagtgactcccccacctcgggcccccaccctgtccctgtcctcttcccgcttgccctgagtttagaagagcagccgctgccaccactgccactcgggagggcaccagggctgctggctagggagggacagggcagggaggctctggccagtcccagcagccggggacagatgccgatcgagattgtgtgcaaaatcaaatttgctgaggaggatgcgaaacccaaggagaaggaggcaggggatgagcagagcctcctcggggctgttgcccctggagcagccccccgagacctggccacctttgccagcaccagcaccctgcatggactgggccgggcctgtggcccaggcccccacggactgcgcagaaccctgtgggcactggccctactcacctcgctggctgccttcctgtaccaggcggctggcctggcccggggctacctgacccggcctcacctggtggcaatggaccccgctgccccagccccagtggcgggcttcccggctgtcaccctctgcaatatcaaccgcttccggcattcggcactcagcgatgccgacatcttccacctggccaatctgacagggctgccccccaaagaccgggatgggcaccgtgcggctggcctgcgctacccagagcctgacatggtagacatcctcaaccgcactggccaccagctcgccgacatgcttaagagctgcaacttcagtgggcatcactgctccgccagcaacttctctgtggtctatactcgctatgggaagtgttacaccttcaacgcggacccgcggagctcgctgcccagccgggcagggggcatgggcagtggcctggagatcatgctggacatccagcaggaggagtacctgcccatctggagggagacaaatgagacgtcgtttgaggcaggtattcgggtgcagatccacagccaggaggagccgccctacatccaccagctggggttcggggtgtccccaggcttccagacctttgtgtcctgccaggaacagcggctgacctacctgccccagccctggggcaactgccgcgcagagagtgagctcagggagcctgagcttcagggctactcggcctacagtgtgtctgcctgccggctgcgctgtgaaaaggaggccgtgcttcagcgctgccactgccggatggtgcacatgccagactccctgggtgggggccctgagggcccgtgcttctgccccaccccctgcaacctgacacgctatgggaaagagatctccatggtcaggatccccaacaggggctcagcccggtacctggcgaggaagtacaaccgcaacgagacctacatacgggagaacttcctggtcctagatgtcttctttgaggccctgacctctgaagccatggagcagcgagcagcctatggcctgtcagccctgctgggagacctcgggggacagatgggcctgttcattggggccagcatcctcacgttgctggagatcctcgactacatctatgaggtgtcctgggatcgactgaagcgggtatggaggcgtcccaagacccccctgcggacctccactgggggcatctccactttggggcttcaggagctgaaggaacagagtccctgcccgagcctgggccgagcggagggtgggggggtcagcagtctgctccccaatcaccaccacccccacggtcccccaggaggtctctttgaagattttgcttgctaggacggtgctgtgactgaaaggacccaggagtctgggacccctcctgggatccccagcacattctcctgctcctgggagaggcctgggggcggtgctcactgggagggccaggactcagttcctgctctcatcctcccctgccctgatgtcagctgctttgcacaaaggtccttcttgtccacaccccttatccccaggctggtgccccgggagggctggagaccaggccatgggccctcacggagaggaagggaaggaaggagagggagggggaggatagagcccatcccagccggggagggggagccctctgtacatttgtaaatatttagggaaagccgggtggggggaggggatacagatgtagaaggtgggtagggctacaggggtgggtgatttagggacagccagggtcccagccccaatgtcagcaggatagggagagccccaggactcaggagtgctgggctggtcctacttcctgcccctctccaggcccagctcccctcttggcagggggagaggatggcccagcaggcctggcccagctcccagttccccctgcaccagccccacccctagagtcccttctatagggagggggcaggagaccttccagacttcggctgagcttggagggtgggaagggagccttctcagtcctctctccctccagtctgattttataaagtgctgacgagattgggaataaagaggcataaag

SEQ ID NO: 364884 - DNA, 2421 bp, Homo sapiens
  misc_feature (1553)..(1553): n is a, c, g, or t
ggaagggtgatgagacctcagtgagaggaaaggagaggaagagctggagggggtgaggaagtaaggggagggaggcagagggttctgcttggtctccaggctaggaggcggtgcctggaggatacaggaacggggatcctctgatcaaggctggtctatactcgctatgggaagtgttacaccttcaacgcggacccgcggagctcgctgcccagccgggcagggggcatgggcagtggcctggagatcatgctggacatccagcaggaggagtacctgcccatctggagggagacaaatgagacgtcgtttgaggcaggtattcgggtgcagatccacagccaggaggagccgccctacatccaccagctggggttcggggtgtccccaggcttccagacctttgtgtcctgccaggaacagcggctgacctacctgccccagccctggggcaactgccgcgcagagagtgagctcagggagcctgagcttcagggctactcggcctacagtgtgtctgcctgccggctgcgctgtgaaaaggaggccgtgcttcagcgctgccactgccggatggtgcacatgccaggcaatgagaccatctgcccaccaaatatctacatcgagtgtgcagaccacacactggactccctgggtgggggccctgagggcccgtgcttctgccccaccccctgcaacctgacacgctatgggaaagagatctccatggtcaggatccccaacaggggctcagcccggtacctggcgaggaagtacaaccgcaacgagacctacatacgggagaacttcctggtcctagatgtcttctttgaggccctgacctctgaagccatggagcagcgagcagcctatggcctgtcagccctgctgggagacctcgggggacagatgggcctgttcattggggccagcatcctcacgttgctggagatcctcgactacatctatgaggcaagggccctggagaaggcagggtgggagtgggggccgtgggcaaagcagaagggggcagtgcggggtgcctggtggagctggcctggctggaaagtcaggttcagggttctctgccagggtcccctgactggctggcaggcctgagggctcagagtcaggagaaggggatgggtgaggaggaggagggtgtcctactgggagtttgctgtggcagtaagtcctgtgggcagctgggcatggtaaggctcacgcttctcctcaaccaaatttcctgagcccactgctgtccccgaccctgaaccccaaggtgtcctgggatcgactgaagcgggtatggaggcgtcccaagacccccctgcggacctccactgggggcatctccactttggggcttcaggagctgaaggaacaggtgaggacaagctctaaatgcctgcagcatgcagccacacctccccaggactgaatacatccattgtttctgaaccagcctgtggagggggccctggagcctctgcccgaggtgacaaggaaaggctggcggtgtgagccctgggggcaccacttgagctctcccngtcccactctctcttttctttctcctgcagagtccctgcccgagcctgggccgagcggagggtgggggggtcagcagtctgctccccaatcaccaccacccccacggtcccccaggaggtctctttgaagattttgcttgctaggacggtgctgtgactgaaaggacccaggagtctgggacccctcctgggatccccagcacattctcctgctcctgggagaggcctgggggcggtgctcactgggagggccaggactcagttcctgctctcatcctcccctgccctgatgtcagctgctttgcacaaaggtccttcttgtccacaccccttatccccaggctggtgccccgggagggctggagaccaggccatgggccctcacggagaggaagggaaggaaggagagggagggggaggatagagcccatcccagccggggagggggagccctctgtacatttgtaaatatttagggaaagccgggtggggggaggggatacagatgtagaaggtgggtagggctacaggggtgggtgatttagggacagccagggtcccagccccaatgtcagcaggatagggagagccccaggactcaggagtgctgggctggtcctacttcctgcccctctccaggcccagctcccctcttggcagggggagaggatggcccagcaggcctggcccagctcccagttccccctgcaccagccccacccctagagtcccttctatagggagggggcaggagaccttccagacttcggctgagcttggagggtgggaagggagccttctcagtcctctctccctccagtctgattttataaagtgctgacgagattgggaataaagaggcataaag

SEQ ID NO: 364885 - DNA, 2481 bp, Homo sapiens
acccagtgagcggctagggtgcagcaggagtttgggggatagccccagtcttgggatctctgtcctgggctggggactgccccctcccctggcctggctcctgacgcccgtgctgccggtgaaacgctgttgacatgtcctgaattattaagcgtggggagggctccggagcacatgctgagcggagcggctggggctgcgcggcgtggcggagcagcgctcgctccctcgctcactcgctcgctcgcagggacacacgcaggggctgacagctgtgctggtgctgataagggaagccacaaggagacgatcgaggagagagacaagcggcagcagaggcagcagcggcagaggcagcaccagggctgcggagctgctgggagtgggagtgactcccccacctcgggcccccaccctgtccctgtcctcttcccgcttgccctgagtttagaagagcagccgctgccaccactgccactcgggagggcaccagggctgctggctagggagggacagggcagggaggctctggccagtcccagcagccggggacagatgccgatcgagattgtgtgcaaaatcaaatttgctgaggaggatgcgaaacccaaggagaaggaggcaggggatgagcagagcctcctcggggctgttgcccctggagcagccccccgagacctggccacctttgccagcaccagcaccctgcatggactgggccgggcctgtggcccaggcccccacggactgcgcagaaccctgtgggcactggccctactcacctcgctggctgccttcctgtaccaggcggctggcctggcccggggctacctgacccggcctcacctggtggcaatggaccccgctgccccagccccagtggcgggcttcccggctgtcaccctctgcaatatcaaccgcttccggcattcggcactcagcgatgccgacatcttccacctggccaatctgacagggctgccccccaaagaccgggatgggcaccgtgcggctggcctgcgctacccagagcctgacatggtagacatcctcaaccgcactggccaccagctcgccgacatgcttaagagctgcaacttcagtgggcatcactgctccgccagcaacttctctgtggtctatactcgctatgggaagtgttacaccttcaacgcggacccgcggagctcgctgcccagccgggcagggggcatgggcagtggcctggagatcatgctggacatccagcaggaggagtacctgcccatctggagggagacaaatgagacgtcgtttgaggcaggtattcgggtgcagatccacagccaggaggagccgccctacatccaccagctggggttcggggtgtccccaggcttccagacctttgtgtcctgccaggaacagcggctgacctacctgccccagccctggggcaactgccgcgcagagagtgagctcagggagcctgagcttcagggctactcggcctacagtgtgtctgcctgccggctgcgctgtgaaaaggaggccgtgcttcagcgctgccactgccggatggtgcacatgccaggcaatgagaccatctgcccaccaaatatctacatcgagtgtgcagaccacacactgggtccgtgctgcctaccctttcctacctctccatcagcctcttcatgtctctgtccactcttctcctcactgtcttggatcctcccctcccaatctcttcctggagggttcttcctgggggttgagccttagcccatacttcagtggggtcggggagaggtctgcggacctctgcaggtacagacacttgggtaagtggaggcagcagggtggggggttgcagagaagccaggactgggagtgaaggtctgggcttctcatcttggttcagccaatgagctcacccactttgagaaagtgaaatgacttctctcttggtctcaggaaaaatgcattgctggctatcggtgtgggtaaggcaaaccccatctgtccacagatcttgcctgatctgcagttcatccatctatccatccattcatcgattcgcgcattctccagacctttacagcctgtgctgggtactggaggtgagagtgggggcgacagccctgcccttggagagcttacaccccggcagggctgtggacagccattcccacacagcccgtcaactcctggagaggggagcctcgggtgtgctgcaaggccccaaggaggggtgtgcagccctagcctgggaaggtagggaggattcctagaggaagggacacattagctgaggcttgatgggtgtataagagtcaggtgcaaagggggacatacactgaagacctgtggccagaaagagcatgctgtgtccggggcactgaaaggtctgtgtggctgcagggcagagaacaggggagggagtagaaagagtagaggagggaggccaggcacggtggctcacaagtgtagacccagcacttt

SEQ ID NO: 364886 - DNA, 3874 bp, Homo sapiens
  misc_feature (3006)..(3006): n is a, c, g, or t
acccagtgagcggctagggtgcagcaggagtttgggggatagccccagtcttgggatctctgtcctgggctggggactgccccctcccctggcctggctcctgacgcccgtgctgccggtgaaacgctgttgacatgtcctgaattattaagcgtggggagggctccggagcacatgctgagcggagcggctggggctgcgcggcgtggcggagcagcgctcgctccctcgctcactcgctcgctcgcagggacacacgcaggggctgacagctgtgctggtgctgataagggaagccacaaggagacgatcgaggagagagacaagcggcagcagaggcagcagcggcagaggcagcaccagggctgcggagctgctgggagtgggagtgactcccccacctcgggcccccaccctgtccctgtcctcttcccgcttgccctgagtttagaagagcagccgctgccaccactgccactcgggagggcaccagggctgctggctagggagggacagggcagggaggctctggccagtcccagcagccggggacagatgccgatcgagattgtgtgcaaaatcaaatttgctgaggaggatgcgaaacccaaggagaaggaggcaggggatgagcagagcctcctcggggctgttgcccctggagcagccccccgagacctggccacctttgccagcaccagcaccctgcatggactgggccgggcctgtggcccaggcccccacggactgcgcagaaccctgtgggcactggccctactcacctcgctggctgccttcctgtaccaggcggctggcctggcccggggctacctgacccggcctcacctggtggcaatggaccccgctgccccagccccagtggcgggcttcccggctgtcaccctctgcaatatcaaccgcttccggcattcggcactcagcgatgccgacatcttccacctggccaatctgacagggctgccccccaaagaccgggatgggcaccgtgcggctggcctgcgctacccagagcctgacatggtagacatcctcaaccgcactggccaccagctcgccgacatgcttaagagctgcaacttcagtgggcatcactgctccgccagcaacttctctgtggtctatactcgctatgggaagtgttacaccttcaacgcggacccgcggagctcgctgcccagccgggcagggggcatgggcagtggcctggagatcatgctggacatccagcaggaggagtacctgcccatctggagggagacaaatgagacgtcgtttgaggcaggtattcgggtgcagatccacagccaggaggagccgccctacatccaccagctggggttcggggtgtccccaggcttccagacctttgtgtcctgccaggaacagcggctgacctacctgccccagccctggggcaactgccgcgcagagagtgagctcagggagcctgagcttcagggctactcggcctacagtgtgtctgcctgccggctgcgctgtgaaaaggaggccgtgcttcagcgctgccactgccggatggtgcacatgccaggcaatgagaccatctgcccaccaaatatctacatcgagtgtgcagaccacacactgggtccgtgctgcctaccctttcctacctctccatcagcctcttcatgtctctgtccactcttctcctcactgtcttggatcctcccctcccaatctcttcctggagggttcttcctgggggttgagccttagcccatacttcagtggggtcggggagaggtctgcggacctctgcaggtacagacacttgggtaagtggaggcagcagggtggggggttgcagagaagccaggactgggagtgaaggtctgggcttctcatcttggttcagccaatgagctcacccactttgagaaagtgaaatgacttctctcttggtctcaggaaaaatgcattgctggctatcggtgtgggtaaggcaaaccccatctgtccacagatcttgcctgatctgcagttcatccatctatccatccattcatcgattcgcgcattctccagacctttacagcctgtgctgggtactggagactccctgggtgggggccctgagggcccgtgcttctgccccaccccctgcaacctgacacgctatgggaaagagatctccatggtcaggatccccaacaggggctcagcccggtacctggcgaggaagtacaaccgcaacgagacctacatacgggagaacttcctggtcctagatgtcttctttgaggccctgacctctgaagccatggagcagcgagcagcctatggcctgtcagccctgctgggagacctcgggggacagatgggcctgttcattggggccagcatcctcacgttgctggagatcctcgactacatctatgaggcaagggccctggagaaggcagggtgggagtgggggccgtgggcaaagcagaagggggcagtgcggggtgcctggtggagctggcctggctggaaagtcaggttcagggttctctgccagggtcccctgactggctggcaggcctgagggctcagagtcaggagaaggggatgggtgaggaggaggagggtgtcctactgggagtttgctgtggcagtaagtcctgtgggcagctgggcatggtaaggctcacgcttctcctcaaccaaatttcctgagcccactgctgtccccgaccctgaaccccaaggtgtcctgggatcgactgaagcgggtatggaggcgtcccaagacccccctgcggacctccactgggggcatctccactttggggcttcaggagctgaaggaacaggtgaggacaagctctaaatgcctgcagcatgcagccacacctccccaggactgaatacatccattgtttctgaaccagcctgtggagggggccctggagcctctgcccgaggtgacaaggaaaggctggcggtgtgagccctgggggcaccacttgagctctcccngtcccactctctcttttctttctcctgcagagtccctgcccgagcctgggccgagcggagggtgggggggtcagcagtctgctccccaatcaccaccacccccacggtcccccaggaggtctctttgaagattttgcttgctaggacggtgctgtgactgaaaggacccaggagtctgggacccctcctgggatccccagcacattctcctgctcctgggagaggcctgggggcggtgctcactgggagggccaggactcagttcctgctctcatcctcccctgccctgatgtcagctgctttgcacaaaggtccttcttgtccacaccccttatccccaggctggtgccccgggagggctggagaccaggccatgggccctcacggagaggaagggaaggaaggagagggagggggaggatagagcccatcccagccggggagggggagccctctgtacatttgtaaatatttagggaaagccgggtggggggaggggatacagatgtagaaggtgggtagggctacaggggtgggtgatttagggacagccagggtcccagccccaatgtcagcaggatagggagagccccaggactcaggagtgctgggctggtcctacttcctgcccctctccaggcccagctcccctcttggcagggggagaggatggcccagcaggcctggcccagctcccagttccccctgcaccagccccacccctagagtcccttctatagggagggggcaggagaccttccagacttcggctgagcttggagggtgggaagggagccttctcagtcctctctccctccagtctgattttataaagtgctgacgagattgggaataaagaggcataaag

SEQ ID NO: 364887 - DNA, 2899 bp, Homo sapiens
acccagtgagcggctagggtgcagcaggagtttgggggatagccccagtcttgggatctctgtcctgggctggggactgccccctcccctggcctggctcctgacgcccgtgctgccggtgaaacgctgttgacatgtcctgaattattaagcgtggggagggctccggagcacatgctgagcggagcggctggggctgcgcggcgtggcggagcagcgctcgctccctcgctcactcgctcgctcgcagggacacacgcaggggctgacagctgtgctggtgctgataagggaagccacaaggagacgatcgaggagagagacaagcggcagcagaggcagcagcggcagaggcagcaccagggctgcggagctgctgggagtgggagtgactcccccacctcgggcccccaccctgtccctgtcctcttcccgcttgccctgagtttagaagagcagccgctgccaccactgccactcgggagggcaccagggctgctggctagggagggacagggcagggaggctctggccagtcccagcagccggggacagatgccgatcgagattgtgtgcaaaatcaaatttgctgaggaggatgcgaaacccaaggagaaggaggcaggggatgagcagagcctcctcggggctgttgcccctggagcagccccccgagacctggccacctttgccagcaccagcaccctgcatggactgggccgggcctgtggcccaggcccccacggactgcgcagaaccctgtgggcactggccctactcacctcgctggctgccttcctgtaccaggcggctggcctggcccggggctacctgacccggcctcacctggtggcaatggaccccgctgccccagccccagtggcgggcttcccggctgtcaccctctgcaatatcaaccgcttccggcattcggcactcagcgatgccgacatcttccacctggccaatctgacagggctgccccccaaagaccgggatgggcaccgtgcggctggcctgcgctacccagagcctgacatggtagacatcctcaaccgcactggccaccagctcgccgacatgcttaagagctgcaacttcagtgggcatcactgctccgccagcaacttctctgtggtctatactcgctatgggaagtgttacaccttcaacgcggacccgcggagctcgctgcccagccgggcagggggcatgggcagtggcctggagatcatgctggacatccagcaggaggagtacctgcccatctggagggagacaaatgagacgtcgtttgaggcaggtattcgggtgcagatccacagccaggaggagccgccctacatccaccagctggggttcggggtgtccccaggcttccagacctttgtgtcctgccaggaacagcggctgacctacctgccccagccctggggcaactgccgcgcagagagtgagctcagggagcctgagcttcagggctactcggcctacagtgtgtctgcctgccggctgcgctgtgaaaaggaggccgtgcttcagcgctgccactgccggatggtgcacatgccaggcaatgagaccatctgcccaccaaatatctacatcgagtgtgcagaccacacactggactccctgggtgggggccctgagggcccgtgcttctgccccaccccctgcaacctgacacgctatgggaaagagatctccatggtcaggatccccaacaggggctcagcccggtacctggcgaggaagtacaaccgcaacgagacctacatacgggagaacttcctggtcctagatgtcttctttgaggccctgacctctgaagccatggagcagcgagcagcctatggcctgtcagccctgctgggagacctcgggggacagatgggcctgttcattggggccagcatcctcacgttgctggagatcctcgactacatctatgaggtgtcctgggatcgactgaagcgggtatggaggcgtcccaagacccccctgcggacctccactgggggcatctccactttggggcttcaggagctgaaggaacagagtccctgcccgagcctgggccgagcggagggtgggggggtcagcagtctgctccccaatcaccaccacccccacggtcccccaggaggtctctttgaagattttgcttgctaggacggtgctgtgactgaaaggacccaggagtctgggacccctcctgggatccccagcacattctcctgctcctgggagaggcctgggggcggtgctcactgggagggccaggactcagttcctgctctcatcctcccctgccctgatgtcagctgctttgcacaaaggtccttcttgtccacaccccttatccccaggctggtgccccgggagggctggagaccaggccatgggccctcacggagaggaagggaaggaaggagagggagggggaggatagagcccatcccagccggggagggggagccctctgtacatttgtaaatatttagggaaagccgggtggggggaggggatacagatgtagaaggtgggtagggctacaggggtgggtgatttagggacagccagggtcccagccccaatgtcagcaggatagggagagccccaggactcaggagtgctgggctggtcctacttcctgcccctctccaggcccagctcccctcttggcagggggagaggatggcccagcaggcctggcccagctcccagttccccctgcaccagccccacccctagagtcccttctatagggagggggcaggagaccttccagacttcggctgagcttggagggtgggaagggagccttctcagtcctctctccctccagtctgattttataaagtgctgacgagattgggaataaagaggcataaag

SEQ ID NO: 364888 - DNA, 2890 bp, Homo sapiens
  misc_feature (2022)..(2022): n is a, c, g, or t
ggaagggtgatgagacctcagtgagaggaaaggagaggaagagctggagggggtgaggaagtaaggggagggaggcagagggttctgcttggtctccaggctaggaggcggtgcctggaggatacaggaacggggatcctctgatcaaggctggtctatactcgctatgggaagtgttacaccttcaacgcggacccgcggagctcgctgcccagccgggcagggggcatgggcagtggcctggagatcatgctggacatccagcaggaggagtacctgcccatctggagggagacaaatgagacgtcgtttgaggcaggtattcgggtgcagatccacagccaggaggagccgccctacatccaccagctggggttcggggtgtccccaggcttccagacctttgtgtcctgccaggaacagcggctgacctacctgccccagccctggggcaactgccgcgcagagagtgagctcagggagcctgagcttcagggctactcggcctacagtgtgtctgcctgccggctgcgctgtgaaaaggaggccgtgcttcagcgctgccactgccggatggtgcacatgccaggcaatgagaccatctgcccaccaaatatctacatcgagtgtgcagaccacacactgggtccgtgctgcctaccctttcctacctctccatcagcctcttcatgtctctgtccactcttctcctcactgtcttggatcctcccctcccaatctcttcctggagggttcttcctgggggttgagccttagcccatacttcagtggggtcggggagaggtctgcggacctctgcaggtacagacacttgggtaagtggaggcagcagggtggggggttgcagagaagccaggactgggagtgaaggtctgggcttctcatcttggttcagccaatgagctcacccactttgagaaagtgaaatgacttctctcttggtctcaggaaaaatgcattgctggctatcggtgtgggtaaggcaaaccccatctgtccacagatcttgcctgatctgcagttcatccatctatccatccattcatcgattcgcgcattctccagacctttacagcctgtgctgggtactggagactccctgggtgggggccctgagggcccgtgcttctgccccaccccctgcaacctgacacgctatgggaaagagatctccatggtcaggatccccaacaggggctcagcccggtacctggcgaggaagtacaaccgcaacgagacctacatacgggagaacttcctggtcctagatgtcttctttgaggccctgacctctgaagccatggagcagcgagcagcctatggcctgtcagccctgctgggagacctcgggggacagatgggcctgttcattggggccagcatcctcacgttgctggagatcctcgactacatctatgaggcaagggccctggagaaggcagggtgggagtgggggccgtgggcaaagcagaagggggcagtgcggggtgcctggtggagctggcctggctggaaagtcaggttcagggttctctgccagggtcccctgactggctggcaggcctgagggctcagagtcaggagaaggggatgggtgaggaggaggagggtgtcctactgggagtttgctgtggcagtaagtcctgtgggcagctgggcatggtaaggctcacgcttctcctcaaccaaatttcctgagcccactgctgtccccgaccctgaaccccaaggtgtcctgggatcgactgaagcgggtatggaggcgtcccaagacccccctgcggacctccactgggggcatctccactttggggcttcaggagctgaaggaacaggtgaggacaagctctaaatgcctgcagcatgcagccacacctccccaggactgaatacatccattgtttctgaaccagcctgtggagggggccctggagcctctgcccgaggtgacaaggaaaggctggcggtgtgagccctgggggcaccacttgagctctcccngtcccactctctcttttctttctcctgcagagtccctgcccgagcctgggccgagcggagggtgggggggtcagcagtctgctccccaatcaccaccacccccacggtcccccaggaggtctctttgaagattttgcttgctaggacggtgctgtgactgaaaggacccaggagtctgggacccctcctgggatccccagcacattctcctgctcctgggagaggcctgggggcggtgctcactgggagggccaggactcagttcctgctctcatcctcccctgccctgatgtcagctgctttgcacaaaggtccttcttgtccacaccccttatccccaggctggtgccccgggagggctggagaccaggccatgggccctcacggagaggaagggaaggaaggagagggagggggaggatagagcccatcccagccggggagggggagccctctgtacatttgtaaatatttagggaaagccgggtggggggaggggatacagatgtagaaggtgggtagggctacaggggtgggtgatttagggacagccagggtcccagccccaatgtcagcaggatagggagagccccaggactcaggagtgctgggctggtcctacttcctgcccctctccaggcccagctcccctcttggcagggggagaggatggcccagcaggcctggcccagctcccagttccccctgcaccagccccacccctagagtcccttctatagggagggggcaggagaccttccagacttcggctgagcttggagggtgggaagggagccttctcagtcctctctccctccagtctgattttataaagtgctgacgagattgggaataaagaggcataaag

SEQ ID NO: 364889 - DNA, 1161 bp, Homo sapiens
tgagaagaagggagtgagactgctcagagaggcaggattcctgctgactccagggggacacctggcacctcagcttcctttcccacttctccaggctgcatggaggggtgccgggcaggggcctcctggaagggaacctcctgcagcctcaagcaccaggtcatgacatgacatctatccctttcccaggtgaccgactcctgcaggtggatggagtgattctgtgcggcctcacccacaagcaggctgtgcagtgcctgaagggtcctgggcaggttgcaagactggtcttagagagaagagtccccaggagtacacagcagtgtccttctgctaatgacagcatgggagatgaacgcacggctgtttccttggtaacagccttgcctggcaggccttcgagctgtgtctcagtgacagatggtcctaagtttgaagtcaaactaaaaaagaatgccaatggtttgggattcagtttcgtgcagatggagaaagagagctgcagccatctcaaaagtgatcttgtgaggattaagaggctctttccggggcagccagctgaggagaatggggccattgcagctggtgacattatcctggccgtgaatggaaggtccacggaaggcctcatcttccaggaggtgctgcatttactgagaggggccccacaggaagtcacgctcctcctttgccgaccccctccaggtgcgctgcctgagctggagcaggaatgggcagacacctgaactctcagctgacaaagaattcaccagggcaacatgtactgactcatgtaccagccccatcctggatcaagaggacagctggagggacagtgcctccccagatgcaggggaaggcctgggtctcaggccagagtcttcccaaaaggccatcagagaggcacaatggggccaaaacagagagagaccttgggccagttccttgacacattctcctgagtcccaccctcatttatgcaaacttcaccaagaaagggatgaatcaacattggcgacctctttggaaaaggatgtgaggcaaaactgctattcagtttgtgatatcatgagacttggaagatattccttctcatctcctctaaccagactttcgacagatattttctgagcaccttctctgcatgtctgcagtgctgtg

SEQ ID NO: 364890 - DNA, 1155 bp, Homo sapiens
tgttaagcttatgaacacctaatcttattgctcagtggagaatacaatctaaacgaacaggtgaatacagaagacagtgccagtcggagggtggcattaacaccagtgtgccatatggtggtatctatgtgaaatccattgttcctggaggaccagctgccaaggaagggcagatcctacagggtgaccgactcctgcaggtggatggagtgattctgtgcggcctcacccacaagcaggctgtgcagtgcctgaagggtcctgggcaggttgcaagactggtcttagagagaagagtccccaggagtacacagcagtgtccttctgctaatgacagcatgggagatgaacgcacggctgtttccttggtaacagccttgcctggcaggccttcgagctgtgtctcagtgacagatggtcctaagtttgaagtcaaactaaaaaagaatgccaatggtttgggattcagtttcgtgcagatggagaaagagagctgcagccatctcaaaagtgatcttgtgaggattaagaggctctttccggggcagccagctgaggagaatggggccattgcagctggtgacattatcctggccgtgaatggaaggtccacggaaggcctcatcttccaggaggtgctgcatttactgagaggggccccacaggaagtcacgctcctcctttgccgaccccctccaggtgcgctgcctgagctggagcaggaatgggcagacacctgaactctcagctgacaaagaattcaccagggcaacatgtactgactcatgtaccagccccatcctggatcaagaggacagctggagggacagtgcctccccagatgcaggggaaggcctgggtctcaggccagagtcttcccaaaaggccatcagagaggcacaatggggccaaaacagagagagaccttgggccagttccttgacacattctcctgagtcccaccctcatttatgcaaacttcaccaagaaagggatgaatcaacattggcgacctctttggaaaaggatgtgaggcaaaactgctattcagtttgtgatatcatgagacttggaagatattccttctcatctcctctaaccagactttcgacagatattttctgagcaccttctctgcatgtctgcagtgctgtg

SEQ ID NO: 364891 - DNA, 947 bp, Homo sapiens
taggagcctgggcggagcctggcgtcccctcccgcgtccggccgcgcccgtcctcctggctgcagagagactaccggccaccgccgccgccgccgccgcgagctgtccctgcggcgcgtctgccttggcggagccgaccgcagtgcgctcaggcgtccggtgcgtccccagcctccgccccggcgcgggggcgacggactcgcgcgtgcgcagcgccggaggggcgcgggctgggaccccctagccagcgcgtgcgccgatcgagcgcagggcgatgggtgggcgccgggcgccgggcgccaggcagtgatgggccttcccgcgctgcggccccactgaggaggaggctcggggacagcaggagcacgggctgcccgcgcggtgcggaccatggcgttcctggccgggccgcgcctgctggactgggccagctcgccgccgcacctgcagttcaataagttcgtgctgaccgggtaccggcccgccagcagcggctcgggctgcctgcgcagcctcttctacctgcacaacgaactgggcaacatctacacgcacggtgagccgcgtcccgcaacgcgcttcccacacccccggccgccctacctgcgttgggccgggggcactgaggccgaggagggccccagcgcccaagtccagggctgccccggccctggcaccgccagtagccgcggtgacaaagctgccattgtcccgggccgcgctgccagcttccgttttcccggcgggtgggggccgggtcaggagaggggagcagagtagggtctgagcctgcttaatccctctgagccccaggggtagggagcatggtgtccggcctctgtaatcccagcgccctgggaaccccctcccgccagcacccagccgggagatggtgttgactgcgatgaggagggcccgggaggagcctcccagcgccgccgtcctga

SEQ ID NO: 364892 - DNA, 2631 bp, Homo sapiens
taggagcctgggcggagcctggcgtcccctcccgcgtccggccgcgcccgtcctcctggctgcagagagactaccggccaccgccgccgccgccgccgcgagctgtccctgcggcgcgtctgccttggcggagccgaccgcagtgcgctcaggcgtccggtgcgtccccagcctccgccccggcgcgggggcgacggactcgcgcgtgcgcagcgccggaggggcgcgggctgggaccccctagccagcgcgtgcgccgatcgagcgcagggcgatgggtgggcgccgggcgccgggcgccaggcagtgatgggccttcccgcgctgcggccccactgaggaggaggctcggggacagcaggagcacgggctgcccgcgcggtgcggaccatggcgttcctggccgggccgcgcctgctggactgggccagctcgccgccgcacctgcagttcaataagttcgtgctgaccgggtaccggcccgccagcagcggctcgggctgcctgcgcagcctcttctacctgcacaacgaactgggcaacatctacacgcacggctccgtgctctatcacctctttatgtgccaccaagggggcagcgctgtgtacgcccggctcctcgccctggacatgtgtggggtctgccttgtcaacacccttggggccctgcccatcatccactgcaccctggcctgcaggccctggctgcgcccggctgccctggtgggctacactgtgttgtcgggtgtggccggctggcgtgctctcaccgccccctccaccagtgctcggctccgggcatttggatggcaggctgctgcccgcctactggtatttggggcccggggagtgggtctgggttcaggggctccaggctccctgccctgctacctgcgcatggacgcactggcgctgcttgggggactggtaaatgtagcccgtctgcccgagcgctggggacctggccgctttgactactggggcaactcccaccagatcatgcacctgctgagcgtgggctccatcctgcagctgcacgccggcgtcgtgcccgacctgctctgggctgcccaccacgcctgtccccgggactgagctgccatgccagcctgcccacagcagcctcctagagttagcaacaccaggtgttcctcccaactcgtctgcaaggggctggctccttggatgcttccagctcatgagatgtctcagcaggagccctgttcacccgttcttccctgtggactgacctcttccacccacgccgtggcgctccaacttccttccctgccttttccctccaagctcctattttactgtgtcagctggaaggaaacctttccctcttgggacctctttaccctctgtgacctgtggggttagaccagagagggactctggggtcacgtcttgctctgagagttcaagtcctgccaggccgccagcccagagcctcctcaccctatcctgttcctcccaccaggcctgtggccagtcttcctgatctccatctttctgccctgcataccagccctcccagcagccacaagcttgcccgccctggctccctctgcccagagactatggagtaaggcattcaggacaaaaggaccaagggggcgtggacccgtcttgtaccagctggccacaggcacaagggctgcagctgcttcttccaggaaactgacacagggagctcagcggcctcagatcctgggacccctgggccgtgcctgccctccaccttgagtgccatactcccaacagctccaggtacccaccgggggatgtgcctgctcaggaaacctctttgctccacacagcatggggcttcagctgctggcccaaggccaggagcgctgggttctgcagcagggctcagcctcaggggcgttaagaccctggatgacatcaataaagggacaggaagggccatgttgccacatgagcaagcttgggtgctcccaaggttcaaatactttttattagacacggccaggcagagaagaccatgggagttcccgaggggccccagctttcaagggcgacgggagagacacaggataaaaggttaaaagtgcagaggcagagtctggggctcaggttgggtctagggtgtcctcaaacaggctgaggaggttccgaggctcaaaggaggggaaggagccccgaggaggctctgagttgatgtcacttaggtccagggcatccctgggaggagagagtagtgacactcaggatccaaaagctagccctgcccaccccagcccctggacctgcttacctgggtgtgcacctgctccggggggtggaggtgctccccacagtccgggccaggacagcctcaggggagagtgaaggcctgcaggagggcaggcgagacaaggagggtgtccagggctagggagtgccggatgaaaccagctctgtccctgtgcaggctccaggctcccgcctgacaaacaggcagggagccacagtcagggacaataaaaacttggtgcactctgaaagcagcacttggacagccttcaaagtccttccatctggctgcactccaaggccccctctgtccttttcagaacacatggacttggaggcagatttgaaataaacttttagtaaatgtaa

SEQ ID NO: 364893 - DNA, 2840 bp, Homo sapiens
taggagcctgggcggagcctggcgtcccctcccgcgtccggccgcgcccgtcctcctggctgcagagagactaccggccaccgccgccgccgccgccgcgagctgtccctgcggcgcgtctgccttggcggagccgaccgcagtgcgctcaggcgtccggtgcgtccccagcctccgccccggcgcgggggcgacgggcgccaggcagtgatgggccttcccgcgctgcggccccactgaggaggaggctcggggacagcaggagcacgggctgcccgcgcggtgcggaccatggcgttcctggccgggccgcgcctgctggactgggccagctcgccgccgcacctgcagttcaataagttcgtgctgaccgggtaccggcccgccagcagcggctcgggctgcctgcgcagcctcttctacctgcacaacgaactgggcaacatctacacgcacgggctggccctgctgggcttcctggtgctggtgccaatgaccatgccctggggtcagctgggcaaggatggctggctgggaggcacacattgcgtggcctgccttgcaccccctgcaggctccgtgctctatcacctctttatgtgccaccaagggggcagcgctgtgtacgcccggctcctcgccctggacatgtgtggggtctgccttgtcaacacccttggggccctgcccatcatccactgcaccctggcctgcaggccctggctgcgcccggctgccctggtgggctacactgtgttgtcgggtgtggccggctggcgtgctctcaccgcccccacaatgaaataaagttattttctcattaaaaaaaaactttatttcagtgtggggtctgccttgtcaacacccttggggccctgcccatcatccactgcaccctggcctgcaggccctggctgcgcccggctgccctggtgggctacactgtgttgtcgggtgtggccggctggcgtgctctcaccgccccctccaccagtgctcggctccgggcatttggatggcaggctgctgcccgcctactggtatttggggcccggggagtgggtctgggttcaggggctccaggctccctgccctgctacctgcgcatggacgcactggcgctgcttgggggactggtaaatgtagcccgtctgcccgagcgctggggacctggccgctttgactactggggcaactcccaccagatcatgcacctgctgagcgtgggctccatcctgcagctgcacgccggcgtcgtgcccgacctgctctgggctgcccaccacgcctgtccccgggactgagctgccatgccagcctgcccacagcagcctcctagagttagcaacaccaggtgttcctcccaactcgtctgcaaggggctggctccttggatgcttccagctcatgagatgtctcagcaggagccctgttcacccgttcttccctgtggactgacctcttccacccacgccgtggcgctccaacttccttccctgccttttccctccaagctcctattttactgtgtcagctggaaggaaacctttccctcttgggacctctttaccctctgtgacctgtggggttagaccagagagggactctggggtcacgtcttgctctgagagttcaagtcctgccaggccgccagcccagagcctcctcaccctatcctgttcctcccaccaggcctgtggccagtcttcctgatctccatctttctgccctgcataccagccctcccagcagccacaagcttgcccgccctggctccctctgcccagagactatggagtaaggcattcaggacaaaaggaccaagggggcgtggacccgtcttgtaccagctggccacaggcacaagggctgcagctgcttcttccaggaaactgacacagggagctcagcggcctcagatcctgggacccctgggccgtgcctgccctccaccttgagtgccatactcccaacagctccaggtacccaccgggggatgtgcctgctcaggaaacctctttgctccacacagcatggggcttcagctgctggcccaaggccaggagcgctgggttctgcagcagggctcagcctcaggggcgttaagaccctggatgacatcaataaagggacaggaagggccatgttgccacatgagcaagcttgggtgctcccaaggttcaaatactttttattagacacggccaggcagagaagaccatgggagttcccgaggggccccagctttcaagggcgacgggagagacacaggataaaaggttaaaagtgcagaggcagagtctggggctcaggttgggtctagggtgtcctcaaacaggctgaggaggttccgaggctcaaaggaggggaaggagccccgaggaggctctgagttgatgtcacttaggtccagggcatccctgggaggagagagtagtgacactcaggatccaaaagctagccctgcccaccccagcccctggacctgcttacctgggtgtgcacctgctccggggggtggaggtgctccccacagtccgggccaggacagcctcaggggagagtgaaggcctgcaggagggcaggcgagacaaggagggtgtccagggctagggagtgccggatgaaaccagctctgtccctgtgcaggctccaggctcccgcctgacaaacaggcagggagccacagtcagggacaataaaaacttggtgcactctgaaagcagcacttggacagccttcaaagtccttccatctggctgcactccaaggccccctctgtccttttcagaacacatggacttggaggcagatttgaaataaacttttagtaaatgtaa

SEQ ID NO: 364894 - DNA, 2839 bp, Homo sapiens
ggtggagacctcccagaaagggctaggctggaatcaaactccccagggagaggtctggggagatgggacaagcccctcgaagcccccttcccttcattctggacttgtcttcccccacctggcctcacccctttatagaagataaaaaggcccagtgcctccatttgtctggacacttatggagaggggaggacttgggttgggaagagcaagccaagtggccccgggctggcatcactgctcatgtgtcctcttcacaactcaacttgaggtttcgctgccttagccttctcctgtgacctgcttgtatggggagagcagtgtgggagtgggacggcctaggcctgtcctctgccattgcttacctgctgggctcacccggggccggtcactcagcccctccaagtctgtttcctcacctgcaaagtggggatcatggtctctacttcccagaccatcctgagccatgataagtaaccagtgccaaaagccttttgcccagggcctgtctctggccaaggccaggccgccaactggatgacagcattacctggacctgtcttgccctgtcctgtgttgtgtctgaaccgtggtccccttgaggatgtgactgaaactatctggtagatgactgtctccctccctagggctggccctgctgggcttcctggtgctggtgccaatgaccatgccctggggtcagctgggcaaggatggctggctgggaggcacacattgcgtggcctgccttgcaccccctgcaggctccgtgctctatcacctctttatgtgccaccaagggggcagcgctgtgtacgcccggctcctcgccctggacatgtgtggggtctgccttgtcaacacccttggggccctgcccatcatccactgcaccctggcctgcaggccctggctgcgcccggctgccctggtgggctacactgtgttgtcgggtgtggccggctggcgtgctctcaccgccccctccaccagtgctcggctccgggcatttggatggcaggctgctgcccgcctactggtatttggggcccggggagtgggtctgggttcaggggctccaggctccctgccctgctacctgcgcatggacgcactggcgctgcttgggggactggtaaatgtagcccgtctgcccgagcgctggggacctggccgctttgactactggggcaactcccaccagatcatgcacctgctgagcgtgggctccatcctgcagctgcacgccggcgtcgtgcccgacctgctctgggctgcccaccacgcctgtccccgggactgagctgccatgccagcctgcccacagcagcctcctagagttagcaacaccaggtgttcctcccaactcgtctgcaaggggctggctccttggatgcttccagctcatgagatgtctcagcaggagccctgttcacccgttcttccctgtggactgacctcttccacccacgccgtggcgctccaacttccttccctgccttttccctccaagctcctattttactgtgtcagctggaaggaaacctttccctcttgggacctctttaccctctgtgacctgtggggttagaccagagagggactctggggtcacgtcttgctctgagagttcaagtcctgccaggccgccagcccagagcctcctcaccctatcctgttcctcccaccaggcctgtggccagtcttcctgatctccatctttctgccctgcataccagccctcccagcagccacaagcttgcccgccctggctccctctgcccagagactatggagtaaggcattcaggacaaaaggaccaagggggcgtggacccgtcttgtaccagctggccacaggcacaagggctgcagctgcttcttccaggaaactgacacagggagctcagcggcctcagatcctgggacccctgggccgtgcctgccctccaccttgagtgccatactcccaacagctccaggtacccaccgggggatgtgcctgctcaggaaacctctttgctccacacagcatggggcttcagctgctggcccaaggccaggagcgctgggttctgcagcagggctcagcctcaggggcgttaagaccctggatgacatcaataaagggacaggaagggccatgttgccacatgagcaagcttgggtgctcccaaggttcaaatactttttattagacacggccaggcagagaagaccatgggagttcccgaggggccccagctttcaagggcgacgggagagacacaggataaaaggttaaaagtgcagaggcagagtctggggctcaggttgggtctagggtgtcctcaaacaggctgaggaggttccgaggctcaaaggaggggaaggagccccgaggaggctctgagttgatgtcacttaggtccagggcatccctgggaggagagagtagtgacactcaggatccaaaagctagccctgcccaccccagcccctggacctgcttacctgggtgtgcacctgctccggggggtggaggtgctccccacagtccgggccaggacagcctcaggggagagtgaaggcctgcaggagggcaggcgagacaaggagggtgtccagggctagggagtgccggatgaaaccagctctgtccctgtgcaggctccaggctcccgcctgacaaacaggcagggagccacagtcagggacaataaaaacttggtgcactctgaaagcagcacttggacagccttcaaagtccttccatctggctgcactccaaggccccctctgtccttttcagaacacatggacttggaggcagatttgaaataaacttttagtaaatgtaa

SEQ ID NO: 364895 - DNA, 2805 bp, Homo sapiens
taggagcctgggcggagcctggcgtcccctcccgcgtccggccgcgcccgtcctcctggctgcagagagactaccggccaccgccgccgccgccgccgcgagctgtccctgcggcgcgtctgccttggcggagccgaccgcagtgcgctcaggcgtccggtgcgtccccagcctccgccccggcgcgggggcgacggactcgcgcgtgcgcagcgccggaggggcgcgggctgggaccccctagccagcgcgtgcgccgatcgagcgcagggcgatgggtgggcgccgggcgccgggcgccaggcagtgatgggccttcccgcgctgcggccccactgaggaggaggctcggggacagcaggagcacgggctgcccgcgcggtgcggaccatggcgttcctggccgggccgcgcctgctggactgggccagctcgccgccgcacctgcagttcaataagttcgtgctgaccgggtaccggcccgccagcagcggctcgggctgcctgcgcagcctcttctacctgcacaacgaactgggcaacatctacacgcacgggctggccctgctgggcttcctggtgctggtgccaatgaccatgccctggggtcagctgggcaaggatggctggctgggaggcacacattgcgtggcctgccttgcaccccctgcaggctccgtgctctatcacctctttatgtgccaccaagggggcagcgctgtgtacgcccggctcctcgccctggacatgtgtggggtctgccttgtcaacacccttggggccctgcccatcatccactgcaccctggcctgcaggccctggctgcgcccggctgccctggtgggctacactgtgttgtcgggtgtggccggctggcgtgctctcaccgccccctccaccagtgctcggctccgggcatttggatggcaggctgctgcccgcctactggtatttggggcccggggagtgggtctgggttcaggggctccaggctccctgccctgctacctgcgcatggacgcactggcgctgcttgggggactggtaaatgtagcccgtctgcccgagcgctggggacctggccgctttgactactggggcaactcccaccagatcatgcacctgctgagcgtgggctccatcctgcagctgcacgccggcgtcgtgcccgacctgctctgggctgcccaccacgcctgtccccgggactgagctgccatgccagcctgcccacagcagcctcctagagttagcaacaccaggtgttcctcccaactcgtctgcaaggggctggctccttggatgcttccagctcatgagatgtctcagcaggagccctgttcacccgttcttccctgtggactgacctcttccacccacgccgtggcgctccaacttccttccctgccttttccctccaagctcctattttactgtgtcagctggaaggaaacctttccctcttgggacctctttaccctctgtgacctgtggggttagaccagagagggactctggggtcacgtcttgctctgagagttcaagtcctgccaggccgccagcccagagcctcctcaccctatcctgttcctcccaccaggcctgtggccagtcttcctgatctccatctttctgccctgcataccagccctcccagcagccacaagcttgcccgccctggctccctctgcccagagactatggagtaaggcattcaggacaaaaggaccaagggggcgtggacccgtcttgtaccagctggccacaggcacaagggctgcagctgcttcttccaggaaactgacacagggagctcagcggcctcagatcctgggacccctgggccgtgcctgccctccaccttgagtgccatactcccaacagctccaggtacccaccgggggatgtgcctgctcaggaaacctctttgctccacacagcatggggcttcagctgctggcccaaggccaggagcgctgggttctgcagcagggctcagcctcaggggcgttaagaccctggatgacatcaataaagggacaggaagggccatgttgccacatgagcaagcttgggtgctcccaaggttcaaatactttttattagacacggccaggcagagaagaccatgggagttcccgaggggccccagctttcaagggcgacgggagagacacaggataaaaggttaaaagtgcagaggcagagtctggggctcaggttgggtctagggtgtcctcaaacaggctgaggaggttccgaggctcaaaggaggggaaggagccccgaggaggctctgagttgatgtcacttaggtccagggcatccctgggaggagagagtagtgacactcaggatccaaaagctagccctgcccaccccagcccctggacctgcttacctgggtgtgcacctgctccggggggtggaggtgctccccacagtccgggccaggacagcctcaggggagagtgaaggcctgcaggagggcaggcgagacaaggagggtgtccagggctagggagtgccggatgaaaccagctctgtccctgtgcaggctccaggctcccgcctgacaaacaggcagggagccacagtcagggacaataaaaacttggtgcactctgaaagcagcacttggacagccttcaaagtccttccatctggctgcactccaaggccccctctgtccttttcagaacacatggacttggaggcagatttgaaataaacttttagtaaatgtaaaaaaaaaaaataaaaaactccgagggaattaaaagtaggagggtgggggaaaaaggg

SEQ ID NO: 364896 - DNA, 2961 bp, Homo sapiens
taggagcctgggcggagcctggcgtcccctcccgcgtccggccgcgcccgtcctcctggctgcagagagactaccggccaccgccgccgccgccgccgcgagctgtccctgcggcgcgtctgccttggcggagccgaccgcagtgcgctcaggcgtccggtgcgtccccagcctccgccccggcgcgggggcgacggactcgcgcgtgcgcagcgccggaggggcgcgggctgggaccccctagccagcgcgtgcgccgatcgagcgcagggcgatgggtgggcgccgggcgccgggcgccaggcagtgatgggccttcccgcgctgcggccccactgaggaggaggctcggggacagcaggagcacgggctgcccgcgcggtgcggaccatggcgttcctggccgggccgcgcctgctggactgggccagctcgccgccgcacctgcagttcaataagttcgtgctgaccgggtaccggcccgccagcagcggctcgggctgcctgcgcagcctcttctacctgcacaacgaactgggcaacatctacacgcacgggctggccctgctgggcttcctggtgctggtgccaatgaccatgccctggggtcagctgggcaaggatggctggctgggaggcacacattgcgtggcctgccttgcaccccctgcaggctccgtgctctatcacctctttatgtgccaccaagggggcagcgctgtgtacgcccggctcctcgccctggacatgtgtggggtctgccttgtcaacacccttggggccctgcccatcatccactgcaccctggcctgcaggccctggctgcgcccggctgccctggtgggctacactgtgttgtcgggtgtggccggctggcgtgctctcaccgccccctccaccagtgctcggctccgggcatttggatggcaggctgctgcccgcctactggtatttggggcccggggagtgggtctgggttcaggggctccaggctccctgccctgctacctgcgcatggacgcactggcgctgcttgggggactggtaaatgtagcccgtctgcccgagcgctggggacctggccgctttgactactggggcaactcccaccagatcatgcacctgctgagcgtgggctccatcctgcagctgcacgccggcgtcgtgcccgacctgctctgggctgcccaccacgcctgtccccgggactgagctgccatgccagcctgcccacagcagcctcctagagttagcaacaccaggtgttcctcccaactcgtctgcaaggggctggctccttggatgcttccagctcatgagatgtctcagcaggagccctgttcacccgttcttccctgtggactgacctcttccacccacgccgtggcgctccaacttccttccctgccttttccctccaagctcctattttactgtgtcagctggaaggaaacctttccctcttgggacctctttaccctctgtgacctgtggggttagaccagagagggactctggggtcacgtcttgctctgagagttcaagtcctgccaggccgccagcccagagcctcctcaccctatcctgttcctcccaccaggcctgtggccagtcttcctgatctccatctttctgccctgcataccagccctcccagcagccacaagcttgcccgccctggctccctctgcccagagactatggagtaaggcattcaggacaaaaggaccaagggggcgtggacccgtcttgtaccagctggccacaggcacaagggctgcagctgcttcttccaggaaactgacacagggagctcagcggcctcagatcctgggacccctgggccgtgcctgccctccaccttgagtgccatactcccaacagctccaggtacccaccgggggatgtgcctgctcaggaaacctctttgctccacacagcatggggcttcagctgctggcccaaggccaggagcgctgggttctgcagcagggctcagcctcaggggcgttaagaccctggatgacatcaataaagggacaggaagggccatgttgccacatgagcaagcttgggtgctcccaaggttcaaatactttttattagacacggccaggcagagaagaccatgggagttcccgaggggccccagctttcaagggcgacgggagagacacaggataaaaggttaaaagtgcagaggcagagtctggggctcaggttgggtctagggtgtcctcaaacaggctgaggaggttccgaggctcaaaggaggggaaggagccccgaggaggctctgagttgatgtcacttaggtccagggcatccctgggaggagagagtagtgacactcaggatccaaaagctagccctgcccaccccagcccctggacctgcttacctgggtgtgcacctgctccggggggtggaggtgctccccacagtccgggccaggacagcctcaggggagagtgaaggcctgcaggagggcaggcgagacaaggagggtgtccagggctagggagtgccggatgaaaccagctctgtccctgtgcaggctccaggctcccgcctgacaaacaggcagggagccacagtcagggacaataaaaacttggtgcactctgaaagcagcacttggacagccttcaaagtccttccatctggctgcactccaaggccccctctgtccttttcagaacacatggacttggaggcagatttgaaataaacttttagtaaatgtaaaaaaaaaaaaaaaaaaaaaaaaaaaaaaaaaaaaaaaaaattatagtatttataaatacatttgttgttgtggccgggccccgcgaaattctctcgcttcaaccctattctcttttgagcttccctttttgcggagggccataccgcccttgttcccccccgttgccctctcgataggcgattcgcatacgagcccctattctcttttttttt

SEQ ID NO: 364897 - DNA, 2426 bp, Homo sapiens
taggagcctgggcggagcctggcgtcccctcccgcgtccggccgcgcccgtcctcctggctgcagagagactaccggccaccgccgccgccgccgccgcgagctgtccctgcggcgcgtctgccttggcggagccgaccgcagtgcgctcaggcgtccggtgcgtccccagcctccgccccggcgcgggggcgacggactcgcgcgtgcgcagcgccggaggggcgcgggctgggaccccctagccagcgcgtgcgccgatcgagcgcagggcgatgggtgggcgccgggcgccgggcgccaggcagtgatgggccttcccgcgctgcggccccactgaggaggaggctcggggacagcaggagcacgggctgcccgcgcggtgcggaccatggcgttcctggccgggccgcgcctgctggactgggccagctcgccgccgcacctgcagttcaataagttcgtgctgaccgggtaccggcccgccagcagcggctcgggctgcctgcgcagcctcttctacctgcacaacgaactgggcaacatctacacgcacgggctggccctgctgggcttcctggtgctggtgccaatgaccatgccctggggtcagctgggcaaggatggctggctgggaggcacacattgcgtggcctgccttgcaccccctgcaggctccgtgctctatcacctctttatgtgccaccaagggggcagcgctgtgtacgcccggctcctcgccctggacatgtgtggggtctgccttgtcaacacccttggggccctgcccatcatccactgcaccctggcctgcaggccctggctgcgcccggctgccctggtgggctacactgtgttgtcgggtgtggccggctggcgtgctctcaccgccccctccaccagtgctcggctccgggcatttggatggcaggctgctgcccgcctactggtatttggggcccggggagtgggtctgggttcaggggctccaggctccctgccctgctacctgcgcatggacgcactggcgctgcttgggggactggtaaatgtagcccgtctgcccgagcgctggggacctggccgctttgactactggggcaactcccaccagatcatgcacctgctgagcgtgggctccatcctgcagctgcacgccggcgtcgtgcccgacctgctctgggctgcccaccacgcctgtccccgggactgagctgccatgccagcctgcccacagcagcctcctagagttagcaacaccaggtgttcctcccaactcgtctgcaaggggctggctccttggatgcttccagctcatgagatgtctcagcaggagccctgttcacccgttcttccctgtggactgacctcttccacccacgccgtggcgctccaacttccttccctgccttttccctccaagctcctattttactgtgtcagctggaaggaaacctttccctcttgggacctctttaccctctgtgacctgtggggttagaccagatcctgggacccctgggccgtgcctgccctccaccttgagtgccatactcccaacagctccaggtacccaccgggggatgtgcctgctcaggaaacctctttgctccacacagcatggggcttcagctgctggcccaaggccaggagcgctgggttctgcagcagggctcagcctcaggggcgttaagaccctggatgacatcaataaagggacaggaagggccatgttgccacatgagcaagcttgggtgctcccaaggttcaaatactttttattagacacggccaggcagagaagaccatgggagttcccgaggggccccagctttcaagggcgacgggagagacacaggataaaaggttaaaagtgcagaggcagagtctggggctcaggttgggtctagggtgtcctcaaacaggctgaggaggttccgaggctcaaaggaggggaaggagccccgaggaggctctgagttgatgtcacttaggtccagggcatccctgggaggagagagtagtgacactcaggatccaaaagctagccctgcccaccccagcccctggacctgcttacctgggtgtgcacctgctccggggggtggaggtgctccccacagtccgggccaggacagcctcaggggagagtgaaggcctgcaggagggcaggcgagacaaggagggtgtccagggctagggagtgccggatgaaaccagctctgtccctgtgcaggctccaggctcccgcctgacaaacaggcagggagccacagtcagggacaataaaaacttggtgcactctgaaagcagcacttggacagccttcaaagtccttccatctggctgcactccaaggccccctctgtccttttcagaacacatggacttggaggcagatttgaaataaacttttagtaaatgtaa

SEQ ID NO: 364898 - DNA, 1434 bp, Homo sapiens
taggagcctgggcggagcctggcgtcccctcccgcgtccggccgcgcccgtcctcctggctgcagagagactaccggccaccgccgccgccgccgccgcgagctgtccctgcggcgcgtctgccttggcggagccgaccgcagtgcgctcaggcgtccggtgcgtccccagcctccgccccggcgcgggggcgacggactcgcgcgtgcgcagcgccggaggggcgcgggctgggaccccctagccagcgcgtgcgccgatcgagcgcagggcgatgggtgggcgccgggcgccgggcgccaggcagtgatgggccttcccgcgctgcggccccactgaggaggaggctcggggacagcaggagcacgggctgcccgcgcggtgcggaccatggcgttcctggccgggccgcgcctgctggactgggccagctcgccgccgcacctgcagttcaataagttcgtgctgaccgggtaccggcccgccagcagcggctcgggctgcctgcgcagcctcttctacctgcacaacgaactgggcaacatctacacgcacgggctggccctgctgggcttcctggtgctggtgccaatgaccatgccctggggtcagctgggcaaggatggctggctgggaggcacacattgcgtggcctgccttgcaccccctgcaggctccgtgctctatcacctctttatgtgccaccaagggggcagcgctgtgtacgcccggctcctcgccctggacatgtgtggggtctgccttgtcaacacccttggggccctgcccatcatccactgcaccctggcctgcaggccctggctgcgcccggctgccctggtgggctacactgtgttgtcgggtgtggccggctggcgtgctctcaccgccccctccaccagtgctcggctccgggcatttggatggcaggctgctgcccgcctactggtatttggggcccggggagtgggtctgggttcaggggctccaggctccctgccctgctacctgcgcatggacgcactggcgctgcttgggggactggtaaatgtagcccgtctgcccgagcgctggggacctggccgctttgactactggggcaactcccaccagatcatgcacctgctgagcgtgggctccatcctgcagctgcacgccggcgtcgtgcccgacctgctctgggctgcccaccacgcctgtccccgggactgagctgccatgccagcctgcccacagcagcctcctagagttagcaacaccaggtgttcctcccaactcgtctgcaaggggctggctccttggatgcttccagctcatgagatgtctcagcaggagccctgttcacccgttcttccctgtggactgaccccctctgtccttttcagaacacatggacttggaggcagatttgaaataaacttttagtaaatgtaa

SEQ ID NO: 364899 - DNA, 2748 bp, Homo sapiens
taggagcctgggcggagcctggcgtcccctcccgcgtccggccgcgcccgtcctcctggctgcagagagactaccggccaccgccgccgccgccgccgcgagctgtccctgcggcgcgtctgccttggcggagccgaccgcagtgcgctcaggcgtccggtgcgtccccagcctccgccccggcgcgggggcgacggactcgcgcgtgcgcagcgccggaggggcgcgggctgggaccccctagccagcgcgtgcgccgatcgagcgcagggcgatgggtgggcgccgggcgccgggcgccaggcagtgatgggccttcccgcgctgcggccccactgaggaggaggctcggggacagcaggagcacgggctgcccgcgcggtgcggaccatggcgttcctggccgggccgcgcctgctggactgggccagctcgccgccgcacctgcagttcaataagttcgtgctgaccgggtaccggcccgccagcagcggctcgggctgcctgcgcagcctcttctacctgcacaacgaactgggcaacatctacacgcacgggctggccctgctgggcttcctggtgctggtgccaatgaccatgccctggggtcagctgggcaaggatggctggctgggaggcacacattgcgtggcctgccttgcaccccctgcaggctccgtgctctatcacctctttatgtgccaccaagggggcagcgctgtgtacgcccggctcctcgccctggacatgtgtggggtctgccttgtcaacacccttggggccctgcccatcatccactgcaccctggcctgcaggccctggctgcgcccggctgccctggtgggctacactgtgttgtcgggtgtggccggctggcgtgctctcaccgccccctccaccagtgctcggctccgggcatttggatggcaggctgctgcccgcctactggtatttggggcccggggagtgggtctgggttcaggggctccaggctccctgccctgctacctgcgcatggacgcactggcgctgcttgggggactggtaaatgtagcccgtctgcccgagcgctggggacctggccgctttgactactggggcaactcccaccagatcatgcacctgctgagcgtgggctccatcctgcagctgcacgccggcgtcgtgcccgacctgctctgggctgcccaccacgcctgtccccgggactgagctgccatgccagcctgcccacagcagcctcctagagttagcaacaccaggtgttcctcccaactcgtctgcaaggggctggctccttggatgcttccagctcatgagatgtctcagcaggagccctgttcacccgttcttccctgtggactgacctcttccacccacgccgtggcgctccaacttccttccctgccttttccctccaagctcctattttactgtgtcagctggaaggaaacctttccctcttgggacctctttaccctctgtgacctgtggggttagaccagagagggactctggggtcacgtcttgctctgagagttcaagtcctgccaggccgccagcccagagcctcctcaccctatcctgttcctcccaccaggcctgtggccagtcttcctgatctccatctttctgccctgcataccagccctcccagcagccacaagcttgcccgccctggctccctctgcccagagactatggagtaaggcattcaggacaaaaggaccaagggggcgtggacccgtcttgtaccagctggccacaggcacaagggctgcagctgcttcttccaggaaactgacacagggagctcagcggcctcagatcctgggacccctgggccgtgcctgccctccaccttgagtgccatactcccaacagctccaggtacccaccgggggatgtgcctgctcaggaaacctctttgctccacacagcatggggcttcagctgctggcccaaggccaggagcgctgggttctgcagcagggctcagcctcaggggcgttaagaccctggatgacatcaataaagggacaggaagggccatgttgccacatgagcaagcttgggtgctcccaaggttcaaatactttttattagacacggccaggcagagaagaccatgggagttcccgaggggccccagctttcaagggcgacgggagagacacaggataaaaggttaaaagtgcagaggcagagtctggggctcaggttgggtctagggtgtcctcaaacaggctgaggaggttccgaggctcaaaggaggggaaggagccccgaggaggctctgagttgatgtcacttaggtccagggcatccctgggaggagagagtagtgacactcaggatccaaaagctagccctgcccaccccagcccctggacctgcttacctgggtgtgcacctgctccggggggtggaggtgctccccacagtccgggccaggacagcctcaggggagagtgaaggcctgcaggagggcaggcgagacaaggagggtgtccagggctagggagtgccggatgaaaccagctctgtccctgtgcaggctccaggctcccgcctgacaaacaggcagggagccacagtcagggacaataaaaacttggtgcactctgaaagcagcacttggacagccttcaaagtccttccatctggctgcactccaaggccccctctgtccttttcagaacacatggacttggaggcagatttgaaataaacttttagtaaatgtaa

SEQ ID NO: 364900 - DNA, 2351 bp, Homo sapiens
taggagcctgggcggagcctggcgtcccctcccgcgtccggccgcgcccgtcctcctggctgcagagagactaccggccaccgccgccgccgccgccgcgagctgtccctgcggcgcgtctgccttggcggagccgaccgcagtgcgctcaggcgtccgggctggccctgctgggcttcctggtgctggtgccaatgaccatgccctggggtcagctgggcaaggatggctggctgggaggcacacattgcgtggcctgccttgcaccccctgcaggctccgtgctctatcacctctttatgtgccaccaagggggcagcgctgtgtacgcccggctcctcgccctggacatgtgtggggtctgccttgtcaacacccttggggccctgcccatcatccactgcaccctggcctgcaggccctggctgcgcccggctgccctggtgggctacactgtgttgtcgggtgtggccggctggcgtgctctcaccgccccctccaccagtgctcggctccgggcatttggatggcaggctgctgcccgcctactggtatttggggcccggggagtgggtctgggttcaggggctccaggctccctgccctgctacctgcgcatggacgcactggcgctgcttgggggactggtaaatgtagcccgtctgcccgagcgctggggacctggccgctttgactactggggcaactcccaccagatcatgcacctgctgagcgtgggctccatcctgcagctgcacgccggcgtcgtgcccgacctgctctgggctgcccaccacgcctgtccccgggactgagctgccatgccagcctgcccacagcagcctcctagagttagcaacaccaggtgttcctcccaactcgtctgcaaggggctggctccttggatgcttccagctcatgagatgtctcagcaggagccctgttcacccgttcttccctgtggactgacctcttccacccacgccgtggcgctccaacttccttccctgccttttccctccaagctcctattttactgtgtcagctggaaggaaacctttccctcttgggacctctttaccctctgtgacctgtggggttagaccagagagggactctggggtcacgtcttgctctgagagttcaagtcctgccaggccgccagcccagagcctcctcaccctatcctgttcctcccaccaggcctgtggccagtcttcctgatctccatctttctgccctgcataccagccctcccagcagccacaagcttgcccgccctggctccctctgcccagagactatggagtaaggcattcaggacaaaaggaccaagggggcgtggacccgtcttgtaccagctggccacaggcacaagggctgcagctgcttcttccaggaaactgacacagggagctcagcggcctcagatcctgggacccctgggccgtgcctgccctccaccttgagtgccatactcccaacagctccaggtacccaccgggggatgtgcctgctcaggaaacctctttgctccacacagcatggggcttcagctgctggcccaaggccaggagcgctgggttctgcagcagggctcagcctcaggggcgttaagaccctggatgacatcaataaagggacaggaagggccatgttgccacatgagcaagcttgggtgctcccaaggttcaaatactttttattagacacggccaggcagagaagaccatgggagttcccgaggggccccagctttcaagggcgacgggagagacacaggataaaaggttaaaagtgcagaggcagagtctggggctcaggttgggtctagggtgtcctcaaacaggctgaggaggttccgaggctcaaaggaggggaaggagccccgaggaggctctgagttgatgtcacttaggtccagggcatccctgggaggagagagtagtgacactcaggatccaaaagctagccctgcccaccccagcccctggacctgcttacctgggtgtgcacctgctccggggggtggaggtgctccccacagtccgggccaggacagcctcaggggagagtgaaggcctgcaggagggcaggcgagacaaggagggtgtccagggctagggagtgccggatgaaaccagctctgtccctgtgcaggctccaggctcccgcctgacaaacaggcagggagccacagtcagggacaataaaaacttggtgcactctgaaagcagcacttggacagccttcaaagtccttccatctggctgcactccaaggccccctctgtccttttcagaacacatggacttggaggcagatttgaaataaacttttagtaaatgtaa

SEQ ID NO: 364901 - DNA, 2547 bp, Homo sapiens
taggagcctgggcggagcctggcgtcccctcccgcgtccggccgcgcccgtcctcctggctgcagagagactaccggccaccgccgccgccgccgccgcgagctgtccctgcggcgcgtctgccttggcggagccgaccgcagtgcgctcaggcgtccggtgcgtccccagcctccgccccggcgcgggggcgacggactcgcgcgtgcgcagcgccggaggggcgcgggctgggaccccctagccagcgcgtgcgccgatcgagcgcagggcgatgggtgggcgccgggcgccgggcgccaggcagtgatgggccttcccgcgctgcggccccactgaggaggaggctcggggacagcaggagcacgggctgcccgcgcggtgcggaccatggcgttcctggccgggccgcgcctgctggactgggccagctcgccgccgcacctgcagttcaataagttcgtgctgaccgggtaccggcccgccagcagcggctcgggctgcctgcgcagcctcttctacctgcacaacgaactgggcaacatctacacgcacgggctggccctgctgggcttcctggtgctggtgccaatgaccatgccctggggtcagctgggcaaggatggctggctgggaggcacacattgcgtggcctgccttgcaccccctgcaggctccgtgctctatcacctctttatgtgccaccaagggggcagcgctgtgtacgcccggctcctcgccctggacatgtgtggggtctgccttgtcaacacccttggggccctgcccatcatccactgcaccctggcctgcaggccctggctgcgcccggctgccctggtgggctacactgtgttgtcgggtgtggccggctggcgtgctctcaccgccccctccaccagtgctcggctccgggcatttggatggcaggctgctgcccgcctactgctgcacgccggcgtcgtgcccgacctgctctgggctgcccaccacgcctgtccccgggactgagctgccatgccagcctgcccacagcagcctcctagagttagcaacaccaggtgttcctcccaactcgtctgcaaggggctggctccttggatgcttccagctcatgagatgtctcagcaggagccctgttcacccgttcttccctgtggactgacctcttccacccacgccgtggcgctccaacttccttccctgccttttccctccaagctcctattttactgtgtcagctggaaggaaacctttccctcttgggacctctttaccctctgtgacctgtggggttagaccagagagggactctggggtcacgtcttgctctgagagttcaagtcctgccaggccgccagcccagagcctcctcaccctatcctgttcctcccaccaggcctgtggccagtcttcctgatctccatctttctgccctgcataccagccctcccagcagccacaagcttgcccgccctggctccctctgcccagagactatggagtaaggcattcaggacaaaaggaccaagggggcgtggacccgtcttgtaccagctggccacaggcacaagggctgcagctgcttcttccaggaaactgacacagggagctcagcggcctcagatcctgggacccctgggccgtgcctgccctccaccttgagtgccatactcccaacagctccaggtacccaccgggggatgtgcctgctcaggaaacctctttgctccacacagcatggggcttcagctgctggcccaaggccaggagcgctgggttctgcagcagggctcagcctcaggggcgttaagaccctggatgacatcaataaagggacaggaagggccatgttgccacatgagcaagcttgggtgctcccaaggttcaaatactttttattagacacggccaggcagagaagaccatgggagttcccgaggggccccagctttcaagggcgacgggagagacacaggataaaaggttaaaagtgcagaggcagagtctggggctcaggttgggtctagggtgtcctcaaacaggctgaggaggttccgaggctcaaaggaggggaaggagccccgaggaggctctgagttgatgtcacttaggtccagggcatccctgggaggagagagtagtgacactcaggatccaaaagctagccctgcccaccccagcccctggacctgcttacctgggtgtgcacctgctccggggggtggaggtgctccccacagtccgggccaggacagcctcaggggagagtgaaggcctgcaggagggcaggcgagacaaggagggtgtccagggctagggagtgccggatgaaaccagctctgtccctgtgcaggctccaggctcccgcctgacaaacaggcagggagccacagtcagggacaataaaaacttggtgcactctgaaagcagcacttggacagccttcaaagtccttccatctggctgcactccaaggccccctctgtccttttcagaacacatggacttggaggcagatttgaaataaacttttagtaaatgtaa

SEQ ID NO: 364902 - DNA, 2805 bp, Homo sapiens
taggagcctgggcggagcctggcgtcccctcccgcgtccggccgcgcccgtcctcctggctgcagagagactaccggccaccgccgccgccgccgccgcgagctgtccctgcggcgcgtctgccttggcggagccgaccgcagtgcgctcaggcgtccggtgcgtccccagcctccgccccggcgcgggggcgacggactcgcgcgtgcgcagcgccggaggggcgcgggctgggaccccctagccagcgcgtgcgccgatcgagcgcagggcgatgggtgggcgccgggcgccgggcgccaggcagtgatgggccttcccgcgctgcggccccactgaggaggaggctcggggacagcaggagcacgggctgcccgcgcggtgcggaccatggcgttcctggccgggccgcgcctgctggactgggccagctcgccgccgcacctgcagttcaataagttcgtgctgaccgggtaccggcccgccagcagcggctcgggctgcctgcgcagcctcttctacctgcacaacgaactgggcaacatctacacgcacgggctggccctgctgggcttcctggtgctggtgccaatgaccatgccctggggtcagctgggcaaggatggctggctgggaggcacacattgcgtggcctgccttgcaccccctgcaggctccgtgctctatcacctctttatgtgccaccaagggggcagcgctgtgtacgcccggctcctcgccctggacatgtgtggggtctgccttgtcaacacccttggggccctgcccatcatccactgcaccctggcctgcaggccctggctgcgcccggctgccctggtgggctacactgtgttgtcgggtgtggccggctggcgtgctctcaccgccccctccaccagtgctcggctccgggcatttggatggcaggctgctgcccgcctactggtatttggggcccggggagtgggtctgggttcaggggctccaggctccctgccctgctacctgcgcatggacgcactggcgctgcttgggggactggtaaatgtagcccgtctgcccgagcgctggggacctggccgctttgactatgtggtgcaagttacccaaccatgaatcatagacaaccatcgcattgaagcagatggagcatccaataccttgcaatgcattgcaaacaagacctggcagtctggttgccactgacccttgactcttgcgtgcttgacccacacacagccctgtacccccgtgtgactagcagcttgccattgacatgcctgcccacagcagcctcctagagttagcaacaccaggtgttcctcccaactcgtctgcaaggggctggctccttggatgcttccagctcatgagatgtctcagcaggagccctgttcacccgttcttccctgtggactgacctcttccacccacgccgtggcgctccaacttccttccctgccttttccctccaagctcctattttactgtgtcagctggaaggaaacctttccctcttgggacctctttaccctctgtgacctgtggggttagaccagagagggactctggggtcacgtcttgctctgagagttcaagtcctgccaggccgccagcccagagcctcctcaccctatcctgttcctcccaccaggcctgtggccagtcttcctgatctccatctttctgccctgcataccagccctcccagcagccacaagcttgcccgccctggctccctctgcccagagactatggagtaaggcattcaggacaaaaggaccaagggggcgtggacccgtcttgtaccagctggccacaggcacaagggctgcagctgcttcttccaggaaactgacacagggagctcagcggcctcagatcctgggacccctgggccgtgcctgccctccaccttgagtgccatactcccaacagctccaggtacccaccgggggatgtgcctgctcaggaaacctctttgctccacacagcatggggcttcagctgctggcccaaggccaggagcgctgggttctgcagcagggctcagcctcaggggcgttaagaccctggatgacatcaataaagggacaggaagggccatgttgccacatgagcaagcttgggtgctcccaaggttcaaatactttttattagacacggccaggcagagaagaccatgggagttcccgaggggccccagctttcaagggcgacgggagagacacaggataaaaggttaaaagtgcagaggcagagtctggggctcaggttgggtctagggtgtcctcaaacaggctgaggaggttccgaggctcaaaggaggggaaggagccccgaggaggctctgagttgatgtcacttaggtccagggcatccctgggaggagagagtagtgacactcaggatccaaaagctagccctgcccaccccagcccctggacctgcttacctgggtgtgcacctgctccggggggtggaggtgctccccacagtccgggccaggacagcctcaggggagagtgaaggcctgcaggagggcaggcgagacaaggagggtgtccagggctagggagtgccggatgaaaccagctctgtccctgtgcaggctccaggctcccgcctgacaaacaggcagggagccacagtcagggacaataaaaacttggtgcactctgaaagcagcacttggacagccttcaaagtccttccatctggctgcactccaaggccccctctgtccttttcagaacacatggacttggaggcagatttgaaataaacttttagtaaatgtaa

SEQ ID NO: 364903 - DNA, 2099 bp, Homo sapiens
taggagcctgggcggagcctggcgtcccctcccgcgtccggccgcgcccgtcctcctggctgcagagagactaccggccaccgccgccgccgccgccgcgagctgtccctgcggcgcgtctgccttggcggagccgaccgcagtgcgctcaggcgtccggtgcgtccccagcctccgccccggcgcgggggcgacggactcgcgcgtgcgcagcgccggaggggcgcgggctgggaccccctagccagcgcgtgcgccgatcgagcgcagggcgatgggtgggcgccgggcgccgggcgccaggcagtgatgggccttcccgcgctgcggccccactgaggaggaggctcggggacagcaggagcacgggctgcccgcgcggtgcggaccatggcgttcctggccgggccgcgcctgctggactgggccagctcgccgccgcacctgcagttcaataagttcgtgctgaccgggtaccggcccgccagcagcggctcgggctgcctgcgcagcctcttctacctgcacaacgaactgggcaacatctacacgcacgggctggccctgctgggcttcctggtgctggtgccaatgaccatgccctggggtcagctgggcaaggatggctggctgggaggcacacattgcgtggcctgccttgcaccccctgcaggctccgtgctctatcacctctttatgtgccaccaagggggcagcgctgtgtacgcccggctcctcgccctggacatgtgtggggtctgccttgtcaacacccttggggccctgcccatcatccactgcaccctggcctgcaggccctggctgcgcccggctgccctggtgggctacactgtgttgtcgggtgtggccggctggcgtgctctcaccgccccctccaccagtgctcggctccgggcatttggatggcaggctgctgcccgcctactggtatttggggcccggggagtgggtctgggttcaggggctccaggctccctgccctgctacctgcgcatggacgcactggcgctgcttgggggactggtaaatgtagcccgtctgcccgagcgctggggacctggccgctttgactactggggcaactcccaccagatcatgcacctgctgagcgtgggctccatcctgcagctgcacgccggcgtcgtgcccgacctgctctgggctgcccaccacgcctgtccccgggactgagctgccatgccagcctgcccacagcagcctcctagagttagcaacaccaggtgttcctcccaactcgtctgcaaggggctggctccttggatgcttccagctcatgagatgtctcagcaggagccctgttcacccgttcttccctgtggactgacctcttccacccacgccgtggcgctccaacttccttccctgccttttccctccaagctcctattttactgtgtcagctggaaggaaacctttccctcttgggacctctttaccctctgtgacctgtggggttagaccagagagggactctggggtcacgtcttgctctgagagttcaagtcctgccaggccgccagcccagagcctcctcaccctatcctgttcctcccaccaggcctgtggccagtcttcctgatctccatctttctgccctgcataccagccctcccagcagccacaagcttgcccgccctggctccctctgcccagagactatggagtaaggcattcaggacaaaaggaccaagggggcgtggacccgtcttgtaccagctggccacaggcacaagggctgcagtgctccccacagtccgggccaggacagcctcaggggagagtgaaggcctgcaggagggcaggcgagacaaggagggtgtccagggctagggagtgccggatgaaaccagctctgtccctgtgcaggctccaggctcccgcctgacaaacaggcagggagccacagtcagggacaataaaaacttggtgcactctgaaagcagcacttggacagccttcaaagtccttccatctggctgcactccaaggccccctctgtccttttcagaacacatggacttggaggcagatttgaaataaacttttagtaaatgtaa

SEQ ID NO: 364904 - DNA, 403 bp, Homo sapiens
cagaggcagaggctgagccgctgcactggggattggggccagcgtggaatttcccctgctcatagggaaaagacaagacagaaaacggatggtgggagggctgatgactcttccaaatggctattcctgatgtttcctggcaatgagcagcctatgaaagggacaggttcacatgcgactacaccatgacttttgctgtgccccagtgtaacaggaggttatagacaacagttttatttgcatatataacctttgcttggcttattaacatattgctgatttaaattctgatacattgtcaaagtagaaagctgttcgggtttttggcaagcccagtataaaaaatgcaggcatgcaacaaataggtagtgaatattcacatttaaatacatgtaaatataaa

SEQ ID NO: 364905 - DNA, 274 bp, Homo sapiens
atcatcctcatctgtgttaaaaaggtatgggggtaggaaagccaaagacccatagaggggaggcccttccggggagacatgggggatgaggcggtgcagtgggtggggcctggccctggaggaacagctggggctttgatctttgaatcctcagatgaagtgttggaattaatcagtgaatttagtgtggttgctgggtgaaagatcaaaataaaaaatcatatttcagtatagcaaccatgagcaattagaaaaataaatttgtaattatacc

SEQ ID NO: 364906 - DNA, 430 bp, Homo sapiens
ttccgtctcaaaaaaaaaaaaaaaaagtttcactcagttgcatagtgagtgggtggtgggattctgtctagtaagcagtcaaagatacagactgggagcctggccaacgtggcaaaaccccgtctgtactaaaaatacaaaaaaactagctgtgtgtggtggcaaacgcctataattccagctcttttggaggccaaggcaggcagatcacttgaggtcaggagttcaagaccagcctggccaacattccaaaaccccatctctactaaaaatacaaaaattagccaggcatggtggcatgtgcctataatcccagctactcgagaggctgaagcaggagaattgcttgaacccaggaggcaagggttgtagtgagccaagatcacgccactgcactccagcctgggtgacagcctgggagaccctctca

SEQ ID NO: 364907 - DNA, 673 bp, Homo sapiens
cagactgagactccgtcacacacacaaaaaaaaaaaaaaaaaaagaaagaaagaccaagcagaatgcaaataaaaggtctgaagaacaagttttgttaatttgccacaacagactgtactccaggggaagctttgttgtccattaaagtgagttctctgggaagacgagtagtaaccgacttgcacgattttcctgccttttctatattctctacttactatgacaatacagcactagaatttccaagtgcttataccagcatagtgcaatgtatttaatgagaaaccacgtccaacaacaaagcgttataacttctccagctgagttagatgttttagtctgaaccaggaaaacagatgaagaaagttgaaccaagaattaaaagatttagagtttccactcagacctaagactctccactttgtttcagagggagtgggtatggttattctgaagaagaaggcggcccttatcctgaatgcccggtagcctccgtgggctggtgggtggttcctccggtccagcacctccataatttatgatcaaatgcccaagccaacaaactaatcctccccttctcccccacaaggaggcaacctttatgtcagaacaatgtgcccagaagaagccaaagacacaaggcacatccaaggcaaagacaatcttaattaa

SEQ ID NO: 364908 - DNA, 944 bp, Homo sapiens
gggggagcagcgggggaagtcgtggcgagattaagtaatgagaacttgggcccagttttttttccaagcctagaagggcagaatatgttcgtatcctttctgacctcccaggcatatgcaatgttttccagatttaggagacttcagaaaggtggggcagatagaatggagatggcaaagatctctttgggcatatatgggcctggcgaagtaatggaataatttctaattttcggagaagccctcatgccgggatggcagaagatgagcctgatgctaagagccccaagactgggggaagggcccccccaggtggtgctgaggctggggaacctaccacccttcttcagaggctccgaggtaccatttccaaggccgtgcagaacaaagtagaggggatccggcaagatggcagaagtagagcagaagaagaagcggaccttccgcaagttcacctaccgcggcgtggatctcgaccagctgctggacatgtcctacgagcagctgatgcagctgtacagtgcgcgccagcggcggcggctgaaccggggcctgcggcggaagcagcactccctgctgaagcgcctgcgcaaggccaagaaggaggcgccgcccatgggagaagccggaagtggtgaaacgcacctgcgggacatgatcatcctacccgagatggtgggcagcaatggtggggcgtctacaacggaagacttcaacaggtggagatcaagccggatgatcggccactacctgggcgattctcatcactaaagccggtaagctgcgccggattgggcaccatccccgttatcctttcagaggtcataaaagggcattgtcccaaaaaaaggggcgctaattccaggcacctgtacctttgaaggccaaggtaaaaaggggaaagcggaatggttggcctgtgtgacacaattttaggtgagaaa

SEQ ID NO: 364909 - DNA, 3586 bp, Homo sapiens
agtttctctttctcccttacctttattgttgcttgtgttggaaggcgactgttcagagttttccagatttaggagacttcagaaaggtggggcagatagaatggagatggcaaagatctctttgggcatatatgggcctggcgaagtaatggaataatttctaattttcggagaagccctcatgccgggatggcagaagatgagcctgatgctaagagccccaagactgggggaagggcccccccaggtggtgctgaggctggggaacctaccacccttcttcagaggctccgaggtaccatttccaaggccgtgcagaacaaagtagaggggatcctgcaagatgtacagaaattttctgacaatgacaagctgtatctctaccttcagctcccctcaggacccaccactggagacaaaagctcagagccaagtacactgagcaatgaggagtacatgtatgcctataggtggatccgcaaccacctggaagagcacactgacacctgtctgccaaagcaaagtgtttatgatgcctatcggaagtactgtgagagtcttgcctgttgccgcccactcagcacagccaactttggcaagatcatcagagagatcttccctgacatcaaagctcgaaggcttggtggccggggccagtccaaatattgctacagtggcataaggaggaagaccttggtgtctatgccacccctgcctggacttgacctaaagggttctgagagtccagaaatgggcccagaagtaaccccagcacctcgagatgaactggtggaggcagcgtgtgccctgacctgtgactgggcagagcggatcctgaaacggtccttcagttccatcgttgaggtcgcccgcttcctgctacagcagcatctcatctctgcccgatctgcacatgcccatgtgcttaaggccatggggcttgctgaagaggacgaacatgcacctcgggaacggtcatctaaaccaaagaatggtttagagaacccagagggtggagcccacaagaagccagagagactggcccagcctcctaaggatctggaagcccgaactggggccggtcctctcgcacgtggagagcggaagaagagtgtagttgagagctcggccccaggagccaataacctgcaggttaatgccctagtggctcggctgcctctgctccttccccgggcccctcgctcactaattccgccaatcccagtctctccacctattctggcccccaggctttcttcaggtgccctgaaagtggctacactgcctctgtctagtagggccggggcacccccagcagctgtgcccatcattaacatgatcttaccaactgttcctgctttgcctggacctggacctgggcctgggcgagctccacctgggggactcactcagccccggggcacagagaacagagaggtaggcataggtggtgaccaaggaccacatgacaagggtgtcaagaggacagctgaagtacctgtgagtgaggccagtgggcaggctccaccagctaaagcagcaaagcaggatatagaggatacagcaagtgatgccaaaaggaaacgggggcgccctcgaaaaaagtcaggtggaagtggggaaaggaattctacccctctcaagtcagcagctgccatggaatctgcccagtcctcaaggttaccatgggagacatggggctcaggaggggaaggcaactcagctggaggggcagagaggccagggccaatgggagaggctgaaaagggggcagtacttgcccagggtcagggagatggtactgtttccaaaggaggaaggggccccggttcccagcataccaaagaagcagaagataaaattcccttggtcccctcaaaagtgagtgtcatcaagggcagcagaagccaaaaggaggcttttcctttggcaaagggagaggtagacactgcaccacagggtaataaagacttaaaggagcatgtgcttcaaagttccttatcccaggagcataaagacccaaaagcaacacccccatgatacaggtctgtggggaagagtgtttatatccctacgttaactttgcctagtagaggcccttctttgcacttgcttctcatttggctattcttttcctaaggaagtccattctcctctgtacagacagctgagtcacccagtctacttagtacctggttgctgcctctgaccttttcagcttgataccctgggctttagtgtaaccaataaatctgtagtgaccttacctgtattccctgtgctatcctgtgggaaggtaggaatgggctaagtatgatgaatgtataggttagggatcttttggttttaaatcacagaaaacctaattcaaactggcttaaaataaaaaggatttattggttcatgtaactagaaagtccataggtagtgctggctccaggtgaagacttgacccagtagttcagtatgtctctaaataccggactgacttttttctcactgttgcatcttctgtaggaccatttaagtctgggccacttaatggctgccagcattcctaagattacacttttccccatttatgtccaatcagaaaaagaaggcatctttgtaccagaaatctcagcaaaagccctaatattcacactgattaggcctgggtcacatgtccaccctgaccaatcactgtggccaggaggatgatacatgctaatttgcttattctatatcatggacaacacctttggggaaaagggtgggggtcagcctccccaaaatcacatggattccccaagtggaaactaggagcagggagttgcttgggtggccgctaacaccaggctactcttattttagcttgctaagttgagatcagctagacctgctttcttttctcctcagtcttgcatttccctcaatacaagctgcagcctctttcctcgtttctagtctcagaaggaaggagagggaagccattctcctctagggactcttcagtctcatttagatgatagtccctttttttctacctccatattagagatggagctccttccttttcctgtttcttaatttttgtcttctcattcctgcttccctctcaccctattgccagttccaccaactagagtgaaagacttcctagccatttcattaaatctattctgtatccaccaggtggcagcatcttgtcatacgtgtcaggacttaggactgcggggtttaggttagatgtcacggaaaaagctagttctgtggtcaggcggcaccaatgagaaaggaatgcagaccctccagatgtatccttgggaaaagcagtaaaccaactaatatttattgaagacctactttgtcctctacatagggtagcttctgtcagggaatcttggttcttcccaagaaacactgattttctttcagggagacttcatgtgttcatttatttccaccacagcagattttaagaaattataatatgtaatatttgatatctataaagagtatatctaacgtgaataaattatgaagcatactaatgagtacctatgacccataacacatatacattaaaacattttaaatacca

SEQ ID NO: 364910 - DNA, 3651 bp, Homo sapiens
gggggagcagcgggggaagtcgtggcgagattaagtaatgagaacttgggcccagttttttttccaagcctagaagggcagaatatgttcgtatcctttctgacctcccaggcatatgcaatgttttccagatttaggagacttcagaaaggtggggcagatagaatggagatggcaaagatctctttgggcatatatgggcctggcgaagtaatggaataatttctaattttcggagaagccctcatgccgggatggcagaagatgagcctgatgctaagagccccaagactgggggaagggcccccccaggtggtgctgaggctggggaacctaccacccttcttcagaggctccgaggtaccatttccaaggccgtgcagaacaaagtagaggggatcctgcaagatgtacagaaattttctgacaatgacaagctgtatctctaccttcagctcccctcaggacccaccactggagacaaaagctcagagccaagtacactgagcaatgaggagtacatgtatgcctataggtggatccgcaaccacctggaagagcacactgacacctgtctgccaaagcaaagtgtttatgatgcctatcggaagtactgtgagagtcttgcctgttgccgcccactcagcacagccaactttggcaagatcatcagagagatcttccctgacatcaaagctcgaaggcttggtggccggggccagtccaaatattgctacagtggcataaggaggaagaccttggtgtctatgccacccctgcctggacttgacctaaagggttctgagagtccagaaatgggcccagaagtaaccccagcacctcgagatgaactggtggaggcagcgtgtgccctgacctgtgactgggcagagcggatcctgaaacggtccttcagttccatcgttgaggtcgcccgcttcctgctacagcagcatctcatctctgcccgatctgcacatgcccatgtgcttaaggccatggggcttgctgaagaggacgaacatgcacctcgggaacggtcatctaaaccaaagaatggtttagagaacccagagggtggagcccacaagaagccagagagactggcccagcctcctaaggatctggaagcccgaactggggccggtcctctcgcacgtggagagcggaagaagagtgtagttgagagctcggccccaggagccaataacctgcaggttaatgccctagtggctcggctgcctctgctccttccccgggcccctcgctcactaattccgccaatcccagtctctccacctattctggcccccaggctttcttcaggtgccctgaaagtggctacactgcctctgtctagtagggccggggcacccccagcagctgtgcccatcattaacatgatcttaccaactgttcctgctttgcctggacctggacctgggcctgggcgagctccacctgggggactcactcagccccggggcacagagaacagagaggtaggcataggtggtgaccaaggaccacatgacaagggtgtcaagaggacagctgaagtacctgtgagtgaggccagtgggcaggctccaccagctaaagcagcaaagcaggatatagaggatacagcaagtgatgccaaaaggaaacgggggcgccctcgaaaaaagtcaggtggaagtggggaaaggaattctacccctctcaagtcagcagctgccatggaatctgcccagtcctcaaggttaccatgggagacatggggctcaggaggggaaggcaactcagctggaggggcagagaggccagggccaatgggagaggctgaaaagggggcagtacttgcccagggtcagggagatggtactgtttccaaaggaggaaggggccccggttcccagcataccaaagaagcagaagataaaattcccttggtcccctcaaaagtgagtgtcatcaagggcagcagaagccaaaaggaggcttttcctttggcaaagggagaggtagacactgcaccacagggtaataaagacttaaaggagcatgtgcttcaaagttccttatcccaggagcataaagacccaaaagcaacacccccatgatacaggtctgtggggaagagtgtttatatccctacgttaactttgcctagtagaggcccttctttgcacttgcttctcatttggctattcttttcctaaggaagtccattctcctctgtacagacagctgagtcacccagtctacttagtacctggttgctgcctctgaccttttcagcttgataccctgggctttagtgtaaccaataaatctgtagtgaccttacctgtattccctgtgctatcctgtgggaaggtaggaatgggctaagtatgatgaatgtataggttagggatcttttggttttaaatcacagaaaacctaattcaaactggcttaaaataaaaaggatttattggttcatgtaactagaaagtccataggtagtgctggctccaggtgaagacttgacccagtagttcagtatgtctctaaataccggactgacttttttctcactgttgcatcttctgtaggaccatttaagtctgggccacttaatggctgccagcattcctaagattacacttttccccatttatgtccaatcagaaaaagaaggcatctttgtaccagaaatctcagcaaaagccctaatattcacactgattaggcctgggtcacatgtccaccctgaccaatcactgtggccaggaggatgatacatgctaatttgcttattctatatcatggacaacacctttggggaaaagggtgggggtcagcctccccaaaatcacatggattccccaagtggaaactaggagcagggagttgcttgggtggccgctaacaccaggctactcttattttagcttgctaagttgagatcagctagacctgctttcttttctcctcagtcttgcatttccctcaatacaagctgcagcctctttcctcgtttctagtctcagaaggaaggagagggaagccattctcctctagggactcttcagtctcatttagatgatagtccctttttttctacctccatattagagatggagctccttccttttcctgtttcttaatttttgtcttctcattcctgcttccctctcaccctattgccagttccaccaactagagtgaaagacttcctagccatttcattaaatctattctgtatccaccaggtggcagcatcttgtcatacgtgtcaggacttaggactgcggggtttaggttagatgtcacggaaaaagctagttctgtggtcaggcggcaccaatgagaaaggaatgcagaccctccagatgtatccttgggaaaagcagtaaaccaactaatatttattgaagacctactttgtcctctacatagggtagcttctgtcagggaatcttggttcttcccaagaaacactgattttctttcagggagacttcatgtgttcatttatttccaccacagcagattttaagaaattataatatgtaatatttgatatctataaagagtatatctaacgtgaataaattatgaagcatactaatgagtacctatgacccataacacatatacattaaaacattttaaatacca

SEQ ID NO: 364911 - DNA, 3790 bp, Homo sapiens
gaaaataaagcaacgcacgagccggctgggccaggaccttggggctgggctggagtgaaggtggctacgagttttccagatttaggagacttcagaaaggtggggcagatagaatggagatggcaaagatctctttgggcatatatgggcctggcgaagtaatggaataatttctaattttcggagaagccctcatgccgggatggcagaagatgagcctgatgctaagagccccaagactgggggaagggcccccccaggtggtgctgaggctggggaacctaccacccttcttcagaggctccgaggtaccatttccaaggccgtgcagaacaaagtagaggggatcctgcaagatgtacagaaattttctgacaatgacaagctgtatctctaccttcagctcccctcaggacccaccactggagacaaaagctcagagccaagtacactgagcaatgaggagtacatgtatgcctataggtggatccgcaaccacctggaagagcacactgacacctgtctgccaaagcaaagtgtttatgatgcctatcggtgggtggaggggtgggtggtgggatgagtggattggtgggcataggaccccctcacccatgaagagcttcctgccttgataaagcctgccttcttaaagggttcctcacacttgatccctagggactcttcgagcctacccatggcctccttctctgagtatcttcccactctgctcccctctcactcaggaagtactgtgagagtcttgcctgttgccgcccactcagcacagccaactttggcaagatcatcagagagatcttccctgacatcaaagctcgaaggcttggtggccggggccagtccaaatattgctacagtggcataaggaggaagaccttggtgtctatgccacccctgcctggacttgacctaaagggttctgagagtccagaaatgggcccagaagtaaccccagcacctcgagatgaactggtggaggcagcgtgtgccctgacctgtgactgggcagagcggatcctgaaacggtccttcagttccatcgttgaggtcgcccgcttcctgctacagcagcatctcatctctgcccgatctgcacatgcccatgtgcttaaggccatggggcttgctgaagaggacgaacatgcacctcgggaacggtcatctaaaccaaagaatggtttagagaacccagagggtggagcccacaagaagccagagagactggcccagcctcctaaggatctggaagcccgaactggggccggtcctctcgcacgtggagagcggaagaagagtgtagttgagagctcggccccaggagccaataacctgcaggttaatgccctagtggctcggctgcctctgctccttccccgggcccctcgctcactaattccgccaatcccagtctctccacctattctggcccccaggctttcttcaggtgccctgaaagtggctacactgcctctgtctagtagggccggggcacccccagcagctgtgcccatcattaacatgatcttaccaactgttcctgctttgcctggacctggacctgggcctgggcgagctccacctgggggactcactcagccccggggcacagagaacagagaggtaggcataggtggtgaccaaggaccacatgacaagggtgtcaagaggacagctgaagtacctgtgagtgaggccagtgggcaggctccaccagctaaagcagcaaagcaggatatagaggatacagcaagtgatgccaaaaggaaacgggggcgccctcgaaaaaagtcaggtggaagtggggaaaggaattctacccctctcaagtcagcagctgccatggaatctgcccagtcctcaaggttaccatgggagacatggggctcaggaggggaaggcaactcagctggaggggcagagaggccagggccaatgggagaggctgaaaagggggcagtacttgcccagggtcagggagatggtactgtttccaaaggaggaaggggccccggttcccagcataccaaagaagcagaagataaaattcccttggtcccctcaaaagtgagtgtcatcaagggcagcagaagccaaaaggaggcttttcctttggcaaagggagaggtagacactgcaccacagggtaataaagacttaaaggagcatgtgcttcaaagttccttatcccaggagcataaagacccaaaagcaacacccccatgatacaggtctgtggggaagagtgtttatatccctacgttaactttgcctagtagaggcccttctttgcacttgcttctcatttggctattcttttcctaaggaagtccattctcctctgtacagacagctgagtcacccagtctacttagtacctggttgctgcctctgaccttttcagcttgataccctgggctttagtgtaaccaataaatctgtagtgaccttacctgtattccctgtgctatcctgtgggaaggtaggaatgggctaagtatgatgaatgtataggttagggatcttttggttttaaatcacagaaaacctaattcaaactggcttaaaataaaaaggatttattggttcatgtaactagaaagtccataggtagtgctggctccaggtgaagacttgacccagtagttcagtatgtctctaaataccggactgacttttttctcactgttgcatcttctgtaggaccatttaagtctgggccacttaatggctgccagcattcctaagattacacttttccccatttatgtccaatcagaaaaagaaggcatctttgtaccagaaatctcagcaaaagccctaatattcacactgattaggcctgggtcacatgtccaccctgaccaatcactgtggccaggaggatgatacatgctaatttgcttattctatatcatggacaacacctttggggaaaagggtgggggtcagcctccccaaaatcacatggattccccaagtggaaactaggagcagggagttgcttgggtggccgctaacaccaggctactcttattttagcttgctaagttgagatcagctagacctgctttcttttctcctcagtcttgcatttccctcaatacaagctgcagcctctttcctcgtttctagtctcagaaggaaggagagggaagccattctcctctagggactcttcagtctcatttagatgatagtccctttttttctacctccatattagagatggagctccttccttttcctgtttcttaatttttgtcttctcattcctgcttccctctcaccctattgccagttccaccaactagagtgaaagacttcctagccatttcattaaatctattctgtatccaccaggtggcagcatcttgtcatacgtgtcaggacttaggactgcggggtttaggttagatgtcacggaaaaagctagttctgtggtcaggcggcaccaatgagaaaggaatgcagaccctccagatgtatccttgggaaaagcagtaaaccaactaatatttattgaagacctactttgtcctctacatagggtagcttctgtcagggaatcttggttcttcccaagaaacactgattttctttcagggagacttcatgtgttcatttatttccaccacagcagattttaagaaattataatatgtaatatttgatatctataaagagtatatctaacgtgaataaattatgaagcatactaatgagtacctatgacccataacacatatacattaaaacattttaaatacca

SEQ ID NO: 364912 - DNA, 3619 bp, Homo sapiens
  misc_feature (3619)..(3619): n is a, c, g, or t
gaaaataaagcaacgcacgagccggctgggccaggaccttggggctgggctggagtgaaggtggctacgagttttccagatttaggagacttcagaaaggtggggcagatagaatggagatggcaaagatctctttgggcatatatgggcctggcgaagtaatggaataatttctaattttcggagaagccctcatgccgggatggcagaagatgagcctgatgctaagagccccaagactgggggaagggcccccccaggtggtgctgaggctggggaacctaccacccttcttcagaggctccgaggtaccatttccaaggccgtgcagaacaaagtagaggggatcctgcaagatgtacagaaattttctgacaatgacaagctgtatctctaccttcagctcccctcaggacccaccactggagacaaaagctcagagccaagtacactgagcaatgaggagtacatgtatgcctataggtggatccgcaaccacctggaagagcacactgacacctgtctgccaaagcaaagtgtttatgatgcctatcggaagtactgtgagagtcttgcctgttgccgcccactcagcacagccaactttggcaagatcatcagagagatcttccctgacatcaaagctcgaaggcttggtggccggggccagtccaaatattgctacagtggcataaggaggaagaccttggtgtctatgccacccctgcctggacttgacctaaagggttctgagagtccagaaatgggcccagaagtaaccccagcacctcgagatgaactggtggaggcagcgtgtgccctgacctgtgactgggcagagcggatcctgaaacggtccttcagttccatcgttgaggtcgcccgcttcctgctacagcagcatctcatctctgcccgatctgcacatgcccatgtgcttaaggccatggggcttgctgaagaggacgaacatgcacctcgggaacggtcatctaaaccaaagaatggtttagagaacccagagggtggagcccacaagaagccagagagactggcccagcctcctaaggatctggaagcccgaactggggccggtcctctcgcacgtggagagcggaagaagagtgtagttgagagctcggccccaggagccaataacctgcaggttaatgccctagtggctcggctgcctctgctccttccccgggcccctcgctcactaattccgccaatcccagtctctccacctattctggcccccaggctttcttcaggtgccctgaaagtggctacactgcctctgtctagtagggccggggcacccccagcagctgtgcccatcattaacatgatcttaccaactgttcctgctttgcctggacctggacctgggcctgggcgagctccacctgggggactcactcagccccggggcacagagaacagagaggtaggcataggtggtgaccaaggaccacatgacaagggtgtcaagaggacagctgaagtacctgtgagtgaggccagtgggcaggctccaccagctaaagcagcaaagcaggatatagaggatacagcaagtgatgccaaaaggaaacgggggcgccctcgaaaaaagtcaggtggaagtggggaaaggaattctacccctctcaagtcagcagctgccatggaatctgcccagtcctcaaggttaccatgggagacatggggctcaggaggggaaggcaactcagctggaggggcagagaggccagggccaatgggagaggctgaaaagggggcagtacttgcccagggtcagggagatggtactgtttccaaaggaggaaggggccccggttcccagcataccaaagaagcagaagataaaattcccttggtcccctcaaaagtgagtgtcatcaagggcagcagaagccaaaaggaggcttttcctttggcaaagggagaggtagacactgcaccacagggtaataaagacttaaaggagcatgtgcttcaaagttccttatcccaggagcataaagacccaaaagcaacacccccatgatacaggtctgtggggaagagtgtttatatccctacgttaactttgcctagtagaggcccttctttgcacttgcttctcatttggctattcttttcctaaggaagtccattctcctctgtacagacagctgagtcacccagtctacttagtacctggttgctgcctctgaccttttcagcttgataccctgggctttagtgtaaccaataaatctgtagtgaccttacctgtattccctgtgctatcctgtgggaaggtaggaatgggctaagtatgatgaatgtataggttagggatcttttggttttaaatcacagaaaacctaattcaaactggcttaaaataaaaaggatttattggttcatgtaactagaaagtccataggtagtgctggctccaggtgaagacttgacccagtagttcagtatgtctctaaataccggactgacttttttctcactgttgcatcttctgtaggaccatttaagtctgggccacttaatggctgccagcattcctaagattacacttttccccatttatgtccaatcagaaaaagaaggcatctttgtaccagaaatctcagcaaaagccctaatattcacactgattaggcctgggtcacatgtccaccctgaccaatcactgtggccaggaggatgatacatgctaatttgcttattctatatcatggacaacacctttggggaaaagggtgggggtcagcctccccaaaatcacatggattccccaagtggaaactaggagcagggagttgcttgggtggccgctaacaccaggctactcttattttagcttgctaagttgagatcagctagacctgctttcttttctcctcagtcttgcatttccctcaatacaagctgcagcctctttcctcgtttctagtctcagaaggaaggagagggaagccattctcctctagggactcttcagtctcatttagatgatagtccctttttttctacctccatattagagatggagctccttccttttcctgtttcttaatttttgtcttctcattcctgcttccctctcaccctattgccagttccaccaactagagtgaaagacttcctagccatttcattaaatctattctgtatccaccaggtggcagcatcttgtcatacgtgtcaggacttaggactgcggggtttaggttagatgtcacggaaaaagctagttctgtggtcaggcggcaccaatgagaaaggaatgcagaccctccagatgtatccttgggaaaagcagtaaaccaactaatatttattgaagacctactttgtcctctacatagggtagcttctgtcagggaatcttggttcttccagaaaatgatttcttccggcgaatctgtgtctttttccccaggattttgaatttattgtgtttgtctttaaaagattttcgggaattgagctaaaaaaaaggggggaaatttcaggggggagacacgtgtaaggcaaggtataaaggcgggcaaggagaggttggcactgtgtacaacaaatgtgtgttgtttgatgattgatgggtagn

SEQ ID NO: 364913 - DNA, 2861 bp, Homo sapiens
gaaaataaagcaacgcacgagccggctgggccaggaccttggggctgggctggagtgaaggtggctacgagttttccagatttaggagacttcagaaaggtggggcagatagaatggagatggcaaagatctctttgggcatatatgggcctggcgaagtaatggaataatttctaattttcggagaagccctcatgccgggatggcagaagatgagcctgatgctaagagccccaagactgggggaagggcccccccaggtggtgctgaggctggggaacctaccacccttcttcagaggctccgaggtaccatttccaaggccgtgcagaacaaagtagaggggatcctgcaagatgtacagaaattttctgacaatgacaagctgtatctctaccttcagctcccctcaggacccaccactggagacaaaagctcagagccaagtacactgagcaatgaggagtacatgtatgcctataggtggatccgcaaccacctggaagagcacactgacacctgtctgccaaagcaaagtgtttatgatgcctatcggaagtactgtgagagtcttgcctgttgccgcccactcagcacagccaactttggcaagatcatcagagagatcttccctgacatcaaagctcgaaggcttggtggccggggccagtccaaatattgctacagtggcataaggaggaagaccttggtgtctatgccacccctgcctggacttgacctaaagggttctgagagtccagaaatgggcccagaagtaaccccagcacctcgagatgaactggtggaggcagcgtgtgccctgacctgtgactgggcagagcggatcctgaaacggtccttcagttccatcgttgaggtcgcccgcttcctgctacagcagcatctcatctctgcccgatctgcacatgcccatgtgcttaaggccatggggcttgctgcatgggagacatggggctcaggaggggaaggcaactcagctggaggggcagagaggccagggccaatgggagaggctgaaaagggggcagtacttgcccagggtcagggagatggtactgtttccaaaggaggaaggggccccggttcccagcataccaaagaagcagaagataaaattcccttggtcccctcaaaagtgagtgtcatcaagggcagcagaagccaaaaggaggcttttcctttggcaaagggagaggtagacactgcaccacagggtaataaagacttaaaggagcatgtgcttcaaagttccttatcccaggagcataaagacccaaaagcaacacccccatgatacaggtctgtggggaagagtgtttatatccctacgttaactttgcctagtagaggcccttctttgcacttgcttctcatttggctattcttttcctaaggaagtccattctcctctgtacagacagctgagtcacccagtctacttagtacctggttgctgcctctgaccttttcagcttgataccctgggctttagtgtaaccaataaatctgtagtgaccttacctgtattccctgtgctatcctgtgggaaggtaggaatgggctaagtatgatgaatgtataggttagggatcttttggttttaaatcacagaaaacctaattcaaactggcttaaaataaaaaggatttattggttcatgtaactagaaagtccataggtagtgctggctccaggtgaagacttgacccagtagttcagtatgtctctaaataccggactgacttttttctcactgttgcatcttctgtaggaccatttaagtctgggccacttaatggctgccagcattcctaagattacacttttccccatttatgtccaatcagaaaaagaaggcatctttgtaccagaaatctcagcaaaagccctaatattcacactgattaggcctgggtcacatgtccaccctgaccaatcactgtggccaggaggatgatacatgctaatttgcttattctatatcatggacaacacctttggggaaaagggtgggggtcagcctccccaaaatcacatggattccccaagtggaaactaggagcagggagttgcttgggtggccgctaacaccaggctactcttattttagcttgctaagttgagatcagctagacctgctttcttttctcctcagtcttgcatttccctcaatacaagctgcagcctctttcctcgtttctagtctcagaaggaaggagagggaagccattctcctctagggactcttcagtctcatttagatgatagtccctttttttctacctccatattagagatggagctccttccttttcctgtttcttaatttttgtcttctcattcctgcttccctctcaccctattgccagttccaccaactagagtgaaagacttcctagccatttcattaaatctattctgtatccaccaggtggcagcatcttgtcatacgtgtcaggacttaggactgcggggtttaggttagatgtcacggaaaaagctagttctgtggtcaggcggcaccaatgagaaaggaatgcagaccctccagatgtatccttgggaaaagcagtaaaccaactaatatttattgaagacctactttgtcctctacatagggtagcttctgtcagggaatcttggttcttcccaagaaacactgattttctttcagggagacttcatgtgttcatttatttccaccacagcagattttaagaaattataatatgtaatatttgatatctataaagagtatatctaacgtgaataaattatgaagcatactaatgagtacctatgacccataacacatatacattaaaacattttaaatacca

SEQ ID NO: 364914 - DNA, 2104 bp, Homo sapiens
agtttctctttctcccttacctttattgttgcttgtgttggaaggcgactgttcagagttttccagatttaggagacttcagaaaggtggggcagatagaatggagatggcaaagatctctttgggcatatatgggcctggcgaagtaatggaataatttctaattttcggagaagccctcatgccgggatggcagaagatgagcctgatgctaagagccccaagactgggggaagggcccccccaggtggtgctgaggctggggaacctaccacccttcttcagaggctccgaggtaccatttccaaggccgtgcagaacaaagtagaggggatcctgcaagatgtacagaaattttctgacaatgacaagctgtatctctaccttcagctcccctcaggacccaccactggagacaaaagctcagagccaagtacactgagcaatgaggagtacatgtatgcctataggtggatccgcaaccacctggaagagcacactgacacctgtctgccaaagcaaagtgtttatgatgcctatcggaagtactgtgagagtcttgcctgttgccgcccactcagcacagccaactttggcaagatcatcagagagatcttccctgacatcaaagctcgaaggcttggtggccggggccagtccaaatattgctacagtggcataaggaggaagaccttggtgtctatgccacccctgctgctgcctctgaccttttcagcttgataccctgggctttagtgtaaccaataaatctgtagtgaccttacctgtattccctgtgctatcctgtgggaaggtaggaatgggctaagtatgatgaatgtataggttagggatcttttggttttaaatcacagaaaacctaattcaaactggcttaaaataaaaaggatttattggttcatgtaactagaaagtccataggtagtgctggctccaggtgaagacttgacccagtagttcagtatgtctctaaataccggactgacttttttctcactgttgcatcttctgtaggaccatttaagtctgggccacttaatggctgccagcattcctaagattacacttttccccatttatgtccaatcagaaaaagaaggcatctttgtaccagaaatctcagcaaaagccctaatattcacactgattaggcctgggtcacatgtccaccctgaccaatcactgtggccaggaggatgatacatgctaatttgcttattctatatcatggacaacacctttggggaaaagggtgggggtcagcctccccaaaatcacatggattccccaagtggaaactaggagcagggagttgcttgggtggccgctaacaccaggctactcttattttagcttgctaagttgagatcagctagacctgctttcttttctcctcagtcttgcatttccctcaatacaagctgcagcctctttcctcgtttctagtctcagaaggaaggagagggaagccattctcctctagggactcttcagtctcatttagatgatagtccctttttttctacctccatattagagatggagctccttccttttcctgtttcttaatttttgtcttctcattcctgcttccctctcaccctattgccagttccaccaactagagtgaaagacttcctagccatttcattaaatctattctgtatccaccaggtggcagcatcttgtcatacgtgtcaggacttaggactgcggggtttaggttagatgtcacggaaaaagctagttctgtggtcaggcggcaccaatgagaaaggaatgcagaccctccagatgtatccttgggaaaagcagtaaaccaactaatatttattgaagacctactttgtcctctacatagggtagcttctgtcagggaatcttggttcttcccaagaaacactgattttctttcagggagacttcatgtgttcatttatttccaccacagcagattttaagaaattataatatgtaatatttgatatctataaagagtatatctaacgtgaataaattatgaagcatactaatgagtacctatgacccataacacatatacattaaaacattttaaatacca

SEQ ID NO: 364915 - DNA, 684 bp, Homo sapiens
ctaaatggctgtacctatggctgtgcagcctctttcctcgtttctagtctcagaaggaaggagagggaagccattctcctctagggactcttcagtctcatttagatgatagtccctttttttctacctccatattagagatggagctccttccttttcctgtttcttaatttttgtcttctcattcctgcttccctctcaccctattgccagttccaccaactagagtgaaagacttcctagccatttcattaaatctattctgtatccaccaggtggcagcatcttgtcatacgtgtcaggacttaggactgcggggtttaggttagatgtcacggaaaaagctagttctgtggtcaggcggcaccaatgagaaaggaatgcagaccctccagatgtatccttgggaaaagcagtaaaccaactaatatttattgaagacctactttgtcctctacatagggtagcttctgtcagggaatcttggttcttcccaagaaacactgattttctttcagggagacttcatgtgttcatttatttccaccacagcagattttaagaaattataatatgtaatatttgatatctataaagagtatatctaacgtgaataaattatgaagcatactaatgagtacctatgacccataacacatatacattaaaacattttaaatacca

SEQ ID NO: 364916 - DNA, 857 bp, Homo sapiens
gaaaataaagcaacgcacgagccggctgggccaggaccttggggctgggctggagtgaaggtggctacgagttttccagatttaggagacttcagaaaggtggggcagatagaatggagatggcaaagatctctttgggcatatatgggcctggcgaagtaatggaataatttctaattttcggagaagccctcatgccgggatggcagaagatgagcctgatgctaagagccccaagactgggggaagggcccccccaggtggtgctgaggctggggaacctaccacccttcttcagaggctccgaggtaccatttccaaggccgtgcagaacaaagtagaggggatcctgcaagatgtacagaaattttctgacaatgacaagctgtatctctaccttcagctcccctcaggacccaccactggagacaaaagctcagagccaagtacactgagcaatgaggagtacatgtatgcctataggtggatccgcaaccacctggaagagcacactgacacctgtctgccaaagcaaagtgtttatgatgcctatcggaagtactgtgagagtcttgcctgttgccgcccactcagcacagccaactttggcaagatcatcagagagatcttccctgacatcaaagctcgaaggcttggtggccggggccagtccaaatattgctacagtggcataaggaggaagaccttggtgtctatgccacccctgcctggacttgacctaaagggttctgagagtccagaaatgggcccagaagtaaccccagcactgctgcctctgaccttttcagcttgataccctgggctttagtgtaaccaataaatctgtagtgacctta

SEQ ID NO: 364917 - DNA, 797 bp, Homo sapiens
gaaaataaagcaacgcacgagccggctgggccaggaccttggggctgggctggagtgaaggtggctacgagttttccagatttaggagacttcagaaaggtggggcagatagaatggagatggcaaagatctctttgggcatatatgggcctggcgaagtaatggaataatttctaattttcggagaagccctcatgccgggatggcagaagatgagcctgatgctaagagccccaagactgggggaagggcccccccaggtggtgctgaggctggggaacctaccacccttcttcagaggctccgaggtaccatttccaaggccgtgcagaacaaagtagaggggatcctgcaagatgtacagaaattttctgacaatgacaagctgtatctctaccttcagctcccctcaggacccaccactggagacaaaagctcagagccaagtacactgagcaatgaggagtacatgtatgcctataggtggatccgcaaccacctggaagagcacactgacacctgtctgccaaagcaaagtgtttatgatgcctatcggaagtactgtgagagtcttgcctgttgccgcccactcagcacagccaactttggcaagatcatcagagagatcttccctgacatcaaagctcgaaggcttggtggccggggccagtccaaatattgctacagtggcataaggaggaagaccttggtgtctatgccacccctgctgctgcctctgaccttttcagcttgataccctgggctttagtgtaaccaataaatctgtagtgacctta

SEQ ID NO: 364918 - DNA, 770 bp, Homo sapiens
gaaaataaagcaacgcacgagccggctgggccaggaccttggggctgggctggagtgaaggtggctacgagttttccagatttaggagacttcagaaaggtggggcagatagaatggagatggcaaagatctctttgggcatatatgggcctggcgaagtaatggaataatttctaattttcggagaagccctcatgccgggatggcagaagatgagcctgatgctaagagccccaagactgggggaagggcccccccaggtggtgctgaggctggggaacctaccacccttcttcagaggctccgaggtaccatttccaaggccgtgcagaacaaagtagaggggatcctgcaagatgtacagaaattttctgacaatgacaagctgtatctctaccttcagctcccctcaggacccaccactggagacaaaagctcagagccaagtacactgagcaatgaggagtacatgtatgcctataggtggatccgcaaccacctggaagagcacactgacacctgtctgccaaagcaaagtgtttatgatgcctatcggaagtactgtgagagtcttgcctgttgccgcccactcagcacagccaactttggcaagatcatcagagagatcttccctgacatcaaagctcgaaggcttggtggccggggccagtccaagtatccttgactagagaggttgggggtggaggacctgggaggaagacttaggatgtggagagcaaggagtggaacagcttaacttgctcgagggg

SEQ ID NO: 364919 - DNA, 3599 bp, Homo sapiens
gaaaataaagcaacgcacgagccggctgggccaggaccttggggctgggctggagtgaaggtggctacgagttttccagatttaggagacttcagaaaggtggggcagatagaatggagatggcaaagatctctttgggcatatatgggcctggcgaagtaatggaataatttctaattttcggagaagccctcatgccgggatggcagaagatgagcctgatgctaagagccccaagactgggggaagggcccccccaggtggtgctgaggctggggaacctaccacccttcttcagaggctccgaggtaccatttccaaggccgtgcagaacaaagtagaggggatcctgcaagatgtacagaaattttctgacaatgacaagctgtatctctaccttcagctcccctcaggacccaccactggagacaaaagctcagagccaagtacactgagcaatgaggagtacatgtatgcctataggtggatccgcaaccacctggaagagcacactgacacctgtctgccaaagcaaagtgtttatgatgcctatcggaagtactgtgagagtcttgcctgttgccgcccactcagcacagccaactttggcaagatcatcagagagatcttccctgacatcaaagctcgaaggcttggtggccggggccagtccaaatattgctacagtggcataaggaggaagaccttggtgtctatgccacccctgcctggacttgacctaaagggttctgagagtccagaaatgggcccagaagtaaccccagcacctcgagatgaactggtggaggcagcgtgtgccctgacctgtgactgggcagagcggatcctgaaacggtccttcagttccatcgttgaggtcgcccgcttcctgctacagcagcatctcatctctgcccgatctgcacatgcccatgtgcttaaggccatggggcttgctgaagaggacgaacatgcacctcgggaacggtcatctaaaccaaagaatggtttagagaacccagagggtggagcccacaagaagccagagagactggcccagcctcctaaggatctggaagcccgaactggggccggtcctctcgcacgtggagagcggaagaagagtgtagttgagagctcggccccaggagccaataacctgcaggttaatgccctagtggctcggctgcctctgctccttccccgggcccctcgctcactaattccgccaatcccagtctctccacctattctggcccccaggctttcttcaggtgccctgaaagtggctacactgcctctgtctagtagggccggggcacccccagcagctgtgcccatcattaacatgatcttaccaactgttcctgctttgcctggacctggacctgggcctgggcgagctccacctgggggactcactcagccccggggcacagagaacagagaggtaggcataggtggtgaccaaggaccacatgacaagggtgtcaagaggacagctgaagtacctgtgagtgaggccagtgggcaggctccaccagctaaagcagcaaagcaggatatagaggatacagcaagtgatgccaaaaggaaacgggggcgccctcgaaaaaagtcaggtggaagtggggaaaggaattctacccctctcaagtcagcagctgccatggaatctgcccagtcctcaaggttaccatgggagacatggggctcaggaggggaaggcaactcagctggaggggcagagaggccagggccaatgggagaggctgaaaagggggcagtacttgcccagggtcagggagatggtactgtttccaaaggaggaaggggccccggttcccagcataccaaagaagcagaagataaaattcccttggtcccctcaaaagtgagtgtcatcaagggcagcagaagccaaaaggaggcttttcctttggcaaagggagaggtagacactgcaccacagggtaataaagacttaaaggagcatgtgcttcaaagttccttatcccaggagcataaagacccaaaagcaacacccccatgatacaggtctgtggggaagagtgtttatatccctacgttaactttgcctagtagaggcccttctttgcacttgcttctcatttggctattcttttcctaaggaagtccattctcctctgtacagacagctgagtcacccagtctacttagtacctggttgctgcctctgaccttttcagcttgataccctgggctttagtgtaaccaataaatctgtagtgaccttacctgtattccctgtgctatcctgtgggaaggtaggaatgggctaagtatgatgaatgtataggttagggatcttttggttttaaatcacagaaaacctaattcaaactggcttaaaataaaaaggatttattggttcatgtaactagaaagtccataggtagtgctggctccaggtgaagacttgacccagtagttcagtatgtctctaaataccggactgacttttttctcactgttgcatcttctgtaggaccatttaagtctgggccacttaatggctgccagcattcctaagattacacttttccccatttatgtccaatcagaaaaagaaggcatctttgtaccagaaatctcagcaaaagccctaatattcacactgattaggcctgggtcacatgtccaccctgaccaatcactgtggccaggaggatgatacatgctaatttgcttattctatatcatggacaacacctttggggaaaagggtgggggtcagcctccccaaaatcacatggattccccaagtggaaactaggagcagggagttgcttgggtggccgctaacaccaggctactcttattttagcttgctaagttgagatcagctagacctgctttcttttctcctcagtcttgcatttccctcaatacaagctgcagcctctttcctcgtttctagtctcagaaggaaggagagggaagccattctcctctagggactcttcagtctcatttagatgatagtccctttttttctacctccatattagagatggagctccttccttttcctgtttcttaatttttgtcttctcattcctgcttccctctcaccctattgccagttccaccaactagagtgaaagacttcctagccatttcattaaatctattctgtatccaccaggtggcagcatcttgtcatacgtgtcaggacttaggactgcggggtttaggttagatgtcacggaaaaagctagttctgtggtcaggcggcaccaatgagaaaggaatgcagaccctccagatgtatccttgggaaaagcagtaaaccaactaatatttattgaagacctactttgtcctctacatagggtagcttctgtcagggaatcttggttcttcccaagaaacactgattttctttcagggagacttcatgtgttcatttatttccaccacagcagattttaagaaattataatatgtaatatttgatatctataaagagtatatctaacgtgaataaattatgaagcatactaatgagtacctatgacccataacacatatacattaaaacattttaaatacca

SEQ ID NO: 364920 - DNA, 3440 bp, Homo sapiens
gaaaataaagcaacgcacgagccggctgggccaggaccttggggctgggctggagtgaaggtggctacgagttttccagatttaggagacttcagaaaggtggggcagatagaatggagatgctaccacccttcttcagaggctccgaggtaccatttccaaggccgtgcagaacaaagtagaggggatcctgcaagatgtacagaaattttctgacaatgacaagctgtatctctaccttcagctcccctcaggacccaccactggagacaaaagctcagagccaagtacactgagcaatgaggagtacatgtatgcctataggtggatccgcaaccacctggaagagcacactgacacctgtctgccaaagcaaagtgtttatgatgcctatcggaagtactgtgagagtcttgcctgttgccgcccactcagcacagccaactttggcaagatcatcagagagatcttccctgacatcaaagctcgaaggcttggtggccggggccagtccaaatattgctacagtggcataaggaggaagaccttggtgtctatgccacccctgcctggacttgacctaaagggttctgagagtccagaaatgggcccagaagtaaccccagcacctcgagatgaactggtggaggcagcgtgtgccctgacctgtgactgggcagagcggatcctgaaacggtccttcagttccatcgttgaggtcgcccgcttcctgctacagcagcatctcatctctgcccgatctgcacatgcccatgtgcttaaggccatggggcttgctgaagaggacgaacatgcacctcgggaacggtcatctaaaccaaagaatggtttagagaacccagagggtggagcccacaagaagccagagagactggcccagcctcctaaggatctggaagcccgaactggggccggtcctctcgcacgtggagagcggaagaagagtgtagttgagagctcggccccaggagccaataacctgcaggttaatgccctagtggctcggctgcctctgctccttccccgggcccctcgctcactaattccgccaatcccagtctctccacctattctggcccccaggctttcttcaggtgccctgaaagtggctacactgcctctgtctagtagggccggggcacccccagcagctgtgcccatcattaacatgatcttaccaactgttcctgctttgcctggacctggacctgggcctgggcgagctccacctgggggactcactcagccccggggcacagagaacagagaggtaggcataggtggtgaccaaggaccacatgacaagggtgtcaagaggacagctgaagtacctgtgagtgaggccagtgggcaggctccaccagctaaagcagcaaagcaggatatagaggatacagcaagtgatgccaaaaggaaacgggggcgccctcgaaaaaagtcaggtggaagtggggaaaggaattctacccctctcaagtcagcagctgccatggaatctgcccagtcctcaaggttaccatgggagacatggggctcaggaggggaaggcaactcagctggaggggcagagaggccagggccaatgggagaggctgaaaagggggcagtacttgcccagggtcagggagatggtactgtttccaaaggaggaaggggccccggttcccagcataccaaagaagcagaagataaaattcccttggtcccctcaaaagtgagtgtcatcaagggcagcagaagccaaaaggaggcttttcctttggcaaagggagaggtagacactgcaccacagggtaataaagacttaaaggagcatgtgcttcaaagttccttatcccaggagcataaagacccaaaagcaacacccccatgatacaggtctgtggggaagagtgtttatatccctacgttaactttgcctagtagaggcccttctttgcacttgcttctcatttggctattcttttcctaaggaagtccattctcctctgtacagacagctgagtcacccagtctacttagtacctggttgctgcctctgaccttttcagcttgataccctgggctttagtgtaaccaataaatctgtagtgaccttacctgtattccctgtgctatcctgtgggaaggtaggaatgggctaagtatgatgaatgtataggttagggatcttttggttttaaatcacagaaaacctaattcaaactggcttaaaataaaaaggatttattggttcatgtaactagaaagtccataggtagtgctggctccaggtgaagacttgacccagtagttcagtatgtctctaaataccggactgacttttttctcactgttgcatcttctgtaggaccatttaagtctgggccacttaatggctgccagcattcctaagattacacttttccccatttatgtccaatcagaaaaagaaggcatctttgtaccagaaatctcagcaaaagccctaatattcacactgattaggcctgggtcacatgtccaccctgaccaatcactgtggccaggaggatgatacatgctaatttgcttattctatatcatggacaacacctttggggaaaagggtgggggtcagcctccccaaaatcacatggattccccaagtggaaactaggagcagggagttgcttgggtggccgctaacaccaggctactcttattttagcttgctaagttgagatcagctagacctgctttcttttctcctcagtcttgcatttccctcaatacaagctgcagcctctttcctcgtttctagtctcagaaggaaggagagggaagccattctcctctagggactcttcagtctcatttagatgatagtccctttttttctacctccatattagagatggagctccttccttttcctgtttcttaatttttgtcttctcattcctgcttccctctcaccctattgccagttccaccaactagagtgaaagacttcctagccatttcattaaatctattctgtatccaccaggtggcagcatcttgtcatacgtgtcaggacttaggactgcggggtttaggttagatgtcacggaaaaagctagttctgtggtcaggcggcaccaatgagaaaggaatgcagaccctccagatgtatccttgggaaaagcagtaaaccaactaatatttattgaagacctactttgtcctctacatagggtagcttctgtcagggaatcttggttcttcccaagaaacactgattttctttcagggagacttcatgtgttcatttatttccaccacagcagattttaagaaattataatatgtaatatttgatatctataaagagtatatctaacgtgaataaattatgaagcatactaatgagtacctatgacccataacacatatacattaaaacattttaaatacca

SEQ ID NO: 364921 - DNA, 2638 bp, Homo sapiens
gaaaataaagcaacgcacgagccggctgggccaggaccttggggctgggctggagtgaaggtggctacgagttttccagatttaggagacttcagaaaggtggggcagatagaatggagatggcaaagatctctttgggcatatatgggcctggcgaagtaatggaataatttctaattttcggagaagccctcatgccgggatggcagaagatgagcctgatgctaagagccccaagactgggggaagggcccccccaggtggtgctgaggctggggaacctaccacccttcttcagaggctccgaggtaccatttccaaggccgtgcagaacaaagtagaggggatcctgcaagatgtacagaaattttctgacaatgacaagctgtatctctaccttcagctcccctcaggacccaccactggagacaaaagctcagagccaagtacactgagcaatgaggagtacatgtatgcctataggtggatccgcaaccacctggaagagcacactgacacctgtctgccaaagcaaagtgtttatgatgcctatcggaagtactgtgagagtcttgcctgttgccgcccactcagcacagccaactttggcaagatcatcagagagatcttccctgacatcaaagctcgaaggcttggtggccggggccagtccaaatattgctacagtggcataaggaggaagaccttggtgtctatgccacccctgcctggacttgacctaaagggttctgagagtccagaaatgggcccagaagtaaccccagcacctcgagatgaactggtggaggcagcgtgtgccctgacctgtgactgggcagagcggatcctgaaacggtccttcagttccatcgttgaggtcgcccgcttcctgctacagcagcatctcatctctgcccgatctgcacatgcccatgtgcttaaggccatggggcttgctgaagaggacgaacatgcacctcgggaacggtcatctaaaccaaagaatggtttagagaacccagagggtggagcccacaagaagccagagagactggcccagcctcctaaggatctggaagcccgaactggggccggtcctctcgcacgtggagagcggaagaagagtgtagttgagagctcggccccaggagccaataacctgcaggttaatgccctagtggctcggctgcctctgctccttccccgggcccctcgctcactaattccgccaatcccagtctctccacctattctggcccccaggctttcttcaggtgccctgaaagtggctacactgcctctgtctagtagggccggggcacccccagcagctgtgcccatcattaacatgatcttaccaactgttcctgctttgcctggacctggacctgggcctgggcgagctccacctgggggactcactcagccccggggcacagagaacagagaggtaggcataggtggtgaccaaggaccacatgacaagggtgtcaagaggacagctgaagtacctgtgagtgaggccagtgggcaggctccaccagctaaagcagcaaagcaggatatagaggatacagcaagtgatgccaaaaggaaacgggggcgccctcgaaaaaagtcaggtggaagtggggaaaggaattctacccctctcaagtcagcagctgccatggaatctgcccagtcctcaaggttaccatgggagacatggggctcaggaggggaaggcaactcagctggaggggcagagaggccagggccaatgggagaggctgaaaagggggcagtacttgcccagggtcagggagatggtactgtttccaaaggaggaaggggccccggttcccagcataccaaagaagcagaagataaaattcccttggtcccctcaaaagtgagtgtcatcaagggcagcagaagccaaaaggaggcttttcctttggcaaagggagaggtagacactgcaccacagggtaataaagacttaaaggagcatgtgcttcaaagttccttatcccaggagcataaagacccaaaagcaacacccccatgatacaggtctgtggggaagagtgtttatatccctacgttaactttgcctagtagaggcccttctttgcacttgcttctcatttggctattcttttcctaaggaagtccattctcctctgtacagacagctgagtcacccagtctacttagtacctggttgctgcctctgaccttttcagcttgataccctgggctttagtgtaaccaataaatctgtagtgaccttacctgtattccctgtgctatcctgtgggaaggtaggaatgggctaagtatgatgaatgtataggttagggatcttttggttttaaatcacagaaaaccaactaatatttattgaagacctactttgtcctctacatagggtagcttctgtcagggaatcttggttcttcccaagaaacactgattttctttcagggagacttcatgtgttcatttatttccaccacagcagattttaagaaattataatatgtaatatttgatatctataaagagtatatctaacgtgaataaattatgaagcatactaatgagtacctatgacccataacacatatacattaaaacattttaaatacca

SEQ ID NO: 364922 - DNA, 2279 bp, Homo sapiens
gaaaataaagcaacgcacgagccggctgggccaggaccttggggctgggctggagtgaaggtggctacgagttttccagatttaggagacttcagaaaggtggggcagatagaatggagatggcaaagatctctttgggcatatatgggcctggcgaagtaatggaataatttctaattttcggagaagccctcatgccgggatggcagaagatgagcctgatgctaagagccccaagactgggggaagggcccccccaggtggtgctgaggctggggaacctaccacccttcttcagaggctccgaggtaccatttccaaggccgtgcagaacaaagtagaggggatcctgcaagatgtacagaaattttctgacaatgacaagctgtatctctaccttcagctcccctcaggacccaccactggagacaaaagctcagagccaagtacactgagcaatgaggagtacatgtatgcctataggtggatccgcaaccacctggaagagcacactgacacctgtctgccaaagcaaagtgtttatgatgcctatcggaagtactgtgagagtcttgcctgttgccgcccactcagcacagccaactttggcaagatcatcagagagatcttccctgacatcaaagctcgaaggcttggtggccggggccagtccaaatattgctacagtggcataaggaggaagaccttggtgtctatgccacccctgcctggacttgacctaaagggttctgagagtccagaaatgggcccagaagtaaccccagcacctcgagatgaactggtggaggcagcgtgtgccctgacctgtgactgggcagagcggatcctgaaacggtccttcagttccatcgttgaggtcgcccgcttcctgctacagcagcatctcatctctgcccgatctgcacatgcccatgtgcttaaggccatggggcttgctgaagaggacgaacatgcacctcgggaacggtcatctaaaccaaagaatggtttagagaacccagagggtggagcccacaagaagccagagagactggcccagcctcctaaggatctggaagcccgaactggggccggtcctctcgcacgtggagagcggaagaagagtgtagttgagagctcggccccaggagccaataacctgcaggttaatgccctagtggctcggctgcctctgctccttccccgggcccctcgctcactaattccgccaatcccagtctctccacctattctggcccccaggctttcttcaggtgccctgaaagtggctacactgcctctgtctagtagggccggggcacccccagcagctgtgcccatcattaacatgatcttaccaactgttcctgctttgcctggacctggacctgggcctgggcgagctccacctgggggactcactcagccccggggcacagagaacagagaggtaggcataggtggtgaccaaggaccacatgacaagggtgtcaagaggacagctgaagtacctgtgagtgaggccagtgggcaggctccaccagctaaagcagcaaagcaggatatagaggatacagcaagtgatgccaaaaggaaacgggggcgccctcgaaaaaagtcaggtggaagtggggaaaggaattctacccctctcaagtcagcagctgccatggaatctgcccagtcctcaaggttaccatgggagacatggggctcaggaggggaaggcaactcagctggaggggcagagaggccagggccaatgggagaggctgaaaagggggcagtacttgcccagggtcagggagatggtactgtttccaaaggaggaaggggccccggttcccagcataccaaagaagcagaagataaaattcccttggtcccctcaaaagtgagtgtcatcaagggcagcagaagccaaaaggaggcttttcctttggcaaagggagaggtagacactgcaccacagggtaataaagacttaaaggagcatgtgcttcaaagttccttatcccaggagcataaagacccaaaagcaacacccccatgatacaggtctgtggggaagagtgtttatatccctacgttaactttgcctagtagaggcccttctttgcacttgcttctcatttggctattcttttcctaaggaagtccattctcctctgtacagacagctgagtcacccagtctacttagtacctggttgctgcctctgaccttttcagcttgataccctgggctttagtgtaaccaataaatctgtagtgacctta

SEQ ID NO: 364923 - DNA, 2068 bp, Homo sapiens
gaaaataaagcaacgcacgagccggctgggccaggaccttggggctgggctggagtgaaggtggctacgagttttccagatttaggagacttcagaaaggtggggcagatagaatggagatggcaaagatctctttgggcatatatgggcctggcgaagtaatggaataatttctaattttcggagaagccctcatgccgggatggcagaagatgagcctgatgctaagagccccaagactgggggaagggcccccccaggtggtgctgaggctggggaacctaccacccttcttcagaggctccgaggtaccatttccaaggccgtgcagaacaaagtagaggggatcctgcaagatgtacagaaattttctgacaatgacaagctgtatctctaccttcagctcccctcaggacccaccactggagacaaaagctcagagccaagtacactgagcaatgaggagtacatgtatgcctataggtggatccgcaaccacctggaagagcacactgacacctgtctgccaaagcaaagtgtttatgatgcctatcggaagtactgtgagagtcttgcctgttgccgcccactcagcacagccaactttggcaagatcatcagagagatcttccctgacatcaaagctcgaaggcttggtggccggggccagtccaaatattgctacagtggcataaggaggaagaccttggtgtctatgccacccctgcctggacttgacctaaagggttctgagagtccagaaatgggcccagaagtaaccccagcacctcgagatgaactggtggaggcagcgtgtgccctgacctgtgactgggcagagcggatcctgaaacggtccttcagttccatcgttgaggtcgcccgcttcctgctacagcagcatctcatctctgcccgatctgcacatgcccatgtgcttaaggccatggggcttgctgaagaggacgaacatgcacctcgggaacggtcatctaaaccaaagaatggtttagagaacccagagggtggagcccacaagaagccagagagactggcccagcctcctaaggatctggaagcccgaactggggccggtcctctcgcacgtggagagcggaagaagagtgtagttgagagctcggccccaggagccaataacctgcaggttaatgccctagtggctcggctgcctctgctccttccccgggcccctcgctcactaattccgccaatcccagtctctccacctattctggcccccaggctttcttcaggtgccctgaaagtggctacactgcctctgtctagtagggccggggcacccccagcagctgtgcccatcattaacatgatcttaccaactgttcctgctttgcctggacctggacctgggcctgggcgagctccacctgggggactcactcagccccggggcacagagaacagagaggtaggcataggtggtgaccaaggaccacatgacaagggtgtcaagaggacagctgaagtacctgtgagtgaggccagtgggcaggctccaccagctaaagcagcaaagcaggatatagaggatacagcaagtgatgccaaaaggaaacgggggcgccctcgaaaaaagtcaggtggaagtggggaaaggaattctacccctctcaagtcagcagctgccatggaatctgcccagtcctcaaggttaccatgggagacatggggctcaggaggggaaggcaactcagctggaggggcagagaggccagggccaatgggagaggctgaaaagggggcagtacttgcccagggtcagggagatggtactgtttccaaaggaggaaggggccccggttcccagcataccaaagaagcagaagataaaattcccttggtcccctcaaaagtgagtgtcatcaagggcagcagaagccaaaaggaggcttttcctaaggaagtccattctcctctgtacagacagctgagtcacccagtctacttagtacctggttgctgcctctgaccttttcagcttgataccctgggctttagtgtaaccaataaatctgtagtgacctta

SEQ ID NO: 364924 - DNA, 1023 bp, Homo sapiens
  misc_feature (896)..(896): n is a, c, g, or t
  misc_feature (911)..(911): n is a, c, g, or t
  misc_feature (928)..(928): n is a, c, g, or t
  misc_feature (950)..(950): n is a, c, g, or t
  misc_feature (981)..(981): n is a, c, g, or t
  misc_feature (991)..(991): n is a, c, g, or t
  misc_feature (998)..(998): n is a, c, g, or t
  misc_feature (1007)..(1007): n is a, c, g, or t
  misc_feature (1013)..(1013): n is a, c, g, or t
cactgtgtttggggcctgagtcactggagccctttttgccacatatagttttaatcaccctctaaagaggctttccctttccaggtcttgcgagattcacggatccaccatctccggctgctcaacatcctgggctgccacgccgtcttctttatgatccccacctgggttctggtggacctctcggctttcctggtcagcagcgacttggtgagttgtacagcaccaagaacacgccattttcttggctagttccagaataggtgctttgttgaggagctgtagctgcatgttaacattgtggtatcttttgggcacctgacagccagcgctttcagcagtcagtcctctgtaatgcctcacggtgacgatgcacgccatcgaggaagtgggtttcctgtgtatttccttctctggtgtgcttgatcccaggtgctgatagctgctgtgtgtgcgccagtagcgtcaaggaagagaaggtgactctttcacctcctgacagtatagtccagatagcacattgactttttatttttactcattttttattttaaatgtttattttttagagacagaacctcgctctgcactccagcctgggtgacagagggagactttgtctcaaaaaaactattttttaaaaagagggaatgggggagccttatagaggatcagggcttcaaaccctggtgcgtcagtggcagctgaacagatctgtggagttaggaccagccccgggctgtggcctggagcagaggctcttaatgggggtgacggtatggggatggggctacccacaaataagccctgcccctggcgctctgataaccacctgcccccagccacccaccagagcgtcactggcacagcaaacaccactttcaaagtgttaggtngtattccctttggtngagggaggagaggggtnttccctggggcatctgtgggcntgtgggcccagtgttagttatgggcctgtgnagccttattnggttganctcttgccnacgagntgttattgtt

SEQ ID NO: 364925 - DNA, 730 bp, Homo sapiens
ttctagcactgtgggtcagcgtttctcccagcgggatgcccgccttcaccttgtgtacttcccatcccagagctgcagtcagcccctccttcaggactccaggtgccgttagtggggagcggtatttagagacacaatccaggtgccatgggtgctttttgctgctgggtggtcattgttgttaggcctttactgtgaaaaattaggaagtacacacttggggcagcagcaaagagttcctagcaattagcgtcactttcagttgaacagtccagatctttgctgttttgaatttcatatttagatctcgtcgctggtatgcttggttccgctcctcgtttcttagttgcttattctacccgttattcactgatgttattctactgtacactcactcatataattgctttagaatgagcattctcacagcacaattgcaactggagtgctgagaaaaggttagtatttctttgcaggctgggtgtggtggctcacgcctggaatcccagcactttgggagaccgaggtaggtggatcccttgaggccaggagttcgaaaccagcctggccaacgtggggaaaccccatctctagaaaaaatataaaaattatctggtgtggtggcgtacgcctataatcctagctactaggtaggtggaggttgcagtgagctgagatcacgacactgcactccaacctgggtgacaaagtgagactgtctcataaaaat

SEQ ID NO: 364926 - DNA, 5074 bp, Homo sapiens
cggccgcggtgggcgcgggccacggcgcggggggcccgggcgcagcgagcagcagtggtggggcgcgcgagggcgcgcgggtggcggcgctgtgcctgctgtggtacgcgctgagcgcgggcggcaacgtggtcaacaaggtgatcctgagcgccttcccgttcccggtgaccgtgtcgctgtgccacatcctggctctgtgcgctgggctcccgccgctgctgcgcgcctggcgcgtgccccccgcgccgcccgtctcgggccccggacccagtccgcatccgtcgtccggcccgctgctgccgccgcgcttctacccgcgctacgtgctaccgctcgccttcggcaagtacttcgcgtccgtgtcagcgcacgtcagcatctggaaggtgcccgtgtcctatgcacacaccgtcaaggccaccatgcccatctgggtggtcctcctgtcccggatcattatgaaggagaagcagagcaccaaggtatacttgtcactcatccccatcatcagcggtgtcctgctggccaccgtcaccgagttgtcttttgacatgtggggactcgtcagcgccctcgccgccacgctgtgcttctcgcttcagaacattttctccaaaaaggtcttgcgagattcacggatccaccatctccggctgctcaacatcctgggctgccacgccgtcttctttatgatccccacctgggttctggtggacctctcggctttcctggtcagcagcgacttgacctacgtctaccagtggccctggacgctcctgctcctggctgtcagcggcttctgtaactttgcccagaatgttatcgccttcagcatcctcaacctcgttagccccctgagctactcggtcgccaatgccaccaaaagaatcatggtcatcacggtgtccctgatcatgctgcgcaacccagtcaccagcaccaacgtcctgggcatgatgaccgccatcctgggggtcttcctctataacaagaccaagtacgatgcaaaccagcaagccaggaagcacctcctccccgtcaccacagcagacctgagcagcaaggagcgtcaccggagcccactggagaagccccacaacggcctcctcttcccccagcacggggactatcagtacggccgcaacaacatcttaacagaccacttccaatacagccggcagagctacccaaactcgtacagtttgaaccgctatgatgtgtagagtccaaaggacaggaccagactgttggtgactccttccccggcccccacagcagtatcagaaacttctgacaatcagtgaatgtacaacccagccgaggggacggtgcataactctccatcagaagccctggggttcctggccccccgtgagccgcaggaggatgcgttgcctgcagtgcagacggccgtgagctctgggcaaacctaaacagagaccagtgtctcatgctctttcttcctggagtctgtcatctgagggccgtgtccctgcggagatcttggccacgttgtacctttccatgtggaattattccccaagcagtgtagctcagagcacttgtgtctgcattccagataacattcaggacctgtgtgaaaagctggggtcactgtggctgtagaccatgaactggcagtgggggtgtccagggcggtgcttgagaacgtcagactggctagtttaattccctggcgcagatacgcataggaccaacagggtcaccaagcagacagggagcccgcgagaatcattcaaaacatccccagccacagagatggatccagtttcctggtcatccccttagcagttcacaagttcctggcaaatgttccaaagcaaaaagcgattgcaattagcatccagttcctgcagcctggtgctctgccctgcacgtcagggttggcatccacccagatccagatggaagggaaacttctctcttctcctttgcctcctcttccctcaccagagcagggcgcttctcttggggtggtgagaaggatcttcgagaaatcgtgttcagtatttcaagctctatttctgtggcacatgtcttttgagaggcatcttcacctcttctgtgatgacttggtatgttgtttggtagagagatcttgattttcggaggatcttgcatttttctagggaatattttgtagttgtgtgtgtgtgtttttgccttggtccccattatgggatgcattaggactggcctatgcatcgaaaatctttttgtttgtaaacgtttaaaaacaaagttccccggccaggcacagtggctcacacctgtaatcccagcactttgggaggccaagatgggcggatcacgaggtcaggagttcgagaccagcctggccaacatagtgaaaccccatctctactaaaaatacagaaattagccgggcatggtgtcgcgtgcctgtagtcccagctcctcaggctgctgaggcaggcgaattgcttgaacctgggaggcagaagttgtggtgagccgagattgtgcactccagcctgggtaacagagcgagactccatctcaaaaaaaaaaacaaaacaaaaccaagttcccactggtgatgcctgtctgacacgttttggtatttagtaggaaatgaagtgtttcgaagcttcgagagaagcttcaaaattgtcacaattgctgaaaacagaatgaatcgtgaacattatctcaatattttgtataatagacaagaccacagtgttttggttccctgacctgtttttgtgtttatgttaggatctgaatcatgttctgggtaaggggacgaggagcgaacactgcactaagatttggtttgccaaatcagattctttggtcaagagtcagtttggggccaggcgtggtggctcatgcctgtaatctcagcactttgggaggctgaggtgggtggatcactggagtttgagaccaccctggccaacatggtgaaaccccatctctactaaaacaaaaattagccaggcatggtggcacctgcctgtaatcccagctacttgggaggctgaggcaggagaatcacttgagcccaggaggtggaggtttcagcgagctgagatcacaccactgcactccagccttggtgacagagtgagactctgtctcaaaaaaaaaaaaaaaaaaaaggaatcagtttgggtcttggcagaaatcaacataaggaatatgacaagaccccagtaggtaaccctgagtgctcaggtccgagctgtggtctcttttacggcttcatgaaaggaccgtgccctcacggaggggaccacggcttggcttgtggggtcttaggtgatggctgccttctttcttcatcaccacacccagcttcttgctggcacttaggggaagagagcagcaaatgagagatttaccttttatctcccagcgagcgagatgtttccctgttcagagaggaagtaacatcacttatgcttgactggtgtttcttttgttgttgtttgtttttctttcaattggaattctgtatttaagatgttatgtcagctgacacatgggacactcctgaagaggtgactggccccccaccctgtttggcggtgagtttccgcaccaccggcctcagaagtgtccctcttgcttcgtctcttgttcgcttgctttgtaaatactttggtcccaagctgagacaattgctgtgtaaaacgtgaagagtcaatcccaaagggtgttatttgtcagaagaacttgccgtgtgccttcaccgaaggcagtcaagtctgcagttggatttttctcactggtgaatgacaagaaacagggataattttgcactgcggagatattacgggagttgtctatatgattatatatagtacctgattctttgaacatattattgaactccaaaatgaattcgacctccattcaggcttcctgaaatctctgaagttgctgaaatttgtatattattttccttttccaatgcaagatctgctggtgacgggaaatgactgtctggttttattatggtttataaattaataaatgggctatttaattctgtatataaatttacagcaagtacgtacactggaatgaatgaggcaatcacgttacaccaaatcagcagatcaaaagacaaacacatatttctgagacttgaaggtccacatccccccgccccctgccaagatggagtcttgctttgttgctcaggctggagtgcagtggcgcagtctcagctcactacaacctccatcccccgggttcaggtgattctcgtgcctcagcctcccgagtagctgggattacaggcatgcaccaccacggctggctaattttttgtgtttttagtagagacagggtttcaccatgttggccaggctggtctcgaactcctggcctcaaatgatccgcccaccttggcctcccaaagtgctaggatgacaggcatgagccaccgtgcccagcctgattgacaatggcctcttgaaggctgggttttcccagccggacagtgcccgccccacatgctccactcccacgctttcatctgcaggcctgccttcctctcagccacctcactgctgagctctgtggtagagaatttcctttacccatcagggtatggtctggctggtaatactgactccaacccagctccttcattttatagaaggaggcatttctgaatcatgtttgttcaccatggcgagactcactgcagaatttttaaccaccttattttaagtcattcattctaggaacagtcaagcccctaccacaaaggggccagatccgttcaagtgaggaagcacttgcagtttctgaattttgctgtatatttgtcctatgtcacccaacaggccctttgctatagctgggacattaccagaccccaataccttagggtctcacagcctgaaggacacagagcattgaattattaaaagacctgaaaatattataatgtttttcaattgtcacctgttttcaagacttaaatgctatagacttttctgcaggaatgacgtgtatattcctcactggcatttaccaaaaataaatgatggtttccagggaatcaaaa

SEQ ID NO: 364927 - DNA, 4951 bp, Homo sapiens
cggccgcggtgggcgcgggccacggcgcggggggcccgggcgcagcgagcagcagtggtggggcgcgcgagggcgcgcgggtggcggcgctgtgcctgctgtggtacgcgctgagcgcgggcggcaacgtggtcaacaaggtgatcctgagcgccttcccgttcccggtgaccgtgtcgctgtgccacatcctggctctgtgcgctgggctcccgccgctgctgcgcgcctggcgcgtgccccccgcgccgcccgtctcgggccccggacccagtccgcatccgtcgtccggcccgctgctgccgccgcgcttctacccgcgctacgtgctaccgctcgccttcggcaagtacttcgcgtccgtgtcagcgcacgtcagcatctggaaggtgcccgtgtcctatgcacacaccgtcaaggccaccatgcccatctgggtggtcctcctgtcccggatcattatgaaggagaagcagagcaccaaggtatacttgtcactcatccccatcatcagcggtgtcctgctggccaccgtcaccgagttgtcttttgacatgtggggactcgtcagcgccctcgccgccacgctgtgcttctcgcttcagaacattttctccaaaaaggtcttgcgagattcacggatccaccatctccggctgctcaacatcctgggctgccacgccgtcttctttatgatccccacctgggttctggtggacctctcggctttcctggtcagcagcgacttgacctacgtctaccagtggccctggacgctcctgctcctggctgtcagcggcttctgtaactttgcccagaatgttatcgccttcagcatcctcaacctcgttagccccctgagctactcggtcgccaatgccaccaaaagaatcatggtcatcacggtgtccctgatcatgctgcgcaacccagtcaccagcaccaacgtcctgggcatgatgaccgccatcctgggggtcttcctctataacaagaccaagtacgatgcaaaccagcaagccaggaagcacctcctccccgtcaccacagcagacctgagcagcaaggagcgtcaccggagcccactggagaagccccacaacggcctcctcttcccccagcacggggactatcagtacggccgcaacaacatcttaacagaccacttccaatacagccggcagagctacccaaactcgtacagtttgaaccgctatgatgtgtagagtccaaaggacaggaccagactgttggtgactccttccccggcccccacagcagtatcagaaacttctgacaatcagtgaatgtacaacccagccgaggggacggtgcataactctccatcagaagccctggggttcctggccccccgtgagccgcaggaggatgcgttgcctgcagtgcagacggccgtgagctctgggcaaacctaaacagagaccagtgtctcatgctctttcttcctggagtctgtcatctgagggccgtgtccctgcggagatcttggccacgttgtacctttccatgtggaattattccccaagcagtgtagctcagagcacttgtgtctgcattccagataacattcaggacctgtgtgaaaagctggggtcactgtggctgtagaccatgaactggcagtgggggtgtccagggcggtgcttgagaacgtcagactggctagtttaattccctggcgcagatacgcataggaccaacagggtcaccaagcagacagggagcccgcgagaatcattcaaaacatccccagccacagagatggatccagtttcctggtcatccccttagcagttcacaagttcctggcaaatgttccaaagcaaaaagcgattgcaattagcatccagttcctgcagcctggtgctctgccctgcacgtcagggttggcatccacccagatccagatggaagggaaacttctctcttctcctttgcctcctcttccctcaccagagcagggcgcttctcttggggtggtgagaaggatcttcgagaaatcgtgttcagtatttcaagctctatttctgtggcacatgtcttttgagaggcatcttcacctcttctgtgatgacttggtatgttgtttggtagagagatcttgattttcggaggatcttgcatttttctagggaatattttgtagttgtgtgtgtgtgtttttgccttggtccccattatgggatgcattaggactggcctatgcatcgaaaatctttttgtttgtaaacgtttaaaaacaaagttccccggccaggcacagtggctcacacctgtaatcccagcactttgggaggccaagatgggcggatcacgaggtcaggagttcgagaccagcctggccaacatagtgaaaccccatctctactaaaaatacagaaattagccgggcatggtgtcgcgtgcctgtagtcccagctcctcaggctgctgaggcaggcgaattgcttgaacctgggaggcagaagttgtggtgagccgagattgtgcactccagcctgggtaacagagcgagactccatctcaaaaaaaaaaacaaaacaaaaccaagttcccactggtgatgcctgtctgacacgttttggtatttagtaggaaatgaagtgtttcgaagcttcgagagaagcttcaaaattgtcacaattgctgaaaacagaatgaatcgtgaacattatctcaatattttgtataatagacaagaccacagtgttttggttccctgacctgtttttgtgtttatgttaggatctgaatcatgttctgggtaaggggacgaggagcgaacactgcactaagatttggtttgccaaatcagattctttggtcaagagtcagtttggggccaggcgtggtggctcatgcctgtaatctcagcactttgggaggctgaggtgggtggatcactggagtttgagaccaccctggccaacatggtgaaaccccatctctactaaaacaaaaattagccaggcatggtggcacctgcctgtaatcccagctacttgggaggctgaggcaggagaatcacttgagcccaggaggtggaggtttcagcgagctgagatcacaccactgcactccagccttggtgacagagtgagactctgtctcaaaaaaaaaaaaaaaaaaaaggaatcagtttgggtcttggcagaaatcaacataaggaatatgacaagaccccagtaggtaaccctgagtgctcaggtccgagctgtggtctcttttacggcttcatgaaaggaccgtgccctcacggaggggaccacggcttggcttgtggggtcttaggtgatggctgccttctttcttcatcaccacacccagcttcttgctggcacttaggggaagagagcagcaaatgagagatttaccttttatctcccagcgagcgagatgtttccctgttcagagaggaagtaacatcacttatgcttgactggtgtttcttttgttgttgtttgtttttctttcaattggaattctgtatttaagatgttatgtcagctgacacatgggacactcctgaagaggtgactggccccccaccctgtttggcggtgagtttccgcaccaccggcctcagaagtgtccctcttgcttcgtctcttgttcgcttgctttgtaaatactttggtcccaagctgagacaattgctgtgtaaaacgtgaagagtcaatcccaaagggtgttatttgtcagaagaacttgccgtgtgccttcaccgaaggcagtcaagtctgcagttggatttttctcactggtgaatgacaagaaacagggataattttgcactgcggagatattacgggagttgtctatatgattatatatagtacctgattctttgaacatattattgaactccaaaatgaattcgacctccattcaggcttcctgaaatctctgaagttgctgaaatttgtatattattttccttttccaatgcaagatctgctggtgacgggaaatgactgtctggttttattatggtttataaattaataaatgggctatttaattctgtatataaatttacagcaagtacgtacactggaatgaatgaggcaatcacgttacaccaaatcagcagatcaaaagacaaacacatatttctgagacttgaaggtccacatccccccgccccctgccaagatggagtcttgctttgttgctcaggctggagtgcagtggcgcagtctcagctcactacaacctccatcccccgggttcaggtgattctcgtgcctcagcctcccgagtagctgggattacaggcatgcaccaccacggctggctaattttttgtgtttttagtagagacagggtttcaccatgttggccaggctggtctcgaactcctggcctcaaatgatccgcccaccttggcctcccaaagtgctaggatgacaggcatgagccaccgtgcccagcctgattgacaatggcctcttgaaggctgggttttcccagccggacagtgcccgccccacatgctccactcccacgctttcatctgcaggcctgccttcctctcagccacctcactgctgagctctgtggtagagaatttcctttacccatcagggtatggtctggctggtaatactgactccaacccagctccttcattttatagaaggaggcatttctgaatcatgtttgttcaccatggcgagactcactgcagaatttttaaccaccttattttaagtcattcattctaggaacagtcaagcccctaccacaaaggggccagatccgttcaagtgaggaagcacttgcagtttctgaattttgctgtatatttgtcctatgtcacccaacaggccctttgctatagctgggacattaccagaccccaataccttagggtctcacagcctgaaggacacagagcattgaattattaaaagacctgaaaatatta

SEQ ID NO: 364928 - DNA, 4198 bp, Homo sapiens
  misc_feature (4059)..(4059): n is a, c, g, or t
  misc_feature (4067)..(4067): n is a, c, g, or t
cggccgcggtgggcgcgggccacggcgcggggggcccgggcgcagcgagcagcagtggtggggcgcgcgagggcgcgcgggtggcggcgctgtgcctgctgtggtacgcgctgagcgcgggcggcaacgtggtcaacaaggtgatcctgagcgccttcccgttcccggtgaccgtgtcgctgtgccacatcctggctctgtgcgctgggctcccgccgctgctgcgcgcctggcgcgtgccccccgcgccgcccgtctcgggccccggacccagtccgcatccgtcgtccggcccgctgctgccgccgcgcttctacccgcgctacgtgctaccgctcgccttcggcaagtacttcgcgtccgtgtcagcgcacgtcagcatctggaaggtgcccgtgtcctatgcacacaccgtcaaggccaccatgcccatctgggtggtcctcctgtcccggatcattatgaaggagaagcagagcaccaaggtatacttgtcactcatccccatcatcagcggtgtcctgctggccaccgtcaccgagttgtcttttgacatgtggggactcgtcagcgccctcgccgccacgctgtgcttctcgcttcagaacattttctccaaaaaggtcttgcgagattcacggatccaccatctccggctgctcaacatcctgggctgccacgccgtcttctttatgatccccacctgggttctggtggacctctcggctttcctggtcagcagcgacttgacctacgtctaccagtggccctggacgctcctgctcctggctgtcagcggcttctgtaactttgcccagaatgttatcgccttcagcatcctcaacctcgttagccccctgagctactcggtcgccaatgccaccaaaagaatcatggtcatcacggtgtccctgatcatgctgcgcaacccagtcaccagcaccaacgtcctgggcatgatgaccgccatcctgggggtcttcctctataacaagaccaagtacgatgcaaaccagcaagccaggaagcacctcctccccgtcaccacagcagacctgagcagcaaggagcgtcaccggagcccactggagaagccccacaacggcctcctcttcccccagcacggggactatcagtacggccgcaacaacatcttaacagaccacttccaatacagccggcagagctacccaaactcgtacagtttgaaccgctatgatgtgtagagtccaaaggacaggaccagactgttggtgactccttccccggcccccacagcagtatcagaaacttctgacaatcagtgaatgtacaacccagccgaggggacggtgcataactctccatcagaagccctggggttcctggccccccgtgagccgcaggaggatgcgttgcctgcagtgcagacggccgtgagctctgggcaaacctaaacagagaccagtgtctcatgctctttcttcctggagtctgtcatctgagggccgtgtccctgcggagatcttggccacgttgtacctttccatgtggaattattccccaagcagtgtagctcagagcacttgtgtctgcattccagataacattcaggacctgtgtgaaaagctggggtcactgtggctgtagaccatgaactggcagtgggggtgtccagggcggtgcttgagaacgtcagactggctagtttaattccctggcgcagatacgcataggaccaacagggtcaccaagcagacagggagcccgcgagaatcattcaaaacatccccagccacagagatggatccagtttcctggtcatccccttagcagttcacaagttcctggcaaatgttccaaagcaaaaagcgattgcaattagcatccagttcctgcagcctggtgctctgccctgcacgtcagggttggcatccacccagatccagatggaagggaaacttctctcttctcctttgcctcctcttccctcaccagagcagggcgcttctcttggggtggtgagaaggatcttcgagaaatcgtgttcagtatttcaagctctatttctgtggcacatgtcttttgagaggcatcttcacctcttctgtgatgacttggtatgttgtttggtagagagatcttgattttcggaggatcttgcatttttctagggaatattttgtagttgtgtgtgtgtgtttttgccttggtccccattatgggatgcattaggactggcctatgcatcgaaaatctttttgtttgtaaacgtttaaaaacaaagttccccggccaggcacagtggctcacacctgtaatcccagcactttgggaggccaagatgggcggatcacgaggtcaggagttcgagaccagcctggccaacatagtgaaaccccatctctactaaaaatacagaaattagccgggcatggtgtcgcgtgcctgtagtcccagctcctcaggctgctgaggcaggcgaattgcttgaacctgggaggcagaagttgtggtgagccgagattgtgcactccagcctgggtaacagagcgagactccatctcaaaaaaaaaaacaaaacaaaaccaagttcccactggtgatgcctgtctgacacgttttggtatttagtaggaaatgaagtgtttcgaagcttcgagagaagcttcaaaattgtcacaattgctgaaaacagaatgaatcgtgaacattatctcaatattttgtataatagacaagaccacagtgttttggttccctgacctgtttttgtgtttatgttaggatctgaatcatgttctgggtaaggggacgaggagcgaacactgcactaagatttggtttgccaaatcagattctttggtcaagagtcagtttggggccaggcgtggtggctcatgcctgtaatctcagcactttgggaggctgaggtgggtggatcactggagtttgagaccaccctggccaacatggtgaaaccccatctctactaaaacaaaaattagccaggcatggtggcacctgcctgtaatcccagctacttgggaggctgaggcaggagaatcacttgagcccaggaggtggaggtttcagcgagctgagatcacaccactgcactccagccttggtgacagagtgagactctgtctcaaaaaaaaaaaaaaaaaaaaggaatcagtttgggtcttggcagaaatcaacataaggaatatgacaagaccccagtaggtaaccctgagtgctcaggtccgagctgtggtctcttttacggcttcatgaaaggaccgtgccctcacggaggggaccacggcttggcttgtggggtcttaggtgatggctgccttctttcttcatcaccacacccagcttcttgctggcacttaggggaagagagcagcaaatgagagatttaccttttatctcccagcgagcgagatgtttccctgttcagagaggaagtaacatcacttatgcttgactggtgtttcttttgttgttgtttgtttttctttcaattggaattctgtatttaagatgttatgtcagctgacacatgggacactcctgaagaggtgactggccccccaccctgtttggcggtgagtttccgcaccaccggcctcagaagtgtccctcttgcttcgtctcttgttcgcttgctttgtaaatactttggtcccaagctgagacaattgctgtgtaaaacgtgaagagtcaatcccaaagggtgttatttgtcagaagaacttgccgtgtgccttcaccgaaggcagtcaagtctgcagttggatttttctcactggtgaatgacaagaaacagggataattttgcactgcggagatattacgggagttgtctatatgattatatatagtacctgattctttgaacatattattgaactccaaaatgaattcgacctccattcaggcttcctgaaatctctgaagttgctgaaatttgtatattattttccttttccaatgcaagatctgctggtgacgggaaatgactgtctggttttattatggtttataaattaataaatgggctatttaattctgtaaaaaaaaaanacttaaanaaaaaccaatacaacgaacccaatctcggcgcaacttaatactatgcgtgaatgcatcacaactacagggaatgaaaactttggggggggccccgttccaaatttcgcctttatggggaacttttcccggc

SEQ ID NO: 364929 - DNA, 5083 bp, Homo sapiens
cggccgcggtgggcgcgggccacggcgcggggggcccgggcgcagcgagcagcagtggtggggcgcgcgagggcgcgcgggtggcggcgctgtgcctgctgtggtacgcgctgagcgcgggcggcaacgtggtcaacaaggtgatcctgagcgccttcccgttcccggtgaccgtgtcgctgtgccacatcctggctctgtgcgctgggctcccgccgctgctgcgcgcctggcgcgtgccccccgcgccgcccgtctcgggccccggacccagtccgcatccgtcgtccggcccgctgctgccgccgcgcttctacccgcgctacgtgctaccgctcgccttcggcaagtacttcgcgtccgtgtcagcgcacgtcagcatctggaaggtgcccgtgtcctatgcacacaccgtcaaggccaccatgcccatctgggtggtcctcctgtcccggatcattatgaaggagaagcagagcaccaaggtatacttgtcactcatccccatcatcagcggtgtcctgctggccaccgtcaccgagttgtcttttgacatgtggggactcgtcagcgccctcgccgccacgctgtgcttctcgcttcagaacattttctccaaaaaggtcttgcgagattcacggatccaccatctccggctgctcaacatcctgggctgccacgccgtcttctttatgatccccacctgggttctggtggacctctcggctttcctggtcagcagcgacttgacctacgtctaccagtggccctggacgctcctgctcctggctgtcagcggcttctgtaactttgcccagaatgttatcgccttcagcatcctcaacctcgttagccccctgagctactcggtcgccaatgccaccaaaagaatcatggtcatcacggtgtccctgatcatgctgcgcaacccagtcaccagcaccaacgtcctgggcatgatgaccgccatcctgggggtcttcctctataacaagaccaagtacgatgcaaaccagcaagccaggaagcacctcctccccgtcaccacagcagacctgagcagcaaggagcgtcaccggagcccactggagaagccccacaacggcctcctcttcccccagcacggggactatcagtacggccgcaacaacatcttaacagaccacttccaatacagccggcagagctacccaaactcgtacagtttgaaccgctatgatgtgtagagtccaaaggacaggaccagactgttggtgactccttccccggcccccacagcagtatcagaaacttctgacaatcagtgaatgtacaacccagccgaggggacggtgcataactctccatcagaagccctggggttcctggccccccgtgagccgcaggaggatgcgttgcctgcagtgcagacggccgtgagctctgggcaaacctaaacagagaccagtgtctcatgctctttcttcctggagtctgtcatctgagggccgtgtccctgcggagatcttggccacgttgtacctttccatgtggaattattccccaagcagtgtagctcagagcacttgtgtctgcattccagataacattcaggacctgtgtgaaaagctggggtcactgtggctgtagaccatgaactggcagtgggggtgtccagggcggtgcttgagaacgtcagactggctagtttaattccctggcgcagatacgcataggaccaacagggtcaccaagcagacagggagcccgcgagaatcattcaaaacatccccagccacagagatggatccagtttcctggtcatccccttagcagttcacaagttcctggcaaatgttccaaagcaaaaagcgattgcaattagcatccagttcctgcagcctggtgctctgccctgcacgtcagggttggcatccacccagatccagatggaagggaaacttctctcttctcctttgcctcctcttccctcaccagagcagggcgcttctcttggggtggtgagaaggatcttcgagaaatcgtgttcagtatttcaagctctatttctgtggcacatgtcttttgagaggcatcttcacctcttctgtgatgacttggtatgttgtttggtagagagatcttgattttcggaggatcttgcatttttctagggaatattttgtagttgtgtgtgtgtgtttttgccttggtccccattatgggatgcattaggactggcctatgcatcgaaaatctttttgtttgtaaacgtttaaaaacaaagttccccggccaggcacagtggctcacacctgtaatcccagcactttgggaggccaagatgggcggatcacgaggtcaggagttcgagaccagcctggccaacatagtgaaaccccatctctactaaaaatacagaaattagccgggcatggtgtcgcgtgcctgtagtcccagctcctcaggctgctgaggcaggcgaattgcttgaacctgggaggcagaagttgtggtgagccgagattgtgcactccagcctgggtaacagagcgagactccatctcaaaaaaaaaaacaaaacaaaaccaagttcccactggtgatgcctgtctgacacgttttggtatttagtaggaaatgaagtgtttcgaagcttcgagagaagcttcaaaattgtcacaattgctgaaaacagaatgaatcgtgaacattatctcaatattttgtataatagacaagaccacagtgttttggttccctgacctgtttttgtgtttatgttaggatctgaatcatgttctgggtaaggggacgaggagcgaacactgcactaagatttggtttgccaaatcagattctttggtcaagagtcagtttggggccaggcgtggtggctcatgcctgtaatctcagcactttgggaggctgaggtgggtggatcactggagtttgagaccaccctggccaacatggtgaaaccccatctctactaaaacaaaaattagccaggcatggtggcacctgcctgtaatcccagctacttgggaggctgaggcaggagaatcacttgagcccaggaggtggaggtttcagcgagctgagatcacaccactgcactccagccttggtgacagagtgagactctgtctcaaaaaaaaaaaaaaaaaaaaggaatcagtttgggtcttggcagaaatcaacataaggaatatgacaagaccccagtaggtaaccctgagtgctcaggtccgagctgtggtctcttttacggcttcatgaaaggaccgtgccctcacggaggggaccacggcttggcttgtggggtcttaggtgatggctgccttctttcttcatcaccacacccagcttcttgctggcacttaggggaagagagcagcaaatgagagatttaccttttatctcccagcgagcgagatgtttccctgttcagagaggaagtaacatcacttatgcttgactggtgtttcttttgttgttgtttgtttttctttcaattggaattctgtatttaagatgttatgtcagctgacacatgggacactcctgaagaggtgactggccccccaccctgtttggcggtgagtttccgcaccaccggcctcagaagtgtccctcttgcttcgtctcttgttcgcttgctttgtaaatactttggtcccaagctgagacaattgctgtgtaaaacgtgaagagtcaatcccaaagggtgttatttgtcagaagaacttgccgtgtgccttcaccgaaggcagtcaagtctgcagttggatttttctcactggtgaatgacaagaaacagggataattttgcactgcggagatattacgggagttgtctatatgattatatatagtacctgattctttgaacatattattgaactccaaaatgaattcgacctccattcaggcttcctgaaatctctgaagttgctgaaatttgtatattattttccttttccaatgcaagatctgctggtgacgggaaatgactgtctggttttattatggtttataaattaataaatgggctatttaattctgtatataaatttacagcaagtacgtacactggaatgaatgaggcaatcacgttacaccaaatcagcagatcaaaagacaaacacatatttctgagacttgaaggtccacatccccccgccccctgccaagatggagtcttgctttgttgctcaggctggagtgcagtggcgcagtctcagctcactacaacctccatcccccgggttcaggtgattctcgtgcctcagcctcccgagtagctgggattacaggcatgcaccaccacggctggctaattttttgtgtttttagtagagacagggtttcaccatgttggccaggctggtctcgaactcctggcctcaaatgatccgcccaccttggcctcccaaagtgctaggatgacaggcatgagccaccgtgcccagcctgattgacaatggcctcttgaaggctgggttttcccagccggacagtgcccgccccacatgctccactcccacgctttcatctgcaggcctgccttcctctcagccacctcactgctgagctctgtggtagagaatttcctttacccatcagggtatggtctggctggtaatactgactccaacccagctccttcattttatagaaggaggcatttctgaatcatgtttgttcaccatggcgagactcactgcagaatttttaaccaccttattttaagtcattcattctaggaacagtcaagcccctaccacaaaggggccagatccgttcaagtgaggaagcacttgcagtttctgaattttgctgtatatttgtcctatgtcacccaacaggccctttgctatagctgggacattaccagaccccaataccttagggtctcacagcctgaaggacacagagcattgaattattaaaagacctgaaaatattataatgtttttcaattgtcacctgttttcaagacttaaatgctatagacttttctgcaggaatgacgtgtatattcctcaccatcatttatttttggtaaatgccagtgaggtcgacgcggccgcgaatttag

SEQ ID NO: 364930 - DNA, 4049 bp, Homo sapiens
cggccgcggtgggcgcgggccacggcgcggggggcccgggcgcagcgagcagcagtggtggggcgcgcgagggcgcgcgggtggcggcgctgtgcctgctgtggtacgcgctgagcgcgggcggcaacgtggtcaacaaggtgatcctgagcgccttcccgttcccggtgaccgtgtcgctgtgccacatcctggctctgtgcgctgggctcccgccgctgctgcgcgcctggcgcgtgccccccgcgccgcccgtctcgggccccggacccagtccgcatccgtcgtccggcccgctgctgccgccgcgcttctacccgcgctacgtgctaccgctcgccttcggcaagtacttcgcgtccgtgtcagcgcacgtcagcatctggaaggtgcccgtgtcctatgcacacaccgtcaaggccaccatgcccatctgggtggtcctcctgtcccggatcattatgaaggagaagcagagcaccaaggtatacttgtcactcatccccatcatcagcggtgtcctgctggccaccgtcaccgagttgtcttttgacatgtggggactcgtcagcgccctcgccgccacgctgtgcttctcgcttcagaacattttctccaaaaaggtcttgcgagattcacggatccaccatctccggctgctcaacatcctgggctgccacgccgtcttctttatgatccccacctgggttctggtggacctctcggctttcctggtcagcagcgacttgacctacgtctaccagtggccctggacgctcctgctcctggctgtcagcggcttctgtaactttgcccagaatgttatcgccttcagcatcctcaacctcgttagccccctgagctactcggtcgccaatgccaccaaaagaatcatggtcatcacggtgtccctgatcatgctgcgcaacccagtcaccagcaccaacgtcctgggcatgatgaccgccatcctgggggtcttcctctataacaagaccaagtacgatgcaaaccagcaagccaggaagcacctcctccccgtcaccacagcagacctgagcagcaaggagcgtcaccggagcccactggagaagccccacaacggcctcctcttcccccagcacggggactatcagtacggccgcaacaacatcttaacagaccacttccaatacagccggcagagctacccaaactcgtacagtttgaaccgctatgatgtgtagagtccaaaggacaggaccagactgttggtgactccttccccggcccccacagcagtatcagaaacttctgacaatcagtgaatgtacaacccagccgaggggacggtgcataactctccatcagaagccctggggttcctggccccccgtgagccgcaggaggatgcgttgcctgcagtgcagacggccgtgagctctgggcaaacctaaacagagaccagtgtctcatgctctttcttcctggagtctgtcatctgagggccgtgtccctgcggagatcttggccacgttgtacctttccatgtggaattattccccaagcagtgtagctcagagcacttgtgtctgcattccagataacattcaggacctgtgtgaaaagctggggtcactgtggctgtagaccatgaactggcagtgggggtgtccagggcggtgcttgagaacgtcagactggctagtttaattccctggcgcagatacgcataggaccaacagggtcaccaagcagacagggagcccgcgagaatcattcaaaacatccccagccacagagatggatccagtttcctggtcatccccttagcagttcacaagttcctggcaaatgttccaaagcaaaaagcgattgcaattagcatccagttcctgcagcctggtgctctgccctgcacgtcagggttggcatccacccagatccagatggaagggaaacttctctcttctcctttgcctcctcttccctcaccagagcagggcgcttctcttggggtggtgagaaggatcttcgagaaatcgtgttcagtatttcaagctctatttctgtggcacatgtcttttgagaggcatcttcacctcttctgtgatgacttggtatgttgtttggtagagagatcttgattttcggaggatcttgcatttttctagggaatattttgtagttgtgtgtgtgtgtttttgccttggtccccattatgggatgcattaggactggcctatgcatcgaaaatctttttgtttgtaaacgtttaaaaacaaagttccccggccaggcacagtggctcacacctgtaatcccagcactttgggaggccaagatgggcggatcacgaggtcaggagttcgagaccagcctggccaacatagtgaaaccccatctctactaaaaatacagaaattagccgggcatggtgtcgcgtgcctgtagtcccagctcctcaggctgctgaggcaggcgaattgcttgaacctgggaggcagaagttgtggtgagccgagattgtgcactccagcctgggtaacagagcgagactccatctcaaaaaaaaaaacaaaacaaaaccaagttcccactggtgatgcctgtctgacacgttttggtatttagtaggaaatgaagtgtttcgaagcttcgagagaagcttcaaaattgtcacaattgctgaaaacagaatgaatcgtgaacattatctcaatattttgtataatagacaagaccacagtgttttggttccctgacctgtttttgtgtttatgttaggatctgaatcatgttctgggtaaggggacgaggagcgaacactgcactaagatttggtttgccaaatcagattctttggtcaagagtcagtttggggccaggcgtggtggctcatgcctgtaatctcagcactttgggaggctgaggtgggtggatcactggagtttgagaccaccctggccaacatggtgaaaccccatctctactaaaacaaaaattagccaggcatggtggcacctgcctgtaatcccagctacttgggaggctgaggcaggagaatcacttgagcccaggaggtggaggtttcagcgagctgagatcacaccactgcactccagccttggtgacagagtgagactctgtctcaaaaaaaaaaaaaaaaaaaaggaatcagtttgggtcttggcagaaatcaacataaggaatatgacaagaccccagtaggtaaccctgagtgctcaggtccgagctgtggtctcttttacggcttcatgaaaggaccgtgccctcacggaggggaccacggcttggcttgtggggtcttaggtgatggctgccttctttcttcatcaccacacccagcttcttgctggcacttaggggaagagagcagcaaatgagagatttaccttttatctcccagcgagcgagatgtttccctgttcagagaggaagtaacatcacttatgcttgactggtgtttcttttgttgttgtttgtttttctttcaattggaattctgtatttaagatgttatgtcagctgacacatgggacactcctgaagaggtgactggccccccaccctgtttggcggtgagtttccgcaccaccggcctcagaagtgtccctcttgcttcgtctcttgttcgcttgctttgtaaatactttggtcccaagctgagacaattgctgtgtaaaacgtgaagagtcaatcccaaagggtgttatttgtcagaagaacttgccgtgtgccttcaccgaaggcagtcaagtctgcagttggatttttctcactggtgaatgacaagaaacagggataattttgcactgcggagatattacgggagttgtctatatgattatatatagtacctgattctttgaacatattattgaactccaaaatgaattcgacctccattcaggcttcctgaaatctctgaagttgctgaaatttgtatattattttccttttccaatgcaagatctgctggtgacgggaaatgactgtctggttttattatggtttataaattaataaatgggctatttaattctgta

SEQ ID NO: 364931 - DNA, 4427 bp, Homo sapiens
ttctagcactgtgggtcagcgtttctcccagcgggatgcccgccttcaccttgtgtacttcccatcccagagctgcagtcagcccctccttcaggactccagacctacgtctaccagtggccctggacgctcctgctcctggctgtcagcggcttctgtaactttgcccagaatgttatcgccttcagcatcctcaacctcgttagccccctgagctactcggtcgccaatgccaccaaaagaatcatggtcatcacggtgtccctgatcatgctgcgcaacccagtcaccagcaccaacgtcctgggcatgatgaccgccatcctgggggtcttcctctataacaagaccaagtacgatgcaaaccagcaagccaggaagcacctcctccccgtcaccacagcagacctgagcagcaaggagcgtcaccggagcccactggagaagccccacaacggcctcctcttcccccagcacggggactatcagtacggccgcaacaacatcttaacagaccacttccaatacagccggcagagctacccaaactcgtacagtttgaaccgctatgatgtgtagagtccaaaggacaggaccagactgttggtgactccttccccggcccccacagcagtatcagaaacttctgacaatcagtgaatgtacaacccagccgaggggacggtgcataactctccatcagaagccctggggttcctggccccccgtgagccgcaggaggatgcgttgcctgcagtgcagacggccgtgagctctgggcaaacctaaacagagaccagtgtctcatgctctttcttcctggagtctgtcatctgagggccgtgtccctgcggagatcttggccacgttgtacctttccatgtggaattattccccaagcagtgtagctcagagcacttgtgtctgcattccagataacattcaggacctgtgtgaaaagctggggtcactgtggctgtagaccatgaactggcagtgggggtgtccagggcggtgcttgagaacgtcagactggctagtttaattccctggcgcagatacgcataggaccaacagggtcaccaagcagacagggagcccgcgagaatcattcaaaacatccccagccacagagatggatccagtttcctggtcatccccttagcagttcacaagttcctggcaaatgttccaaagcaaaaagcgattgcaattagcatccagttcctgcagcctggtgctctgccctgcacgtcagggttggcatccacccagatccagatggaagggaaacttctctcttctcctttgcctcctcttccctcaccagagcagggcgcttctcttggggtggtgagaaggatcttcgagaaatcgtgttcagtatttcaagctctatttctgtggcacatgtcttttgagaggcatcttcacctcttctgtgatgacttggtatgttgtttggtagagagatcttgattttcggaggatcttgcatttttctagggaatattttgtagttgtgtgtgtgtgtttttgccttggtccccattatgggatgcattaggactggcctatgcatcgaaaatctttttgtttgtaaacgtttaaaaacaaagttccccggccaggcacagtggctcacacctgtaatcccagcactttgggaggccaagatgggcggatcacgaggtcaggagttcgagaccagcctggccaacatagtgaaaccccatctctactaaaaatacagaaattagccgggcatggtgtcgcgtgcctgtagtcccagctcctcaggctgctgaggcaggcgaattgcttgaacctgggaggcagaagttgtggtgagccgagattgtgcactccagcctgggtaacagagcgagactccatctcaaaaaaaaaaacaaaacaaaaccaagttcccactggtgatgcctgtctgacacgttttggtatttagtaggaaatgaagtgtttcgaagcttcgagagaagcttcaaaattgtcacaattgctgaaaacagaatgaatcgtgaacattatctcaatattttgtataatagacaagaccacagtgttttggttccctgacctgtttttgtgtttatgttaggatctgaatcatgttctgggtaaggggacgaggagcgaacactgcactaagatttggtttgccaaatcagattctttggtcaagagtcagtttggggccaggcgtggtggctcatgcctgtaatctcagcactttgggaggctgaggtgggtggatcactggagtttgagaccaccctggccaacatggtgaaaccccatctctactaaaacaaaaattagccaggcatggtggcacctgcctgtaatcccagctacttgggaggctgaggcaggagaatcacttgagcccaggaggtggaggtttcagcgagctgagatcacaccactgcactccagccttggtgacagagtgagactctgtctcaaaaaaaaaaaaaaaaaaaaggaatcagtttgggtcttggcagaaatcaacataaggaatatgacaagaccccagtaggtaaccctgagtgctcaggtccgagctgtggtctcttttacggcttcatgaaaggaccgtgccctcacggaggggaccacggcttggcttgtggggtcttaggtgatggctgccttctttcttcatcaccacacccagcttcttgctggcacttaggggaagagagcagcaaatgagagatttaccttttatctcccagcgagcgagatgtttccctgttcagagaggaagtaacatcacttatgcttgactggtgtttcttttgttgttgtttgtttttctttcaattggaattctgtatttaagatgttatgtcagctgacacatgggacactcctgaagaggtgactggccccccaccctgtttggcggtgagtttccgcaccaccggcctcagaagtgtccctcttgcttcgtctcttgttcgcttgctttgtaaatactttggtcccaagctgagacaattgctgtgtaaaacgtgaagagtcaatcccaaagggtgttatttgtcagaagaacttgccgtgtgccttcaccgaaggcagtcaagtctgcagttggatttttctcactggtgaatgacaagaaacagggataattttgcactgcggagatattacgggagttgtctatatgattatatatagtacctgattctttgaacatattattgaactccaaaatgaattcgacctccattcaggcttcctgaaatctctgaagttgctgaaatttgtatattattttccttttccaatgcaagatctgctggtgacgggaaatgactgtctggttttattatggtttataaattaataaatgggctatttaattctgtatataaatttacagcaagtacgtacactggaatgaatgaggcaatcacgttacaccaaatcagcagatcaaaagacaaacacatatttctgagacttgaaggtccacatccccccgccccctgccaagatggagtcttgctttgttgctcaggctggagtgcagtggcgcagtctcagctcactacaacctccatcccccgggttcaggtgattctcgtgcctcagcctcccgagtagctgggattacaggcatgcaccaccacggctggctaattttttgtgtttttagtagagacagggtttcaccatgttggccaggctggtctcgaactcctggcctcaaatgatccgcccaccttggcctcccaaagtgctaggatgacaggcatgagccaccgtgcccagcctgattgacaatggcctcttgaaggctgggttttcccagccggacagtgcccgccccacatgctccactcccacgctttcatctgcaggcctgccttcctctcagccacctcactgctgagctctgtggtagagaatttcctttacccatcagggtatggtctggctggtaatactgactccaacccagctccttcattttatagaaggaggcatttctgaatcatgtttgttcaccatggcgagactcactgcagaatttttaaccaccttattttaagtcattcattctaggaacagtcaagcccctaccacaaaggggccagatccgttcaagtgaggaagcacttgcagtttctgaattttgctgtatatttgtcctatgtcacccaacaggccctttgctatagctgggacattaccagaccccaataccttagggtctcacagcctgaaggacacagagcattgaattattaaaagacctgaaaatattataatgtttttcaattgtcacctgttttcaagacttaaatgctatagacttttctgcaggaatgacgtgtatattcctcactggcatttaccaaaaataaatgatggtttccagggaatcaaaa

SEQ ID NO: 364932 - DNA, 3495 bp, Homo sapiens
cggccgcggtgggcgcgggccacggcgcggggggcccgggcgcagcgagcagcagtggtggggcgcgcgagggcgcgcgggtggcggcgctgtgcctgctgtggtacgcgctgagcgcgggcggcaacgtggtcaacaaggtgatcctgagcgccttcccgttcccggtgaccgtgtcgctgtgccacatcctggctctgtgcgctgggctcccgccgctgctgcgcgcctggcgcgtgccccccgcgccgcccgtctcgggccccggacccagtccgcatccgtcgtccggcccgctgctgccgccgcgcttctacccgcgctacgtgctaccgctcgccttcggcaagtacttcgcgtccgtgtcagcgcacgtcagcatctggaaggtgcccgtgtcctatgcacacaccgtcaaggccaccatgcccatctgggtggtcctcctgtcccggatcattatgaaggagaagcagagcaccaaggtatacttgtcactcatccccatcatcagcggtgtcctgctggccaccgtcaccgagttgtcttttgacatgtggggactcgtcagcgccctcgccgccacgctgtgcttctcgcttcagaacattttctccaaaaaggtcttgcgagattcacggatccaccatctccggctgctcaacatcctgggctgccacgccgtcttctttatgatccccacctgggttctggtggacctctcggctttcctggtcagcagcgacttgacctacgtctaccagtggccctggacgctcctgctcctggctgtcagcggcttctgtaactttgcccagaatgttatcgccttcagcatcctcaacctcgttagccccctgagctactcggtcgccaatgccaccaaaagaatcatggtcatcacggtgtccctgatcatgctgcgcaacccagtcaccagcaccaacgtcctgggcatgatgaccgccatcctgggggtcttcctctataacaagaccaagtacgatgcaaaccagcaagccaggaagcacctcctccccgtcaccacagcagacctgagcagcaaggagcgtcaccggagcccactggagaagccccacaacggcctcctcttcccccagcacggggactatcagtacggccgcaacaacatcttaacagaccacttccaatacagccggcagagctacccaaactcgtacagtttgaaccgctatgatgtgtagagtccaaaggacaggaccagactgttggtgactccttccccggcccccacagcagtatcagaaacttctgacaatcagtgaatgtacaacccagccgaggggacggtgcataactctccatcagaagccctggggttcctggccccccgtgagccgcaggaggatgcgttgcctgcagtgcagacggccgtgagctctgggcaaacctaaacagagaccagtgtctcatgctctttcttcctggagtctgtcatctgagggccgtgtccctgcggagatcttggccacgttgtacctttccatgtggaattattccccaagcagtgtagctcagagcacttgtgtctgcattccagataacattcaggacctgtgtgaaaagctggggtcactgtggctgtagaccatgaactggcagtgggggtgtccagggcggtgcttgagaacgtcagactggctagtttaattccctggcgcagatacgcataggaccaacagggtcaccaagcagacagggagcccgcgagaatcattcaaaacatccccagccacagagatggatccagtttcctggtcatccccttagcagttcacaagttcctggcaaatgttccaaagcaaaaagcgattgcaattagcatccagttcctgcagcctggtgctctgccctgcacgtcagggttggcatccacccagatccagatggaagggaaacttctctcttctcctttgcctcctcttccctcaccagagcagggcgcttctcttggggtggtgagaaggatcttcgagaaatcgtgttcagtatttcaagctctatttctgtggcacatgtcttttgagaggcatcttcacctcttctgtgatgacttggtatgttgtttggtagagagatcttgattttcggaggatcttgcatttttctagggaatattttgtagttgtgtgtgtgtgtttttgccttggtccccattatgggatgcattaggactggcctatgcatcgaaaatctttttgtttgtaaacgtttaaaaacaaagttccccggccaggcacagtggctcacacctgtaatcccagcactttgggaggccaagatgggcggatcacgaggtcaggagttcgagaccagcctggccaacatagtgaaaccccatctctactaaaaatacagaaattagccgggcatggtgtcgcgtgcctgtagtcccagctcctcaggctgctgaggcaggcgaattgcttgaacctgggaggcagaagttgtggtgagccgagattgtgcactccagcctgggtaacagagcgagactccatctcaaaaaaaaaaacaaaacaaaaccaagttcccactggtgatgcctgtctgacacgttttggtatttagtaggaaatgaagtgtttcgaagcttcgagagaagcttcaaaattgtcacaattgctgaaaacagaatgaatcgtgaacattatctcaatattttgtataatagacaagaccacagtgttttggttccctgacctgtttttgtgtttatgttaggatctgaatcatgttctgggtaaggggacgaggagcgaacactgcactaagatttggtttgccaaatcagattctttggtcaagagtcagtttgggccaccgtgcccagcctgattgacaatggcctcttgaaggctgggttttcccagccggacagtgcccgccccacatgctccactcccacgctttcatctgcaggcctgccttcctctcagccacctcactgctgagctctgtggtagagaatttcctttacccatcagggtatggtctggctggtaatactgactccaacccagctccttcattttatagaaggaggcatttctgaatcatgtttgttcaccatggcgagactcactgcagaatttttaaccaccttattttaagtcattcattctaggaacagtcaagcccctaccacaaaggggccagatccgttcaagtgaggaagcacttgcagtttctgaattttgctgtatatttgtcctatgtcacccaacaggccctttgctatagctgggacattaccagaccccaataccttagggtctcacagcctgaaggacacagagcattgaattattaaaagacctgaaaatattataatgtttttcaattgtcacctgttttcaagacttaaatgctatagacttttctgcaggaatgacgtgtatattcctcactggcatttaccaaaaataaatgatggtttccagggaatcaaaa

SEQ ID NO: 364933 - DNA, 3169 bp, Homo sapiens
ccagagcaggggcgctctctggtgagggaagaggaggcaaaggagaagagagaagtttccccttccatctggatctgggcgcttctcttggggtggtgagaaggatcttcgagaaatcgtgttcagtatttcaagctctatttctgtggcacatgtcttttgagaggcatcttcacctcttctgtgatgacttggtatgttgtttggtagagagatcttgattttcggaggatcttgcatttttctagggaatattttgtagttgtgtgtgtgtgtttttgccttggtccccattatgggatgcattaggactggcctatgcatcgaaaatctttttgtttgtaaacgtttaaaaacaaagttccccggccaggcacagtggctcacacctgtaatcccagcactttgggaggccaagatgggcggatcacgaggtcaggagttcgagaccagcctggccaacatagtgaaaccccatctctactaaaaatacagaaattagccgggcatggtgtcgcgtgcctgtagtcccagctcctcaggctgctgaggcaggcgaattgcttgaacctgggaggcagaagttgtggtgagccgagattgtgcactccagcctgggtaacagagcgagactccatctcaaaaaaaaaaacaaaacaaaaccaagttcccactggtgatgcctgtctgacacgttttggtatttagtaggaaatgaagtgtttcgaagcttcgagagaagcttcaaaattgtcacaattgctgaaaacagaatgaatcgtgaacattatctcaatattttgtataatagacaagaccacagtgttttggttccctgacctgtttttgtgtttatgttaggatctgaatcatgttctgggtaaggggacgaggagcgaacactgcactaagatttggtttgccaaatcagattctttggtcaagagtcagtttggggccaggcgtggtggctcatgcctgtaatctcagcactttgggaggctgaggtgggtggatcactggagtttgagaccaccctggccaacatggtgaaaccccatctctactaaaacaaaaattagccaggcatggtggcacctgcctgtaatcccagctacttgggaggctgaggcaggagaatcacttgagcccaggaggtggaggtttcagcgagctgagatcacaccactgcactccagccttggtgacagagtgagactctgtctcaaaaaaaaaaaaaaaaaaaaggaatcagtttgggtcttggcagaaatcaacataaggaatatgacaagaccccagtaggtaaccctgagtgctcaggtccgagctgtggtctcttttacggcttcatgaaaggaccgtgccctcacggaggggaccacggcttggcttgtggggtcttaggtgatggctgccttctttcttcatcaccacacccagcttcttgctggcacttaggggaagagagcagcaaatgagagatttaccttttatctcccagcgagcgagatgtttccctgttcagagaggaagtaacatcacttatgcttgactggtgtttcttttgttgttgtttgtttttctttcaattggaattctgtatttaagatgttatgtcagctgacacatgggacactcctgaagaggtgactggccccccaccctgtttggcggtgagtttccgcaccaccggcctcagaagtgtccctcttgcttcgtctcttgttcgcttgctttgtaaatactttggtcccaagctgagacaattgctgtgtaaaacgtgaagagtcaatcccaaagggtgttatttgtcagaagaacttgccgtgtgccttcaccgaaggcagtcaagtctgcagttggatttttctcactggtgaatgacaagaaacagggataattttgcactgcggagatattacgggagttgtctatatgattatatatagtacctgattctttgaacatattattgaactccaaaatgaattcgacctccattcaggcttcctgaaatctctgaagttgctgaaatttgtatattattttccttttccaatgcaagatctgctggtgacgggaaatgactgtctggttttattatggtttataaattaataaatgggctatttaattctgtatataaatttacagcaagtacgtacactggaatgaatgaggcaatcacgttacaccaaatcagcagatcaaaagacaaacacatatttctgagacttgaaggtccacatccccccgccccctgccaagatggagtcttgctttgttgctcaggctggagtgcagtggcgcagtctcagctcactacaacctccatcccccgggttcaggtgattctcgtgcctcagcctcccgagtagctgggattacaggcatgcaccaccacggctggctaattttttgtgtttttagtagagacagggtttcaccatgttggccaggctggtctcgaactcctggcctcaaatgatccgcccaccttggcctcccaaagtgctaggatgacaggcatgagccaccgtgcccagcctgattgacaatggcctcttgaaggctgggttttcccagccggacagtgcccgccccacatgctccactcccacgctttcatctgcaggcctgccttcctctcagccacctcactgctgagctctgtggtagagaatttcctttacccatcagggtatggtctggctggtaatactgactccaacccagctccttcattttatagaaggaggcatttctgaatcatgtttgttcaccatggcgagactcactgcagaatttttaaccaccttattttaagtcattcattctaggaacagtcaagcccctaccacaaaggggccagatccgttcaagtgaggaagcacttgcagtttctgaattttgctgtatatttgtcctatgtcacccaacaggccctttgctatagctgggacattaccagaccccaataccttagggtctcacagcctgaaggacacagagcattgaattattaaaagacctgaaaatattataatgtttttcaattgtcacctgttttcaagacttaaatgctatagacttttctgcaggaatgacgtgtatattcctcactggcatttaccaaaaataaatgatggtttccagggaatcaaaa

SEQ ID NO: 364934 - DNA, 2670 bp, Homo sapiens
gagacagggtctcactgtgttgcccaggctgccctcgaatgattttttttccttagcctcccagagtgctgggattacaggcatgagccaccacgcccaacctaaactggtttttttgtttgttttttcgagactccatctcaaaaaaaaaaacaaaacaaaaccaagttcccactggtgatgcctgtctgacacgttttggtatttagtaggaaatgaagtgtttcgaagcttcgagagaagcttcaaaattgtcacaattgctgaaaacagaatgaatcgtgaacattatctcaatattttgtataatagacaagaccacagtgttttggttccctgacctgtttttgtgtttatgttaggatctgaatcatgttctgggtaaggggacgaggagcgaacactgcactaagatttggtttgccaaatcagattctttggtcaagagtcagtttggggccaggcgtggtggctcatgcctgtaatctcagcactttgggaggctgaggtgggtggatcactggagtttgagaccaccctggccaacatggtgaaaccccatctctactaaaacaaaaattagccaggcatggtggcacctgcctgtaatcccagctacttgggaggctgaggcaggagaatcacttgagcccaggaggtggaggtttcagcgagctgagatcacaccactgcactccagccttggtgacagagtgagactctgtctcaaaaaaaaaaaaaaaaaaaaggaatcagtttgggtcttggcagaaatcaacataaggaatatgacaagaccccagtaggtaaccctgagtgctcaggtccgagctgtggtctcttttacggcttcatgaaaggaccgtgccctcacggaggggaccacggcttggcttgtggggtcttaggtgatggctgccttctttcttcatcaccacacccagcttcttgctggcacttaggggaagagagcagcaaatgagagatttaccttttatctcccagcgagcgagatgtttccctgttcagagaggaagtaacatcacttatgcttgactggtgtttcttttgttgttgtttgtttttctttcaattggaattctgtatttaagatgttatgtcagctgacacatgggacactcctgaagaggtgactggccccccaccctgtttggcggtgagtttccgcaccaccggcctcagaagtgtccctcttgcttcgtctcttgttcgcttgctttgtaaatactttggtcccaagctgagacaattgctgtgtaaaacgtgaagagtcaatcccaaagggtgttatttgtcagaagaacttgccgtgtgccttcaccgaaggcagtcaagtctgcagttggatttttctcactggtgaatgacaagaaacagggataattttgcactgcggagatattacgggagttgtctatatgattatatatagtacctgattctttgaacatattattgaactccaaaatgaattcgacctccattcaggcttcctgaaatctctgaagttgctgaaatttgtatattattttccttttccaatgcaagatctgctggtgacgggaaatgactgtctggttttattatggtttataaattaataaatgggctatttaattctgtatataaatttacagcaagtacgtacactggaatgaatgaggcaatcacgttacaccaaatcagcagatcaaaagacaaacacatatttctgagacttgaaggtccacatccccccgccccctgccaagatggagtcttgctttgttgctcaggctggagtgcagtggcgcagtctcagctcactacaacctccatcccccgggttcaggtgattctcgtgcctcagcctcccgagtagctgggattacaggcatgcaccaccacggctggctaattttttgtgtttttagtagagacagggtttcaccatgttggccaggctggtctcgaactcctggcctcaaatgatccgcccaccttggcctcccaaagtgctaggatgacaggcatgagccaccgtgcccagcctgattgacaatggcctcttgaaggctgggttttcccagccggacagtgcccgccccacatgctccactcccacgctttcatctgcaggcctgccttcctctcagccacctcactgctgagctctgtggtagagaatttcctttacccatcagggtatggtctggctggtaatactgactccaacccagctccttcattttatagaaggaggcatttctgaatcatgtttgttcaccatggcgagactcactgcagaatttttaaccaccttattttaagtcattcattctaggaacagtcaagcccctaccacaaaggggccagatccgttcaagtgaggaagcacttgcagtttctgaattttgctgtatatttgtcctatgtcacccaacaggccctttgctatagctgggacattaccagaccccaataccttagggtctcacagcctgaaggacacagagcattgaattattaaaagacctgaaaatattataatgtttttcaattgtcacctgttttcaagacttaaatgctatagacttttctgcaggaatgacgtgtatattcctcactggcatttaccaaaaataaatgatggtttccagggaatcaaaa

SEQ ID NO: 364935 - DNA, 2734 bp, Homo sapiens
cggccgcggtgggcgcgggccacggcgcggggggcccgggcgcagcgagcagcagtggtggggcgcgcgagggcgcgcgggtggcggcgctgtgcctgctgtggtacgcgctgagcgcgggcggcaacgtggtcaacaaggtgatcctgagcgccttcccgttcccggtgaccgtgtcgctgtgccacatcctggctctgtgcgctgggctcccgccgctgctgcgcgcctggcgcgtgccccccgcgccgcccgtctcgggccccggacccagtccgcatccgtcgtccggcccgctgctgccgccgcgcttctacccgcgctacgtgctaccgctcgccttcggcaagtacttcgcgtccgtgtcagcgcacgtcagcatctggaaggtgcccgtgtcctatgcacacaccgtcaaggccaccatgcccatctgggtggtcctcctgtcccggatcattatgaaggagaagcagagcaccaaggtatacttgtcactcatccccatcatcagcggtgtcctgctggccaccgtcaccgagttgtcttttgacatgtggggactcgtcagcgccctcgccgccacgctgtgcttctcgcttcagaacattttctccaaaaaggtcttgcgagattcacggatccaccatctccggctgctcaacatcctgggctgccacgccgtcttctttatgatccccacctgggttctggtggacctctcggctttcctggtcagcagcgacttggtgagttgtacagcaccaagaacacgccattttcttggctagttccagaataggtgctttgttgaggagctgtagctgcatgttaacattgtggtatcttttgggcacctgacagccagcgctttcagcagtcagtcctctgtaatgcctcacggtgacgatgcacgccatcgaggaagtgggtttcctgtgtatttccttctctggtgtgcttgatcccaggtgctgatagctgctgtgtgtgcgccagtagcgtcaaggaagagaaggtgactctttcacctcctgacagtatagtccagatagcacattgactttttatttttactcattttttattttaaatgtttattttttagagacagaacctcgctctgttgccagggctggagtgcagtggcacaatcatggctcactgcggccttgacctcaatccggggctcaagcgatcctcccacagcctcccgagtaactgggactgcaggcgaataccaccatgcctggctaatttttttttgtttgatttttgtttttttactgtttttggagagacagggtctcgctatgttgcccaggctggtcctgaactcctggcgttaagagatctgccttggcctcccaaagtgctgggattacagatgtgagccactgtgccttgccagccctggaactttgaaaactatgcactggccaaaaaaaaaaaaaaaaaaaaaaaaaaagccgggcgcagtggctcacgcctgtaatcccagcactctgggaggccaaggcgggcggatcacgaggtcaggagtttgagaccagcctggccaatatggtgacaccctgtttctcccaaaaatacaaaaattagccaggcatggtggctcgcgcctgtagtcccagctacttgggaggctgaggcagaagaattgcttgaacccaggatgtggcggttgcagtgagccgagatggtgccactgcactccagcctgggtgacagagggagactccgtgtcaaaaaaaaaaagaaaaaaacgtgcgctgcctgggtgtggtggcttacgcctataatcccagcactttgggaggccaaggtgtgtgaatcattcgaggtcaggagttcgagaccagcctgaccaatatggtgaaatcctgtctctactaaaaatacaaaattagccaggcgtggtggtgcacgcctgtaatcccagccacttgggaggctgaggtgggagaatcgcttgaacccagaaggcagagtttgcagtgagccgagatcgcaccactgcactccagcctgggcaacaagtgtgaagctccgtctcaaaaaaaaaaaagaaagaaagaaaactgtgcagctcagttcctccctggtctctgtttccatttactccacgtcgaatctttttgccacctgcagggtctgccttcagagaatgtgttataaatgaatgcaagtgcctgcggtgaggaggaggccagtgcgattcttccagactcgagttagaaaggaaaagtaaatatttattgaggtcttaatgtggtctagctggatttgtgacatttcttatctttaatccttggctccacctgctgaagtagtggatattacctctattttcccaatcagtaaaccatggctcacttttctaactttcgtttcacattgatgagctgtaattcttctgtgaagaactttccatcttccaggactagtttgttaccttgaagtatggtacgagaaaggcagtttaatgcttaactgttccttttgatgactaattttcaggatagagagttggagcttactccaaatgttgaccagagttgagggtttgtttgggggtagggaaggggttctctttttttctccagcatcattgtgaacttttatgtgtttgtcagttgcatgaattgcttgaacctggaaggcggaggttgcggtgagctgagatcgtaccactgcactccagcctgggcaacaagtgtgaagctccgtctca

SEQ ID NO: 364936 - DNA, 818 bp, Homo sapiens
gcataatattggagtattcctaaatgccactgaattgtgcactttaaaacagggaagttggtaaattttatgttgtttattttaccaccaccaccacaactaaagataaagaaaacacaacaagtgtgaagctccgtctcaaaaaaaaaaaagaaagaaagaaaactgtgcagctcagttcctccctggtctctgtttccatttactccacgtcgaatctttttgccacctgcagggtctgccttcagagaatgtgttataaatgaatgcaagtgcctgcggtgaggaggaggccagtgcgattcttccagactcgagttagaaaggaaaagtaaatatttattgaggtcttaatgtggtctagctggatttgtgacatttcttatctttaatccttggctccacctgctgaagtagtggatattacctctattttcccaatcagtaaaccatggctcacttttctaactttcgtttcacattgatgagctgtaattcttctgtgaagaactttccatcttccaggactagtttgttaccttgaagtatggtacgagaaaggcagtttaatgcttaactgttccttttgatgactaattttcaggatagagagttggagcttactccaaatgttgaccagagttgagggtttgtttgggggtagggaaggggttctctttttttctccagcatcattgtgaacttttatgtgtttgtcagttgcatgaattgcttgaacctggaaggcggaggttgcggtgagctgagatcgtaccactgcactccagcctgggcaacaagtgtgaagctccgtctca

SEQ ID NO: 364937 - DNA, 472 bp, Homo sapiens
gcgcggggggcccgggcgcagcgagcagcagtggtggggcgcgcgagggcgcgcgggtggcggcgctgtgcctgctgtggtacgcgctgagcgcgggcggcaacgtggtcaacaaggtgatcctgagcgccttcccgttcccggtgaccgtgtcgctgtgccacatcctggctctgtgcgctgggctcccgccgctgctgcgcgcctggcgcgtgccccccgcgccgcccgtctcgggccccggacccagtccgcatccgtcgtccggcccgctgctgccgccgcgcttctacccgcgctacgtgctaccgctcgccttcggcaagtacttcgcgtccgtgtcagcgcacgtcagcatctggaaggtgcccgtgtcctatgcacacaccggtaggttccgcgcccggcctcgggggcggcggccgggcccgccgcttcgggtttgggcgcatggataggagtgcgccgcccg

SEQ ID NO: 364938 - DNA, 622 bp, Homo sapiens
acagcgtcttgctctgtctcccaggctggagtgcagtggtatggtcccagctcactgcaacctccgcctcctgggttcaagtgattcttgtgcctcagaacgcctgagtagctggaactacagcatgcgccaccacacccggttaattttttgtatttttagtagagacggggttttgccatgttgcccaggctggtctcaaactcctgagctcaggtgatcctcccgcctcgacctcccaaagtgctgggattacaggtgtgagccaccgcagccagccagttgattgactttgaattacgagctcttatgccccgggcatgtcctgtctcattgctctctttctggcacagaccaagtacgatgcaaaccagcaagccaggaagcacctcctccccgtcaccacagcagacctgagcagcaaggagcgtcaccggagcccactggagaagccccacaacggcctcctcttcccccagcacggggactatcagtacggccgcaacaacatcttaacagaccacttccaatacagccggcagagctacccaaactcgtacagtttgaaccgctatgatgtgtagagtccaaaggacaggaccagactgttggtgactccttc

SEQ ID NO: 364939 - DNA, 812 bp, Homo sapiens
cggccgcggtgggcgcgggccacggcgcggggggcccgggcgcagcgagcagcagtggtggggcgcgcgagggcgcgcgggtggcggcgctgtgcctgctgtggtacgcgctgagcgcgggcggcaacgtggtcaacaaggtgatcctgagcgccttcccgttcccggtgaccgtgtcgctgtgccacatcctggctctgtgcgctgggctcccgccgctgctgcgcgcctggcgcgtgccccccgcgccgcccgtctcgggccccggacccagtccgcatccgtcgtccggcccgctgctgccgccgcgcttctacccgcgctacgtgctaccgctcgccttcggcaagtacttcgcgtccgtgtcagcgcacgtcagcatctggaaggtgcccgtgtcctatgcacacaccgtcaaggccaccatgcccatctgggtggtcctcctgtcccggatcattatgaaggagaagcagagcaccaaggtaaccccgggcagggactctgggcagatgggagctccagggggttcctccctgttgccaactggtgacgtggtcaggatcctggtctgcaggctgcctggcttcccgtcaaatagggaagtcagtgtagaggtctccagtggccttttactactcaagttctagaatcaccctgtgagcagtggtgtgtggagtatgtgtccctctgtgatctctgctgtgtggtcttaggaacactgttgtccctttcagatccaattttcctccccgttttgattccctacctgggtttgctggtaggtgatgggttggtcacatcttggccat

SEQ ID NO: 364940 - DNA, 5422 bp, Homo sapiens
cggccgcggtgggcgcgggccacggcgcggggggcccgggcgcagcgagcagcagtggtggggcgcgcgagggcgcgcgggtggcggcgctgtgcctgctgtggtacgcgctgagcgcgggcggcaacgtggtcaacaaggtgatcctgagcgccttcccgttcccggtgaccgtgtcgctgtgccacatcctggctctgtgcgctgggctcccgccgctgctgcgcgcctggcgcgtgccccccgcgccgcccgtctcgggccccggacccagtccgcatccgtcgtccggcccgctgctgccgccgcgcttctacccgcgctacgtgctaccgctcgccttcggcaagtacttcgcgtccgtgtcagcgcacgtcagcatctggaaggtgcccgtgtcctatgcacacaccgtcaaggccaccatgcccatctgggtggtcctcctgtcccggatcattatgaaggagaagcagagcaccaaggtatacttgtcactcatccccatcatcagcggtgtcctgctggccaccgtcaccgagttgtcttttgacatgtggggactcgtcagcgccctcgccgccacgctgtgcttctcgcttcagaacattttctccaaaaaggtcttgcgagattcacggatccaccatctccggctgctcaacatcctgggctgccacgccgtcttctttatgatccccacctgggttctggtggacctctcggctttcctggtcagcagcgacttgacctacgtctaccagtggccctggacgctcctgctcctggctgtcagcggcttctgtaactttgcccagaatgttatcgccttcagcatcctcaacctcgttagccccctgagctactcggtcgccaatgccaccaaaagaatcatggtcatcacggtgtccctgatcatgctgcgcaacccagtcaccagcaccaacgtcctgggcatgatgaccgccatcctgggggtcttcctctataacaagaccaagtacgatgcaaaccagcaagccaggaagcacctcctccccgtcaccacagcagacctgagcagcaaggagcgtcaccggagcccactggagaagccccacaacggcctcctcttcccccagcacggggactatcagtacggccgcaacaacatcttaacagaccacttccaatacagccggcagagctacccaaactcgtacagtttgaaccgctatgatgtgtagagtccaaaggacaggaccagactgttggtgactccttccccggcccccacagcagtatcagaaacttctgacaatcagtgaatgtacaacccagccgaggggacggtgcataactctccatcagaagccctggggttcctggccccccgtgagccgcaggaggatgcgttgcctgcagtgcagacggccgtgagctctgggcaaacctaaacagagaccagtgtctcatgctctttcttcctggagtctgtcatctgagggccgtgtccctgcggagatcttggccacgttgtacctttccatgtggaattattccccaagcagtgtagctcagagcacttgtgtctgcattccagataacattcaggacctgtgtgaaaagctggggtcactgtggctgtagaccatgaactggcagtgggggtgtccagggcggtgcttgagaacgtcagactggctagtttaattccctggcgcagatacgcataggaccaacagggtcaccaagcagacagggagcccgcgagaatcattcaaaacatccccagccacagagatggatccagtttcctggtcatccccttagcagttcacaagttcctggcaaatgttccaaagcaaaaagcgattgcaattagcatccagttcctgcagcctggtgctctgccctgcacgtcagggttggcatccacccagatccagatggaagggaaacttctctcttctcctttgcctcctcttccctcaccagagcagggcgcttctcttggggtggtgagaaggatcttcgagaaatcgtgttcagtatttcaagctctatttctgtggcacatgtcttttgagaggcatcttcacctcttctgtgatgacttggtatgttgtttggtagagagatcttgattttcggaggatcttgcatttttctagggaatattttgtagttgtgtgtgtgtgtttttgccttggtccccattatgggatgcattaggactggcctatgcatcgaaaatctttttgtttgtaaacgtttaaaaacaaagttccccggccaggcacagtggctcacacctgtaatcccagcactttgggaggccaagatgggcggatcacgaggtcaggagttcgagaccagcctggccaacatagtgaaaccccatctctactaaaaatacagaaattagccgggcatggtgtcgcgtgcctgtagtcccagctcctcaggctgctgaggcaggcgaattgcttgaacctgggaggcagaagttgtggtgagccgagattgtgcactccagcctgggtaacagagcgagactccatctcaaaaaaaaaaacaaaacaaaaccaagttcccactggtgatgcctgtctgacacgttttggtatttagtaggaaatgaagtgtttcgaagcttcgagagaagcttcaaaattgtcacaattgctgaaaacagaatgaatcgtgaacattatctcaatattttgtataatagacaagaccacagtgttttggttccctgacctgtttttgtgtttatgttaggatctgaatcatgttctgggtaaggggacgaggagcgaacactgcactaagatttggtttgccaaatcagattctttggtcaagagtcagtttggggccaggcgtggtggctcatgcctgtaatctcagcactttgggaggctgaggtgggtggatcactggagtttgagaccaccctggccaacatggtgaaaccccatctctactaaaacaaaaattagccaggcatggtggcacctgcctgtaatcccagctacttgggaggctgaggcaggagaatcacttgagcccaggaggtggaggtttcagcgagctgagatcacaccactgcactccagccttggtgacagagtgagactctgtctcaaaaaaaaaaaaaaaaaaaaggaatcagtttgggtcttggcagaaatcaacataaggaatatgacaagaccccagtaggtaaccctgagtgctcaggtccgagctgtggtctcttttacggcttcatgaaaggaccgtgccctcacggaggggaccacggcttggcttgtggggtcttaggtgatggctgccttctttcttcatcaccacacccagcttcttgctggcacttaggggaagagagcagcaaatgagagatttaccttttatctcccagcgagcgagatgtttccctgttcagagaggaagtaacatcacttatgcttgactggtgtttcttttgttgttgtttgtttttctttcaattggaattctgtatttaagatgttatgtcagctgacacatgggacactcctgaagaggtgactggccccccaccctgtttggcggtgagtttccgcaccaccggcctcagaagtgtccctcttgcttcgtctcttgttcgcttgctttgtaaatactttggtcccaagctgagacaattgctgtgtaaaacgtgaagagtcaatcccaaagggtgttatttgtcagaagaacttgccgtgtgccttcaccgaaggcagtcaagtctgcagttggatttttctcactggtgaatgacaagaaacagggataattttgcactgcggagatattacgggagttgtctatatgattatatatagtacctgattctttgaacatattattgaactccaaaatgaattcgacctccattcaggcttcctgaaatctctgaagttgctgaaatttgtatattattttccttttccaatgcaagatctgctggtgacgggaaatgactgtctggttttattatggtttataaattaataaatgggctatttaattctgtatataaatttacagcaagtacgtacactggaatgaatgaggcaatcacgttacaccaaatcagcagatcaaaagacaaacacatatttctgagacttgaaggtccacatccccccgccccctgccaagatggagtcttgctttgttgctcaggctggagtgcagtggcgcagtctcagctcactacaacctccatcccccgggttcaggtgattctcgtgcctcagcctcccgagtagctgggattacaggcatgcaccaccacggctggctaattttttgtgtttttagtagagacagggtttcaccatgttggccaggctggtctcgaactcctggcctcaaatgatccgcccaccttggcctcccaaagtgctaggatgacaggcatgagccaccgtgcccagcctgattgacaatggcctcttgaaggctgggttttcccagccggacagtgcccgccccacatgctccactcccacgctttcatctgcaggcctgccttcctctcagccacctcactgctgagctctgtggtagagaatttcctttacccatcagggtatggtctggctggtaatactgactccaacccagctccttcattttatagaaggaggcatttctgaatcatgtttgttcaccatggcgagactcactgcagaatttttaaccaccttattttaagtcattcattctaggaacagtcaagcccctaccacaaaggggccagatccgttcaagtgaggaagcacttgcagtttctgaattttgctgtatatttgtcctatgtcacccaacaggccctttgctatagctgggacattaccagaccccaataccttagggtctcacagcctgaaggacacagagcattgaattattaaaagacctgaaaatattataatgtttttcaattgtcacctgttttcaagacttaaatgctatagacttttctgcaggaatgacgtgtatattcctcactggcatttaccaaaaataaatgatggtttccagggaatcaaaaaaaaaacaaaaaaaaaaaaaaaaaaaaaaaaaaaaaaaacaaaaaaaaaaaaaaaaaaaaaaaaaaaaaaaaaaaaaaggggggcgcacgtaataacaaaccacgggcgacaaagacattgaggacagccacagactgaaggaaagacgagaccacaaatgacgagagataataaccaacgagaccggggcgacaacaacacacgggtgagaagaaaccgagacggggcatgtggaaaacacactctgggggggaagaagggagacacaccagaaaaaaaaccggaagggaaaaacaaacagtaaagggaacaccagcaatgcagggaaagtgtagatttataacaac

SEQ ID NO: 364941 - DNA, 4192 bp, Homo sapiens
  misc_feature (4059)..(4059): n is a, c, g, or t
  misc_feature (4067)..(4067): n is a, c, g, or t
cggccgcggtgggcgcgggccacggcgcggggggcccgggcgcagcgagcagcagtggtggggcgcgcgagggcgcgcgggtggcggcgctgtgcctgctgtggtacgcgctgagcgcgggcggcaacgtggtcaacaaggtgatcctgagcgccttcccgttcccggtgaccgtgtcgctgtgccacatcctggctctgtgcgctgggctcccgccgctgctgcgcgcctggcgcgtgccccccgcgccgcccgtctcgggccccggacccagtccgcatccgtcgtccggcccgctgctgccgccgcgcttctacccgcgctacgtgctaccgctcgccttcggcaagtacttcgcgtccgtgtcagcgcacgtcagcatctggaaggtgcccgtgtcctatgcacacaccgtcaaggccaccatgcccatctgggtggtcctcctgtcccggatcattatgaaggagaagcagagcaccaaggtatacttgtcactcatccccatcatcagcggtgtcctgctggccaccgtcaccgagttgtcttttgacatgtggggactcgtcagcgccctcgccgccacgctgtgcttctcgcttcagaacattttctccaaaaaggtcttgcgagattcacggatccaccatctccggctgctcaacatcctgggctgccacgccgtcttctttatgatccccacctgggttctggtggacctctcggctttcctggtcagcagcgacttgacctacgtctaccagtggccctggacgctcctgctcctggctgtcagcggcttctgtaactttgcccagaatgttatcgccttcagcatcctcaacctcgttagccccctgagctactcggtcgccaatgccaccaaaagaatcatggtcatcacggtgtccctgatcatgctgcgcaacccagtcaccagcaccaacgtcctgggcatgatgaccgccatcctgggggtcttcctctataacaagaccaagtacgatgcaaaccagcaagccaggaagcacctcctccccgtcaccacagcagacctgagcagcaaggagcgtcaccggagcccactggagaagccccacaacggcctcctcttcccccagcacggggactatcagtacggccgcaacaacatcttaacagaccacttccaatacagccggcagagctacccaaactcgtacagtttgaaccgctatgatgtgtagagtccaaaggacaggaccagactgttggtgactccttccccggcccccacagcagtatcagaaacttctgacaatcagtgaatgtacaacccagccgaggggacggtgcataactctccatcagaagccctggggttcctggccccccgtgagccgcaggaggatgcgttgcctgcagtgcagacggccgtgagctctgggcaaacctaaacagagaccagtgtctcatgctctttcttcctggagtctgtcatctgagggccgtgtccctgcggagatcttggccacgttgtacctttccatgtggaattattccccaagcagtgtagctcagagcacttgtgtctgcattccagataacattcaggacctgtgtgaaaagctggggtcactgtggctgtagaccatgaactggcagtgggggtgtccagggcggtgcttgagaacgtcagactggctagtttaattccctggcgcagatacgcataggaccaacagggtcaccaagcagacagggagcccgcgagaatcattcaaaacatccccagccacagagatggatccagtttcctggtcatccccttagcagttcacaagttcctggcaaatgttccaaagcaaaaagcgattgcaattagcatccagttcctgcagcctggtgctctgccctgcacgtcagggttggcatccacccagatccagatggaagggaaacttctctcttctcctttgcctcctcttccctcaccagagcagggcgcttctcttggggtggtgagaaggatcttcgagaaatcgtgttcagtatttcaagctctatttctgtggcacatgtcttttgagaggcatcttcacctcttctgtgatgacttggtatgttgtttggtagagagatcttgattttcggaggatcttgcatttttctagggaatattttgtagttgtgtgtgtgtgtttttgccttggtccccattatgggatgcattaggactggcctatgcatcgaaaatctttttgtttgtaaacgtttaaaaacaaagttccccggccaggcacagtggctcacacctgtaatcccagcactttgggaggccaagatgggcggatcacgaggtcaggagttcgagaccagcctggccaacatagtgaaaccccatctctactaaaaatacagaaattagccgggcatggtgtcgcgtgcctgtagtcccagctcctcaggctgctgaggcaggcgaattgcttgaacctgggaggcagaagttgtggtgagccgagattgtgcactccagcctgggtaacagagcgagactccatctcaaaaaaaaaaacaaaacaaaaccaagttcccactggtgatgcctgtctgacacgttttggtatttagtaggaaatgaagtgtttcgaagcttcgagagaagcttcaaaattgtcacaattgctgaaaacagaatgaatcgtgaacattatctcaatattttgtataatagacaagaccacagtgttttggttccctgacctgtttttgtgtttatgttaggatctgaatcatgttctgggtaaggggacgaggagcgaacactgcactaagatttggtttgccaaatcagattctttggtcaagagtcagtttggggccaggcgtggtggctcatgcctgtaatctcagcactttgggaggctgaggtgggtggatcactggagtttgagaccaccctggccaacatggtgaaaccccatctctactaaaacaaaaattagccaggcatggtggcacctgcctgtaatcccagctacttgggaggctgaggcaggagaatcacttgagcccaggaggtggaggtttcagcgagctgagatcacaccactgcactccagccttggtgacagagtgagactctgtctcaaaaaaaaaaaaaaaaaaaaggaatcagtttgggtcttggcagaaatcaacataaggaatatgacaagaccccagtaggtaaccctgagtgctcaggtccgagctgtggtctcttttacggcttcatgaaaggaccgtgccctcacggaggggaccacggcttggcttgtggggtcttaggtgatggctgccttctttcttcatcaccacacccagcttcttgctggcacttaggggaagagagcagcaaatgagagatttaccttttatctcccagcgagcgagatgtttccctgttcagagaggaagtaacatcacttatgcttgactggtgtttcttttgttgttgtttgtttttctttcaattggaattctgtatttaagatgttatgtcagctgacacatgggacactcctgaagaggtgactggccccccaccctgtttggcggtgagtttccgcaccaccggcctcagaagtgtccctcttgcttcgtctcttgttcgcttgctttgtaaatactttggtcccaagctgagacaattgctgtgtaaaacgtgaagagtcaatcccaaagggtgttatttgtcagaagaacttgccgtgtgccttcaccgaaggcagtcaagtctgcagttggatttttctcactggtgaatgacaagaaacagggataattttgcactgcggagatattacgggagttgtctatatgattatatatagtacctgattctttgaacatattattgaactccaaaatgaattcgacctccattcaggcttcctgaaatctctgaagttgctgaaatttgtatattattttccttttccaatgcaagatctgctggtgacgggaaatgactgtctggttttattatggtttataaattaataaatgggctatttaattctgtaaaaaaaaaanacttaaanaaaaacactaaccccttacatattataaaataatatttaattttttaccctcccacatccaaaataatttttttttccttggggggggcccgggcccatttcgcccttttttgagttttttcccc

SEQ ID NO: 364942 - DNA, 4227 bp, Homo sapiens
cggccgcggtgggcgcgggccacggcgcggggggcccgggcgcagcgagcagcagtggtggggcgcgcgagggcgcgcgggtggcggcgctgtgcctgctgtggtacgcgctgagcgcgggcggcaacgtggtcaacaaggtgatcctgagcgccttcccgttcccggtgaccgtgtcgctgtgccacatcctggctctgtgcgctgggctcccgccgctgctgcgcgcctggcgcgtgccccccgcgccgcccgtctcgggccccggacccagtccgcatccgtcgtccggcccgctgctgccgccgcgcttctacccgcgctacgtgctaccgctcgccttcggcaagtacttcgcgtccgtgtcagcgcacgtcagcatctggaaggtgcccgtgtcctatgcacacaccgtcaaggccaccatgcccatctgggtggtcctcctgtcccggatcattatgaaggagaagcagagcaccaaggtatacttgtcactcatccccatcatcagcggtgtcctgctggccaccgtcaccgagttgtcttttgacatgtggggactcgtcagcgccctcgccgccacgctgtgcttctcgcttcagaacattttctccaaaaaggtcttgcgagattcacggatccaccatctccggctgctcaacatcctgggctgccacgccgtcttctttatgatccccacctgggttctggtggacctctcggctttcctggtcagcagcgacttgacctacgtctaccagtggccctggacgctcctgctcctggctgtcagcggcttctgtaactttgcccagaatgttatcgccttcagcatcctcaacctcgttagccccctgagctactcggtcgccaatgccaccaaaagaatcatggtcatcacggtgtccctgatcatgctgcgcaacccagtcaccagcaccaacgtcctgggcatgatgaccgccatcctgggggtcttcctctataacaagaccaagtacgatgcaaaccagcaagccaggaagcacctcctccccgtcaccacagcagacctgagcagcaaggagcgtcaccggagcccactggagaagccccacaacggcctcctcttcccccagcacggggactatcagtacggccgcaacaacatcttaacagaccacttccaatacagccggcagagctacccaaactcgtacagtttgaaccgctatgatgtgtagagtccaaaggacaggaccagactgttggtgactccttccccggcccccacagcagtatcagaaacttctgacaatcagtgaatgtacaacccagccgaggggacggtgcataactctccatcagaagccctggggttcctggccccccgtgagccgcaggaggatgcgttgcctgcagtgcagacggccgtgagctctgggcaaacctaaacagagaccagtgtctcatgctctttcttcctggagtctgtcatctgagggccgtgtccctgcggagatcttggccacgttgtacctttccatgtggaattattccccaagcagtgtagctcagagcacttgtgtctgcattccagataacattcaggacctgtgtgaaaagctggggtcactgtggctgtagaccatgaactggcagtgggggtgtccagggcggtgcttgagaacgtcagactggctagtttaattccctggcgcagatacgcataggaccaacagggtcaccaagcagacagggagcccgcgagaatcattcaaaacatccccagccacagagatggatccagtttcctggtcatccccttagcagttcacaagttcctggcaaatgttccaaagcaaaaagcgattgcaattagcatccagttcctgcagcctggtgctctgccctgcacgtcagggttggcatccacccagatccagatggaagggaaacttctctcttctcctttgcctcctcttccctcaccagagcagggcgcttctcttggggtggtgagaaggatcttcgagaaatcgtgttcagtatttcaagctctatttctgtggcacatgtcttttgagaggcatcttcacctcttctgtgatgacttggtatgttgtttggtagagagatcttgattttcggaggatcttgcatttttctagggaatattttgtagttgtgtgtgtgtgtttttgccttggtccccattatgggatgcattaggactggcctatgcatcgaaaatctttttgtttgtaaacgtttaaaaacaaagttccccggccaggcacagtggctcacacctgtaatcccagcactttgggaggccaagatgggcggatcacgaggtcaggagttcgagaccagcctggccaacatagtgaaaccccatctctactaaaaatacagaaattagccgggcatggtgtcgcgtgcctgtagtcccagctcctcaggctgctgaggcaggcgaattgcttgaacctgggaggcagaagttgtggtgagccgagattgtgcactccagcctgggtaacagagcgagactccatctcaaaaaaaaaaacaaaacaaaaccaagttcccactggtgatgcctgtctgacacgttttggtatttagtaggaaatgaagtgtttcgaagcttcgagagaagcttcaaaattgtcacaattgctgaaaacagaatgaatcgtgaacattatctcaatattttgtataatagacaagaccacagtgttttggttccctgacctgtttttgtgtttatgttaggatctgaatcatgttctgggtaaggggacgaggagcgaacactgcactaagatttggtttgccaaatcagattctttggtcaagagtcagtttggggccaggcgtggtggctcatgcctgtaatctcagcactttgggaggctgaggtgggtggatcactggagtttgagaccaccctggccaacatggtgaaaccccatctctactaaaacaaaaattagccaggcatggtggcacctgcctgtaatcccagctacttgggaggctgaggcaggagaatcacttgagcccaggaggtggaggtttcagcgagctgagatcacaccactgcactccagccttggtgacagagtgagactctgtctcaaaaaaaaaaaaaaaaaaaaggaatcagtttgggtcttggcagaaatcaacataaggaatatgacaagaccccagtaggtaaccctgagtgctcaggtccgagctgtggtctcttttacggcttcatgaaaggaccgtgccctcacggaggggaccacggcttggcttgtggggtcttaggtgatggctgccttctttcttcatcaccacacccagcttcttgctggcacttaggggaagagagcagcaaatgagagatttaccttttatctcccagcgagcgagatgtttccctgttcagagaggaagtaacatcacttatgcttgactggtgtttcttttgttgttgtttgtttttctttcaattggaattctgtatttaagatgttatgtcagctgacacatgggacactcctgaagaggtgactggccccccaccctgtttggcggtgagtttccgcaccaccggcctcagaagtgtccctcttgcttcgtctcttgttcgcttgctttgtaaatactttggtcccaagctgagacaattgctgtgtaaaacgtgaagagtcaatcccaaagggtgttatttgtcagaagaacttgccgtgtgccttcaccgaaggcagtcaagtctgcagttggatttttctcactggtgaatgacaagaaacagggataattttgcactgcggagatattacgggagttgtctatatgattatatatagtacctgattctttgaacatattattgaactccaaaatgaattcgacctccattcaggcttcctgaaatctctgaagttgctgaaatttgtatattattttccttttccaatgcaagatctgctggtgacgggaaatgactgtctggttttattatggtttataaattaataaatgggctatttaattctgtatataaatttacagcaagtacgtacactggaatgaatgaggcaatcacgttacaccaaatcagcagatcaaaagacaaacacatatttctgagacttgaaggtccacatccccccgccccctgccaagatggagtcactgcactccagcctgggtgacagagcaagactctgtctcaaa

SEQ ID NO: 364943 - DNA, 4893 bp, Homo sapiens
tggcagctgaacagatctgtggagttaggaccagccccgggctgtggccctgagcagaggctcttaatgggggtgacggtatggggatggggctacccacaaataagccctgcccctggcgctctgataaccacctgcccccagccacccaccagagcgtcactggcacagcaaacaccactttcaaagtgttaggtggtatccctttgctgagggaggagaggggctcttccctgggcatctgtggcatgtggcccagctctagtctggcctgtgagcccttcttgatgacctcttcctgcaggtatacttgtcactcatccccatcatcagcggtgtcctgctggccaccgtcaccgagttgtcttttgacatgtggggactcgtcagcgccctcgccgccacgctgtgcttctcgcttcagaacattttctccaaaaaggtcttgcgagattcacggatccaccatctccggctgctcaacatcctgggctgccacgccgtcttctttatgatccccacctgggttctggtggacctctcggctttcctggtcagcagcgacttgacctacgtctaccagtggccctggacgctcctgctcctggctgtcagcggcttctgtaactttgcccagaatgttatcgccttcagcatcctcaacctcgttagccccctgagctactcggtcgccaatgccaccaaaagaatcatggtcatcacggtgtccctgatcatgctgcgcaacccagtcaccagcaccaacgtcctgggcatgatgaccgccatcctgggggtcttcctctataacaagaccaagtacgatgcaaaccagcaagccaggaagcacctcctccccgtcaccacagcagacctgagcagcaaggagcgtcaccggagcccactggagaagccccacaacggcctcctcttcccccagcacggggactatcagtacggccgcaacaacatcttaacagaccacttccaatacagccggcagagctacccaaactcgtacagtttgaaccgctatgatgtgtagagtccaaaggacaggaccagactgttggtgactccttccccggcccccacagcagtatcagaaacttctgacaatcagtgaatgtacaacccagccgaggggacggtgcataactctccatcagaagccctggggttcctggccccccgtgagccgcaggaggatgcgttgcctgcagtgcagacggccgtgagctctgggcaaacctaaacagagaccagtgtctcatgctctttcttcctggagtctgtcatctgagggccgtgtccctgcggagatcttggccacgttgtacctttccatgtggaattattccccaagcagtgtagctcagagcacttgtgtctgcattccagataacattcaggacctgtgtgaaaagctggggtcactgtggctgtagaccatgaactggcagtgggggtgtccagggcggtgcttgagaacgtcagactggctagtttaattccctggcgcagatacgcataggaccaacagggtcaccaagcagacagggagcccgcgagaatcattcaaaacatccccagccacagagatggatccagtttcctggtcatccccttagcagttcacaagttcctggcaaatgttccaaagcaaaaagcgattgcaattagcatccagttcctgcagcctggtgctctgccctgcacgtcagggttggcatccacccagatccagatggaagggaaacttctctcttctcctttgcctcctcttccctcaccagagcagggcgcttctcttggggtggtgagaaggatcttcgagaaatcgtgttcagtatttcaagctctatttctgtggcacatgtcttttgagaggcatcttcacctcttctgtgatgacttggtatgttgtttggtagagagatcttgattttcggaggatcttgcatttttctagggaatattttgtagttgtgtgtgtgtgtttttgccttggtccccattatgggatgcattaggactggcctatgcatcgaaaatctttttgtttgtaaacgtttaaaaacaaagttccccggccaggcacagtggctcacacctgtaatcccagcactttgggaggccaagatgggcggatcacgaggtcaggagttcgagaccagcctggccaacatagtgaaaccccatctctactaaaaatacagaaattagccgggcatggtgtcgcgtgcctgtagtcccagctcctcaggctgctgaggcaggcgaattgcttgaacctgggaggcagaagttgtggtgagccgagattgtgcactccagcctgggtaacagagcgagactccatctcaaaaaaaaaaacaaaacaaaaccaagttcccactggtgatgcctgtctgacacgttttggtatttagtaggaaatgaagtgtttcgaagcttcgagagaagcttcaaaattgtcacaattgctgaaaacagaatgaatcgtgaacattatctcaatattttgtataatagacaagaccacagtgttttggttccctgacctgtttttgtgtttatgttaggatctgaatcatgttctgggtaaggggacgaggagcgaacactgcactaagatttggtttgccaaatcagattctttggtcaagagtcagtttggggccaggcgtggtggctcatgcctgtaatctcagcactttgggaggctgaggtgggtggatcactggagtttgagaccaccctggccaacatggtgaaaccccatctctactaaaacaaaaattagccaggcatggtggcacctgcctgtaatcccagctacttgggaggctgaggcaggagaatcacttgagcccaggaggtggaggtttcagcgagctgagatcacaccactgcactccagccttggtgacagagtgagactctgtctcaaaaaaaaaaaaaaaaaaaaggaatcagtttgggtcttggcagaaatcaacataaggaatatgacaagaccccagtaggtaaccctgagtgctcaggtccgagctgtggtctcttttacggcttcatgaaaggaccgtgccctcacggaggggaccacggcttggcttgtggggtcttaggtgatggctgccttctttcttcatcaccacacccagcttcttgctggcacttaggggaagagagcagcaaatgagagatttaccttttatctcccagcgagcgagatgtttccctgttcagagaggaagtaacatcacttatgcttgactggtgtttcttttgttgttgtttgtttttctttcaattggaattctgtatttaagatgttatgtcagctgacacatgggacactcctgaagaggtgactggccccccaccctgtttggcggtgagtttccgcaccaccggcctcagaagtgtccctcttgcttcgtctcttgttcgcttgctttgtaaatactttggtcccaagctgagacaattgctgtgtaaaacgtgaagagtcaatcccaaagggtgttatttgtcagaagaacttgccgtgtgccttcaccgaaggcagtcaagtctgcagttggatttttctcactggtgaatgacaagaaacagggataattttgcactgcggagatattacgggagttgtctatatgattatatatagtacctgattctttgaacatattattgaactccaaaatgaattcgacctccattcaggcttcctgaaatctctgaagttgctgaaatttgtatattattttccttttccaatgcaagatctgctggtgacgggaaatgactgtctggttttattatggtttataaattaataaatgggctatttaattctgtatataaatttacagcaagtacgtacactggaatgaatgaggcaatcacgttacaccaaatcagcagatcaaaagacaaacacatatttctgagacttgaaggtccacatccccccgccccctgccaagatggagtcttgctttgttgctcaggctggagtgcagtggcgcagtctcagctcactacaacctccatcccccgggttcaggtgattctcgtgcctcagcctcccgagtagctgggattacaggcatgcaccaccacggctggctaattttttgtgtttttagtagagacagggtttcaccatgttggccaggctggtctcgaactcctggcctcaaatgatccgcccaccttggcctcccaaagtgctaggatgacaggcatgagccaccgtgcccagcctgattgacaatggcctcttgaaggctgggttttcccagccggacagtgcccgccccacatgctccactcccacgctttcatctgcaggcctgccttcctctcagccacctcactgctgagctctgtggtagagaatttcctttacccatcagggtatggtctggctggtaatactgactccaacccagctccttcattttatagaaggaggcatttctgaatcatgtttgttcaccatggcgagactcactgcagaatttttaaccaccttattttaagtcattcattctaggaacagtcaagcccctaccacaaaggggccagatccgttcaagtgaggaagcacttgcagtttctgaattttgctgtatatttgtcctatgtcacccaacaggccctttgctatagctgggacattaccagaccccaataccttagggtctcacagcctgaaggacacagagcattgaattattaaaagacctgaaaatattataatgtttttcaattgtcacctgttttcaagacttaaatgctatagacttttctgcaggaatgacgtgtatattcctcactggcatttaccaaaaataaatgatggtttccagggaatcaaaa

SEQ ID NO: 364944 - DNA, 2408 bp, Homo sapiens
  misc_feature (2298)..(2298): n is a, c, g, or t
cggccgcggtgggcgcgggccacggcgcggggggcccgggcgcagcgagcagcagtggtggggcgcgcgagggcgcgcgggtggcggcgctgtgcctgctgtggtacgcgctgagcgcgggcggcaacgtggtcaacaaggtgatcctgagcgccttcccgttcccggtgaccgtgtcgctgtgccacatcctggctctgtgcgctgggctcccgccgctgctgcgcgcctggcgcgtgccccccgcgccgcccgtctcgggccccggacccagtccgcatccgtcgtccggcccgctgctgccgccgcgcttctacccgcgctacgtgctaccgctcgccttcggcaagtacttcgcgtccgtgtcagcgcacgtcagcatctggaaggtgcccgtgtcctatgcacacaccgtcaaggccaccatgcccatctgggtggtcctcctgtcccggatcattatgaaggagaagcagagcaccaaggtatacttgtcactcatccccatcatcagcggtgtcctgctggccaccgtcaccgagttgtcttttgacatgtggggactcgtcagcgccctcgccgccacgctgtgcttctcgcttcagaacattttctccaaaaaggtcttgcgagattcacggatccaccatctccggctgctcaacatcctgggctgccacgccgtcttctttatgatccccacctgggttctggtggacctctcggctttcctggtcagcagcgacttgacctacgtctaccagtggccctggacgctcctgctcctggctgtcagcggcttctgtaactttgcccagaatgttatcgccttcagcatcctcaacctcgttagccccctgagctactcggtcgccaatgccaccaaaagaatcatggtcatcacggtgtccctgatcatgctgcgcaacccagtcaccagcaccaacgtcctgggcatgatgaccgccatcctgggggtcttcctctataacaagaccaagtacgatgcaaaccagcaagccaggaagcacctcctccccgtcaccacagcagacctgagcagcaaggagcgtcaccggagcccactggagaagccccacaacggcctcctcttcccccagcacggggactatcagtacggccgcaacaacatcttaacagaccacttccaatacagccggcagagctacccaaactcgtacagtttgaaccgctatgatgtgtagagtccaaaggacaggaccagactgttggtgactccttccccggcccccacagcagtatcagaaacttctgacaatcagtgaatgtacaacccagccgaggggacggtgcataactctccatcagaagccctggggttcctggccccccgtgagccgcaggaggatgcgttgcctgcagtgcagacggccgtgagctctgggcaaacctaaacagagaccagtgtctcatgctctttcttcctggagtctgtcatctgagggccgtgtccctgcggagatcttggccacgttgtacctttccatgtggaattattccccaagcagtgtagctcagagcacttgtgtctgcattccagataacattcaggacctgtgtgaaaagctggggtcactgtggctgtagaccatgaactggcagtgggggtgtccagggcggtgcttgagaacgtcagactggctagtttaattccctggcgcagatacgcataggaccaacagggtcaccaagcagacagggagcccgcgagaatcattcaaaacatccccagccacagagatggatccagtttcctggtcatccccttagcagttcacaagttcctggcaaatgttccaaagcaaaaagcgattgcaattagcatccagttcctgcagcctggtgctctgccctgcacgtcagggttggcatccacccagatccagatggaagggaaacttctctcttctcctttgcctcctcttccctcaccagagcagggcgcttctcttggggtggtgagaaggatcttcgagaaatcgtgttcagtatttcaagctctatttctgtggcacatgtcttttgagaggcatcttcacctcttctgtgatgacttggtatgttgtttggtagagagatcttgattttcggaggatcttgcatttttctagggaatattttgtagttgtgtgtgtgtgtttttgccttggtccccattatgggatgcattaggactggcctatgcatcgaaaatctttttgtttgtaaacgtttaaaaacaaagttccccaaagtgccgggattaacggcgccccngcacgcccggctgtctgttaggtttttttctattttcttttttgccttcatctcttgcttcccaggctcctgacaatcctacgttggtggcagcagcagcaggcaaatca

SEQ ID NO: 364945 - DNA, 1562 bp, Homo sapiens
  misc_feature (1435)..(1435): n is a, c, g, or t
  misc_feature (1450)..(1450): n is a, c, g, or t
  misc_feature (1467)..(1467): n is a, c, g, or t
  misc_feature (1489)..(1489): n is a, c, g, or t
  misc_feature (1520)..(1520): n is a, c, g, or t
  misc_feature (1530)..(1530): n is a, c, g, or t
  misc_feature (1537)..(1537): n is a, c, g, or t
  misc_feature (1546)..(1546): n is a, c, g, or t
  misc_feature (1552)..(1552): n is a, c, g, or t
cggccgcggtgggcgcgggccacggcgcggggggcccgggcgcagcgagcagcagtggtggggcgcgcgagggcgcgcgggtggcggcgctgtgcctgctgtggtacgcgctgagcgcgggcggcaacgtggtcaacaaggtgatcctgagcgccttcccgttcccggtgaccgtgtcgctgtgccacatcctggctctgtgcgctgggctcccgccgctgctgcgcgcctggcgcgtgccccccgcgccgcccgtctcgggccccggacccagtccgcatccgtcgtccggcccgctgctgccgccgcgcttctacccgcgctacgtgctaccgctcgccttcggcaagtacttcgcgtccgtgtcagcgcacgtcagcatctggaaggtgcccgtgtcctatgcacacaccgtcaaggccaccatgcccatctgggtggtcctcctgtcccggatcattatgaaggagaagcagagcaccaaggtatacttgtcactcatccccatcatcagcggtgtcctgctggccaccgtcaccgagttgtcttttgacatgtggggactcgtcagcgccctcgccgccacgctgtgcttctcgcttcagaacattttctccaaaaaggtcttgcgagattcacggatccaccatctccggctgctcaacatcctgggctgccacgccgtcttctttatgatccccacctgggttctggtggacctctcggctttcctggtcagcagcgacttggtgagttgtacagcaccaagaacacgccattttcttggctagttccagaataggtgctttgttgaggagctgtagctgcatgttaacattgtggtatcttttgggcacctgacagccagcgctttcagcagtcagtcctctgtaatgcctcacggtgacgatgcacgccatcgaggaagtgggtttcctgtgtatttccttctctggtgtgcttgatcccaggtgctgatagctgctgtgtgtgcgccagtagcgtcaaggaagagaaggtgactctttcacctcctgacagtatagtccagatagcacattgactttttatttttactcattttttattttaaatgtttattttttagagacagaacctcgctctgcactccagcctgggtgacagagggagactttgtctcaaaaaaactattttttaaaaagagggaatgggggagccttatagaggatcagggcttcaaaccctggtgcgtcagtggcagctgaacagatctgtggagttaggaccagccccgggctgtggcctggagcagaggctcttaatgggggtgacggtatggggatggggctacccacaaataagccctgcccctggcgctctgataaccacctgcccccagccacccaccagagcgtcactggcacagcaaacaccactttcaaagtgttaggtngtattccctttggtngagggaggagaggggtnttccctggggcatctgtgggcntgtgggcccagtgttagttatgggcctgtgnagccttattnggttganctcttgccnacgagntgttattgtt

SEQ ID NO: 364946 - DNA, 780 bp, Homo sapiens
ctcaacgctttatacttctggatatatttcctgtccaagagaagaatcatactgtagtatctcctagagcattagaactaagtgatccagtacttgatgagcaccaccaaggtgatcaagatggaggagatcaagatgaaagggctgaaaaatcaaaattaactgggaccaggcaaaatcattcattcatatggtcaggggcatcatttgatctaagtccaggactgcaaaggattttagataaagtatccagtcctctagaaaatgaaaagctaaaatcaatgactataaacttttccagtttgaatagaaaaaatacagagttaaatgaagaacaagaagttatttcaaacttggagacaaaacaagtgcagggaatttcattttcttctaataatgaagtataaagcgttgagtcaacgctttatacttcagagaagcttcagatgaaagaaatgacctgccgtgatatcgttaaagaagttgcaaaaataatttacatagtacatgacgaagttaaggataaagcttttgaactagaactcagctgggttggtgaattaactaatggaagacatgaaattgttccaaaagatataagagaagaagcagagaaatatgctaaggaatctctgaaggaagaagatgaatcagatgatgataatatgtaacatttactccagcatctattgtattttaaatttctactccagtccaatgtaactatttagccctggattatacatactgtccaattttcattaaatttttgtcttataa

SEQ ID NO: 364947 - DNA, 509 bp, Homo sapiens
taaggattggggttgaagggaactcggacagaccacatggggttcgcggacccggggtgctctgagaccgccttcggctgggtgggccatttgcagctgtttggagaccggtcgtctttatcccctatatgctaggcctgcgtctcaggtgaccgtgactcctgaagcttttcagcgcaggtgtagccggcttggcgtcgccgcagtgaggtttggagccgctttggattgctgagtcactttcttcagccacttagggaaaccgaaagtggaaactcgtggggcttgaaatagtgtgttctcttgagaaccaccgaggcagtgagatttgggattccggggtctggagatcgtgctttttgtggactgcgtttgcagttcctagggtgctgctgattcacaggccttctctgtctttaagtgtgcagatcattgaccgctcagtttaagagtcactggaaatcctgtcggaacagaactaataaaaatggtctgaaaaacaaaaaaaa

SEQ ID NO: 364948 - DNA, 276 bp, Homo sapiens
gcggccgactactactactactactgctcgaattcaagcttctaacgatgtacggggtaactaatggaagacatgaaattgttccaaaagatataagagaagaagcagagaaatatgctaaggaatctctgaaggaagaagatgaatcagatgatgataatatgtaacatttactccagcatctattgtattttaaatttctactccagtccaatgtaactatttagccctggattatacatactgtccaattttcattaaatttttgtcttataa

SEQ ID NO: 364949 - DNA, 983 bp, Homo sapiens
ggcagttcagccaatgagcgggcctgttactagtttgcggcatcctgtggtataggggaagcgctccgggcctggaatccctacgcgtccctttgggtttagcacgatgagctcaatcggcactgggtatgacctgtcagcctctacattctctcctgacggaagagtttttcaagttgaatatgctatgaaggctgtggaaaatagtagtacagctattggaatcagatgcaaagatggtgttgtctttggggtagaaaaattagtcctttctaaactttatgaagaaggttccaacaaaagactttttaatgttgatcggcatgttggaatggcagtagcaggtttgttggcagatgctcgttctttagcagacatagcaagagaagaagcttccaacttcagatctaactttggctacaacattccactaaaacatcttgcagacagagtggccatgtatgtgcatgcatatacactctacagtgctgttagaccttttggctgcagtttcatgttagggtcttacagtgtgaatgacggtgcgcaactctacatgattgacccatcaggtgtttcatacggttattggggctgtgccatcggcaaagccaggcaagctgcaaagacggaaatagagaagcttcagatgaaagaaatgacctgccgtgatatcgttaaagaagttgcaaaaataatttacatagtacatgacgaagttaaggataaagcttttgaactagaactcagctgggttggtgaattaactaatggaagacatgaaattgttccaaaagatataagagaagaagcagagaaatatgctaaggaatctctgaaggaagaagatgaatcagatgatgataatatgtaacatttactccagcatctattgtattttaaatttctactccagtccaatgtaactatttagccctggattatacatactgtccaattttcattaaatttttgtcttataa

SEQ ID NO: 364950 - DNA, 1008 bp, Homo sapiens
ggcagttcagccaatgagcgggcctgttactagtttgcggcatcctgtggtataggggaagcgctccgggcctggaatccctacgcgtccctttgggtttagcacgatgagctcaatcggcactgggtatgacctgtcagcctctacattctctcctgacggaagagtttttcaagttgaatatgctatgaaggctgtggaaaatagtagtacagctattggaatcagatgcaaagatggtgttgtctttggggtagaaaaattagtcctttctaaactttatgaagaaggttccaacaaaagactttttaatgttgatcggcatgttggaatggcagtagcaggtttgttggcagatgctcgttctttagcagacatagcaagagaagaagcttccaacttcagatctaactttggctacaacattccactaaaacatcttgcagacagagtggccatgtatgtgcatgcatatacactctacagtgctgttagaccttttggctgcagtttcatgttagggtcttacagtgtgaatgacggtgcgcaactctacatgattgacccatcaggtgtttcatacggttattggggctgtgccatcggcaaagccaggcaagctgcaaagacggaaatagagaagcttcagatgaaagaaatgacctgccgtgatatcgttaaagaagttgcaaaaataatttacatagtacatgacgaagttaaggataaagcttttgaactagaactcagctgggttggtgaattaactaatggaagacatgaaattgttccaaaagatataagagaagaagcagagaaatatgctaaggaatctctgaaggaagaagatgaatcagatgatgataatatgtaacatttactccagcatctattgtattttaaatttctactccagtccaatgtaactatttagccctggattatacatactgtccaattttcattaaatttttgtcttataaaaaaaaaaaaaaaagtggaaaaaaa

SEQ ID NO: 364951 - DNA, 1021 bp, Homo sapiens
  misc_feature (1)..(1): n is a, c, g, or t
  misc_feature (49)..(50): n is a, c, g, or t
  misc_feature (93)..(93): n is a, c, g, or t
  misc_feature (95)..(95): n is a, c, g, or t
  misc_feature (97)..(97): n is a, c, g, or t
nccacccccagccaggctatggttgccaccccaacccaataaaactganngttactagcctctcaaaaaaaaaaacctcgtgccgaattcggngngncagcatccgggcctggaatccctacgcgtccctttgggtttagcacgatgagctcaatcggcactgggtatgacctgtcagcctctacattctctcctgacggaagagtttttcaagttgaatatgctatgaaggctgtggaaaatagtagtacagctattggaatcagatgcaaagatggtgttgtctttggggtagaaaaattagtcctttctaaactttatgaagaaggttccaacaaaagactttttaatgttgatcggcatgttggaatggcagtagcaggtttgttggcagatgctcgttctttagcagacatagcaagagaagaagcttccaacttcagatctaactttggctacaacattccactaaaacatcttgcagacagagtggccatgtatgtgcatgcatatacactctacagtgctgttagaccttttggctgcagtttcatgttagggtcttacagtgtgaatgacggtgcgcaactctacatgattgacccatcaggtgtttcatacggttattggggctgtgccatcggcaaagccaggcaagctgcaaagacggaaatagagaagcttcagatgaaagaaatgacctgccgtgatatcgttaaagaagttgcaaaaataatttacatagtacatgacgaagttaaggataaagcttttgaactagaactcagctgggttggtgaattaactaatggaagacatgaaattgttccaaaagatataagagaagaagcagagaaatatgctaaggaatctctgaaggaagaagatgaatcagatgatgataatatgtaacatttactccagcatctattgtattttaaatttctactccagtccaatgtaactatttagccctggattatacatactgtccaattttcattaaatttttgtcttataa

SEQ ID NO: 364952 - DNA, 1835 bp, Homo sapiens
ggcagttcagccaatgagcgggcctgttactagtttgcggcatcctgtggtataggggaagcgctccgggcctggaatccctacgcgtccctttgggtttagcacgatgagctcaatcggcactgggtatgacctgtcagcctctacattctctcctgacggaagagtttttcaagttgaatatgctatgaaggctgtggaaaatagtagtacagctattggaatcagatgcaaagatggtgttgtctttggggtagaaaaattagtcctttctaaactttatgaagaaggttccaacaaaagactttttaatgttgatcggcatgttggaatggcagtagcaggtttgttggcagatgctcgttctttagcagacatagcaagagaagaagcttccaacttcagatctaactttggctacaacattccactaaaacatcttgcagacagagtggccatgtatgtgcatgcatatacactctacagtgctgttagaccttttggctgcagtttcatgttagggtcttacagtgtgaatgacggtgcgcaactctacatgattgacccatcaggtgtttcatacggttattggggctgtgccatcggcaaagccaggcaagctgcaaagacggaaatagagaagcttcagatgaaagaaatgacctgccgtgatatcgttaaagaagttgcaaaaataatttacatagtacatgacgaagttaaggataaagcttttgaactagaactcagctgggttggtgaattaactaatggaagacatgaaattgttccaaaagatataagagaagaagcagagaaatatgctaaggtaagccacagcacaaaaacttctcttggccaggtacagtcagggaatcacttagcccaggagtttgagaccagcctgagcagcacagcaagacccccatccctaatttaaaaaaaaaaaaaaattctctaaccaaaattatgtgttgaataatataaatagactggggtggtttctatgaaataacactgagagttcagttgaactaaagatagaaattttctaggttatctctagtgggtaaagttgccttggttccaaaaaaaaaaaacttgggaggtttagactgcaaagagttttttaggacttttaatactttaaatatttgttcttttttttttttttttttgagacggagtcttgctctgtcacccaggctggagggcagtggcaccatctctgctcactgcaacctctgcctccagggttcaagcgatcctcctgcctccgcctcccaagtagctgggattacaggaacatgccaccatacctggctacttttgtatttttggcttcaccaataatacagagacgggttttcaccaggctagtttcaaactcttgaactcacgtgatctgcctactttggcccccgtaaagtgctgggattacaggcatgaacactgcaccaggcctcttaagtatatattctatcaaagatacagtcattgcatgttagagcaacatttgcttaattaactttgcttgggtatcttattctgaaactgttcattcagttacaagtagaggaatttaaccacttaattcaggttgttgtagcttaacttgcccacaggtgtgggatataacaattttaaaaatcaattttaaacacctgttttctcttaacaggaatctctgaaggaagaagatgaatcagatgatgataatatgtaacatttactccagcatctattgtattttaaatttctactccagtccaatgtaactatttagccctggattatacatactgtccaattttcattaaatttttgtcttataa

SEQ ID NO: 364953 - DNA, 1135 bp, Homo sapiens
ggcagttcagccaatgagcgggcctgttactagtttgcggcatcctgtggtataggggaagcgctccgggcctggaatccctacgcgtccctttgggtttagcacgatgagctcaatcggcactgggtatgacctgtcagcctctacattctctcctgacggaagagtttttcaagttgaatatgctatgaaggctgtggaaaatagtagtacagctattggaatcagatgcaaagatggtgttgtctttggggtagaaaaattagtcctttctaaactttatgaagaaggttccaacaaaagactttttaatgttgatcggcatgttggaatggcagtagcaggtttgttggcagatgctcgttctttagcagacatagcaagagaagaagcttccaacttcagatctaactttggctacaacattccactaaaacatcttgcagacagagtggccatgtatgtgcatgcatatacactctacagtgctgttagaccttttggctgcagtttcatgttagggtcttacagtgtgaatgacggtgcgcaactctacatgattgacccatcaggtgtttcatacggttattggggctgtgccatcggcaaagccaggcaagctgcaaagacggaaatagagaagcttcagatgaaagaaatgacctgccgtgatatcgttaaagaagttgcaaaaataatttacatagtacatgacgaagttaaggataaagcttttgaactagaactcagctgggttggtgaattaactaatggaagacatgaaattgttccaaaagatataagagaagaagcagagaaatatgctaaggtaagccacagcacaaaaacttctcttggccaggtacagtcagggaatcacttagcccaggagtttgagaccagcgtgggtggatcacctgaggtcaggagttcgagaccagcctgaccaacatggtgaaatcctgtctctactaaaaatacaaaaattagctgggtgtggtggcaggcacctgtaatcccagctgctcaggaggctgaggcaggagaattgcttgaacccgggaggcggaggttgcagtgagccaagatcatgccgttgcactccagcctgggtaacagagctagactccatctc

SEQ ID NO: 364954 - DNA, 3298 bp, Homo sapiens
ggcagttcagccaatgagcgggcctgttactagtttgcggcatcctgtggtataggggaagcgctccgggcctggaatccctacgcgtccctttgggtttagcacgatgagctcaatcggcactgggtatgacctgtcagcctctacattctctcctgacggaagagtttttcaagttgaatatgctatgaaggctgtggaaaatagtagtacagctattggaatcagatgcaaagatggtgttgtctttggggtagaaaaattagtcctttctaaactttatgaagaaggttccaacaaaagactttttaatgttgatcggcatgttggaatggcagtagcaggtttgttggcagatgctcgttctttagcagacatagcaagagaagaagcttccaacttcagatctaactttggctacaacattccactaaaacatcttgcagacagagtggccatgtatgtgcatgcatatacactctacagtgctgttagaccttttggctgcagtttcatgttagggtcttacagtgtgaatgacggtgcgcaactctacatgattgacccatcaggtgtttcatacggttattggggctgtgccatcggcaaagccaggcaagctgcaaagacggaaatagagaagcttcagatgaaagaaatgacctgccgtgatatcgttaaagaagttgcaaaaataatttacatagtacatgacgaagttaaggataaagcttttgaactagaactcagctgggttggtgaatgtaagttatttttgtacatttatttgccttaggaatgatctgtaccacagctaatttacaactgagtgtcctttctaatataatgaaagctaaagcaaatttactaggttgtctaatgaagggaaagttctgcttaataattgacttaagttgtgaacacgttattttttgaaacatccatttcatggttttaagatactatgctataaattaatgctcaggatttataaatagcataatttactttcatttccataagaacttaatatgtaggcacatataatctcatgtagaagcagcacacaaaaatattcgagtattactcatagtacaactttgcaaccttaggtgagtcagatatgtggattgggtagatcctatggtatactgcaagttacaatatggtactcaatttaaaattcatttacacatgtggcttaatttacagttaactaatggaagacatgaaattgttccaaaagatataagagaagaagcagagaaatatgctaaggtaagccacagcacaaaaacttctcttggccaggtacagtcagggaatcacttagcccaggagtttgagaccagcctgagcagcacagcaagacccccatccctaatttaaaaaaaaaaaaaaattctctaaccaaaattatgtgttgaataatataaatagactggggtggtttctatgaaataacactgagagttcagttgaactaaagatagaaattttctaggttatctctagtgggtaaagttgccttggttccaaaaaaaaaaaacttgggaggtttagactgcaaagagttttttaggacttttaatactttaaatatttgttcttttttttttttttttttgagacggagtcttgctctgtcacccaggctggagggcagtggcaccatctctgctcactgcaacctctgcctccagggttcaagcgatcctcctgcctccgcctcccaagtagctgggattacaggaacatgccaccatacctggctacttttgtatttttggcttcaccaataatacagagacgggttttcaccaggctagtttcaaactcttgaactcacgtgatctgcctactttggcccccgtaaagtgctgggattacaggcatgaacactgcaccaggcctcttaagtatatattctatcaaagatacagtcattgcatgttagagcaacatttgcttaattaactttgcttgggtatcttattctgaaactgttcattcagttacaagtagaggaatttaaccacttaattcaggttgttgtagcttaacttgcccacaggtgtgggatataacaattttaaaaatcaattttaaacacctgttttctcttaacaggaatctctgaaggaagaagatgaatcagatgatgataatatgtaacatttactccagcatctattgtattttaaatttctactccagtccaatgtaactatttagccctggattatacatactgtccaattttcattaaatttttgtcttataactattgaagtttggttaatatctgctttacaaaattggtgggggtaaatgaggacatttactcagtattaaaatatagatttatgactactgaaaaattccctggttaaaatgctgcagaattaattccaagactgtagattaattcaaagccccatcttcatcactcaactagaatttacagatcatattctcctgggcttttgtacaaaaagcacctaccaacttagtggacaaataactgatacggtttcccaccttcatatgaagtaactggtggtcatcagtcactgttaatctttagatgtgatacagatgacagatgtttcagttttggataatttttcaaaaactgacccttcctcaaaaaagacccttcaatacatgagtcaaggatgtttttgcttttttcctttattgtggtgaggggcggatttaaggatcaataaagtccctattctgtcactaaaaaaatttcttgatctctaaagattaaaataaaaataccaacatcagacagctttcatgttaaaaatcagaatttatgttaaagtgctctgtaaacagaactgttactaagtggaataaacagtactgtggccgataagaataacttgaagctgaaaagcagtactcacagcaggaacaatttgaactcaggccatgtatacacaccctctagtggactcatgccagtgtcactccattgaagtgttgtgctttcctaagaaggtaatctagccactgaatttgggtgcagggtatcgctggactttgagcatttgtgtagtttaaatagcaaatcattatacctgagtattaatagctaactactacacaaacaactcaaaaccagtaatgtcatgtcattaccatggcttcttttatgtaacattatctgctacattttaccactcaaaatatatttaaaatatgtattttaaaatatattagagcatatggctcaagcaatcctcccacctcagcctcccaagtagctgggaccacaggcaag

SEQ ID NO: 364955 - DNA, 859 bp, Homo sapiens
ggcagttcagccaatgagcgggcctgttactagtttgcggcatcctgtggtataggggaagcgctccgggcctggaatccctacgcgtccctttgggtttagcacgatgagctcaatcggcactgggtatgacctgtcagcctctacattctctcctgacggaagagtttttcaagttgaatatgctatgaaggctgtggaaaatagtaggcagtagcaggtttgttggcagatgctcgttctttagcagacatagcaagagaagaagcttccaacttcagatctaactttggctacaacattccactaaaacatcttgcagacagagtggccatgtatgtgcatgcatatacactctacagtgctgttagaccttttggctgcagtttcatgttagggtcttacagtgtgaatgacggtgcgcaactctacatgattgacccatcaggtgtttcatacggttattggggctgtgccatcggcaaagccaggcaagctgcaaagacggaaatagagaagcttcagatgaaagaaatgacctgccgtgatatcgttaaagaagttgcaaaaataatttacatagtacatgacgaagttaaggataaagcttttgaactagaactcagctgggttggtgaattaactaatggaagacatgaaattgttccaaaagatataagagaagaagcagagaaatatgctaaggaatctctgaaggaagaagatgaatcagatgatgataatatgtaacatttactccagcatctattgtattttaaatttctactccagtccaatgtaactatttagccctggattatacatactgtccaattttcattaaatttttgtcttataa

SEQ ID NO: 364956 - DNA, 918 bp, Homo sapiens
ggcagttcagccaatgagcgggcctgttactagtttgcggcatcctgtggtataggggaagcgctccgggcctggaatccctacgcgtccctttgggtttagcacgatgagctcaatcggcactgggtatgacctgtcagcctctacattctctcctgacggaagagtttttcaagttgaatatgctatgaaggctgtggaaaatagtagtacagctattggaatcagatgcaaagatggtgttgtctttggggtagaaaaattagtcctttctaaactttatgaagaaggttccaacaaaagactttttaatgttgatcggcatgttggaatggcagtagcaggtttgttggcagatgctcgttctttagcagacatagcaagagaagaagcttccaacttcagatctaactttggctacaacattccactaaaacatcttgcagacagagtggccatgtatgtgcatgcatatacactctacagtgctgttagaccttttggctgcagtttcatgttagggtcttacagtgtgaatgacggtgcgcaactctacatgattgacccatcaggtgtttcatacggttattggggctgtgccatcggcaaagccaggcaagctgcaaagacggaaatagagaagcttcagatgaaagaaatgacctgccgtgatatcgttaaagaagttgcaaaaataatttacatagtacatgacgaagttaaggataaagcttttgaactagaactcagctgggttggtgaatgaatctctgaaggaagaagatgaatcagatgatgataatatgtaacatttactccagcatctattgtattttaaatttctactccagtccaatgtaactatttagccctggattatacatactgtccaattttcattaaatttttgtcttataa

SEQ ID NO: 364957 - DNA, 1062 bp, Homo sapiens
ggcagttcagccaatgagcgggcctgttactagtttgcggcatcctgtggtataggggaagcgctccgggcctggaatccctacgcgtccctttgggtttagcacgatgagctcaatcggcactgggtatgacctgtcagcctctacattctctcctgacggaagagtttttcaagttgaatatgctatgaaggctgtggaaaatagtagtacagctattggaatcagatgcaaagatggtgttgtctttggggtagaaaaattagtcctttctaaactttatgaagaaggttccaacaaaagactttttaatgttgatcggcatgttggaatggcagtagcaggtttgttggcagatgctcgttctttagcagacatagcaagagaagaagcttccaacttcagatctaactttggctacaacattccactaaaaagtaagttgataacatattgaggaaccttttggacagtaatagaagtttattaataagctcttctgcttccctccatagcatcttgcagacagagtggccatgtatgtgcatgcatatacactctacagtgctgttagaccttttggctgcagtttcatgttagggtcttacagtgtgaatgacggtgcgcaactctacatgattgacccatcaggtgtttcatacggttattggggctgtgccatcggcaaagccaggcaagctgcaaagacggaaatagagaagcttcagatgaaagaaatgacctgccgtgatatcgttaaagaagttgcaaaaataatttacatagtacatgacgaagttaaggataaagcttttgaactagaactcagctgggttggtgaattaactaatggaagacatgaaattgttccaaaagatataagagaagaagcagagaaatatgctaaggaatctctgaaggaagaagatgaatcagatgatgataatatgtaacatttactccagcatctattgtattttaaatttctactccagtccaatgtaactatttagccctggattatacatactgtccaattttcattaaatttttgtcttataa

SEQ ID NO: 364958 - DNA, 909 bp, Homo sapiens
ggcagttcagccaatgagcgggcctgttactagtttgcggcatcctgtggtataggggaagcgctccgggcctggaatccctacgcgtccctttgggtttagcacgatgagctcaatcggcactgggtatgacctgtcagcctctacattctctcctgacggaagagtttttcaagttgaatatgctatgaaggctgtggaaaatagtagtacagctattggaatcagatgcaaagatggtgttgtctttggggtagaaaaattagtcctttctaaactttatgaagaaggttccaacaaaagactttttaatgttgatcggcatgttggaatggcagtagcaggtttgttggcagatgctcgttctttagcagacatagcaagagaagaagcttccaacttcagatctaactttggctacaacattccactaaaatttcatgttagggtcttacagtgtgaatgacggtgcgcaactctacatgattgacccatcaggtgtttcatacggttattggggctgtgccatcggcaaagccaggcaagctgcaaagacggaaatagagaagcttcagatgaaagaaatgacctgccgtgatatcgttaaagaagttgcaaaaataatttacatagtacatgacgaagttaaggataaagcttttgaactagaactcagctgggttggtgaattaactaatggaagacatgaaattgttccaaaagatataagagaagaagcagagaaatatgctaaggaatctctgaaggaagaagatgaatcagatgatgataatatgtaacatttactccagcatctattgtattttaaatttctactccagtccaatgtaactatttagccctggattatacatactgtccaattttcattaaatttttgtcttataa

SEQ ID NO: 364959 - DNA, 4076 bp, Homo sapiens
tttttttttgagatggagtctcactctgtcgtccagactggagggcagtggcacgatcttggctcactgcaacctccgcctcccgtgttcaagcaattctcctgcatcagcctctcaagtagctgggattacaggcgcccaccaccacacctggctaatttttgtatttttagtagagacaggctttaccatcttggccaggctggtcttgaactcctgaccttgtgatccacccaccttggcctcccaaagtgctgggattacagatgtgaaccaccgcacctggcctcttgatactttttatgttactttaatatgttgcatgacagtgcctccttctttgctgtaatttgtaaggtactacaatgtgaaggccaggttatgtggcatatatgccattataaaatggacaaggagcttaaaaagactactgccaagaagctataggttgaagagaccactaataattgcaagcacataaattagtttttttttttttatttttttgaaacagagtctcactctgttgcccaggctggagtgcagtgtcgtgatctcagctcactgcagcccctacctcctgggttcaagcaagtctcctgcctcagtttcccgagtagttgggactacaggcctatggccacctcacctggctaatttttgtatttttagtagagacgtgggttcaccatgttggccaggatggtctcgaactcctgacctcatgatccacccgcctctgcctccccaaagtgctaggattacaggcacgagccaccatgtccagccaattagttggttttaaatatatttaagttaatggacaaaatattctaaaagggcacagttaatgacgcctcttcctagtgaatccgtgttctttatgaggtatcttttatagttgtatctttttttttttctgagatggagtctcgctctactgtagcccaggatggagtgcagtagtgtgatcttggctcactgcaacccctgcctcccgggttcaaggaattctcctgccttagcctcctgagtagctgagattacaggcgcccaccaccacacctggctgatttttgtttcttagtagagacagggtttcaccatgttggccaggctagtctcgaactgacctcaagtgatccatccgccttggtctcccaaagtgttgggattacaggtgtgagccactgtgcccagccaagttatatctctaaagcaatgtgcaaaaataaactgaacttgggttgattaggtatattcaacatttgtcgggagagtagatgtttcattttatttcagtccctgtgtaatttgtcttctctaatgttaaatactatgtagaatgtgtctgtgtaattttatagatacttttattatggatggacattctaatttgtactgactttgggtctgtgaactacttcaatgtttggaggttaccaaaatcttacctttcccttttctattctagaatttacatagtacatgacgaagttaaggataaagcttttgaactagaactcagctgggttggtgaatgtaagttatttttgtacatttatttgccttaggaatgatctgtaccacagctaatttacaactgagtgtcctttctaatataatgaaagctaaagcaaatttactaggttgtctaatgaagggaaagttctgcttaataattgacttaagttgtgaacacgttattttttgaaacatccatttcatggttttaagatactatgctataaattaatgctcaggatttataaatagcataatttactttcatttccataagaacttaatatgtaggcacatataatctcatgtagaagcagcacacaaaaatattcgagtattactcatagtacaactttgcaaccttaggtgagtcagatatgtggattgggtagatcctatggtatactgcaagttacaatatggtactcaatttaaaattcatttacacatgtggcttaatttacagttaactaatggaagacatgaaattgttccaaaagatataagagaagaagcagagaaatatgctaaggtaagccacagcacaaaaacttctcttggccaggtacagtcagggaatcacttagcccaggagtttgagaccagcctgagcagcacagcaagacccccatccctaatttaaaaaaaaaaaaaaattctctaaccaaaattatgtgttgaataatataaatagactggggtggtttctatgaaataacactgagagttcagttgaactaaagatagaaattttctaggttatctctagtgggtaaagttgccttggttccaaaaaaaaaaaacttgggaggtttagactgcaaagagttttttaggacttttaatactttaaatatttgttcttttttttttttttttttgagacggagtcttgctctgtcacccaggctggagggcagtggcaccatctctgctcactgcaacctctgcctccagggttcaagcgatcctcctgcctccgcctcccaagtagctgggattacaggaacatgccaccatacctggctacttttgtatttttggcttcaccaataatacagagacgggttttcaccaggctagtttcaaactcttgaactcacgtgatctgcctactttggcccccgtaaagtgctgggattacaggcatgaacactgcaccaggcctcttaagtatatattctatcaaagatacagtcattgcatgttagagcaacatttgcttaattaactttgcttgggtatcttattctgaaactgttcattcagttacaagtagaggaatttaaccacttaattcaggttgttgtagcttaacttgcccacaggtgtgggatataacaattttaaaaatcaattttaaacacctgttttctcttaacaggaatctctgaaggaagaagatgaatcagatgatgataatatgtaacatttactccagcatctattgtattttaaatttctactccagtccaatgtaactatttagccctggattatacatactgtccaattttcattaaatttttgtcttataactattgaagtttggttaatatctgctttacaaaattggtgggggtaaatgaggacatttactcagtattaaaatatagatttatgactactgaaaaattccctggttaaaatgctgcagaattaattccaagactgtagattaattcaaagccccatcttcatcactcaactagaatttacagatcatattctcctgggcttttgtacaaaaagcacctaccaacttagtggacaaataactgatacggtttcccaccttcatatgaagtaactggtggtcatcagtcactgttaatctttagatgtgatacagatgacagatgtttcagttttggataatttttcaaaaactgacccttcctcaaaaaagacccttcaatacatgagtcaaggatgtttttgcttttttcctttattgtggtgaggggcggatttaaggatcaataaagtccctattctgtcactaaaaaaatttcttgatctctaaagattaaaataaaaataccaacatcagacagctttcatgttaaaaatcagaatttatgttaaagtgctctgtaaacagaactgttactaagtggaataaacagtactgtggccgataagaataacttgaagctgaaaagcagtactcacagcaggaacaatttgaactcaggccatgtatacacaccctctagtggactcatgccagtgtcactccattgaagtgttgtgctttcctaagaaggtaatctagccactgaatttgggtgcagggtatcgctggactttgagcatttgtgtagtttaaatagcaaatcattatacctgagtattaatagctaactactacacaaacaactcaaaaccagtaatgtcatgtcattaccatggcttcttttatgtaacattatctgctacattttaccactcaaaatatatttaaaatatgtattttaaaatatattagagcatatggctcaagcaatcctcccacctcagcctcccaagtagctgggaccacaggcaag

SEQ ID NO: 364960 - DNA, 769 bp, Homo sapiens
  misc_feature (702)..(702): n is a, c, g, or t
  misc_feature (706)..(706): n is a, c, g, or t
  misc_feature (708)..(708): n is a, c, g, or t
  misc_feature (719)..(719): n is a, c, g, or t
  misc_feature (733)..(733): n is a, c, g, or t
  misc_feature (751)..(751): n is a, c, g, or t
ggcagttcagccaatgagcgggcctgttactagtttgcggcatcctgtggtataggggaagcgctccgggcctggaatccctacgcgtccctttgggtttagcacgatgagctcaatcggcactgggtatgacctgtcagcctctacattctctcctgacggaagagtttttcaagttgaatatgctatgaaggctgtggaaaatagtagtacagctattggaatcagatgcaaagatggtgttgtctttggggtagaaaaattagtcctttctaaactttatgaagaaggttccaacaaaagactttttaatgttgatcggcatgttggaatggcagtagcaggtttgttggcagatgctcgttctttagcagacatagcaagagaagaagcttccaacttcagatctaactttggctacaacattccactaaaacatcttgcagacagagtggccatgtatgtgcatgcatatacactctacagtgctgttagaccttttggctgcagtttcatgttagggtcttacagtgtgaatgacggtgcgcaactctacatgattgacccatcaggtgtttcatacggttattggggctgtgccatcggcaaagccaggcaagctgcaaagacggaaatagagaagcttcagatgaaagaaatgacctgccgtgatatcgttaaagaagttgcaaaaattagctnggtngngaattactaanggagacatgaaatngtccaaagattaagagangagcagagattatgctag

SEQ ID NO: 364961 - DNA, 564 bp, Homo sapiens
ctggagtaaatgttacatattatcatcatctgattcatcttcttccttcagagattccttagcatatttctctgcttcttctgttagaccttttcatgttagggtcttacagtgtgaatgacggtgcgcaactctacatgattgacccatcaggtgtttcatacggttattggggctgtgccatcggcaaagccaggcaagctgcaaagacggaaatagagaagcttcagatgaaagaaatgacctgccgtgatatcgttaaagaagttgcaaaaataatttacatagtacatgacgaagttaaggataaagcttttgaactagaactcagctgggttggtgaattaactaatggaagacatgaaattgttccaaaagatataagagaagaagcagagaaatatgctaaggaatctctgaaggaagaagatgaatcagatgatgataatatgtaacatttactccagcatctattgtattttaaatttctactccagtccaatgtaactatttagccctggattatacatactgtccaattttcattaaatttttgtcttataa

SEQ ID NO: 364962 - DNA, 859 bp, Homo sapiens
  misc_feature (669)..(669): n is a, c, g, or t
  misc_feature (676)..(676): n is a, c, g, or t
  misc_feature (680)..(680): n is a, c, g, or t
  misc_feature (838)..(838): n is a, c, g, or t
  misc_feature (845)..(845): n is a, c, g, or t
ggcagttcagccaatgagcgggcctgttactagtttgcggcatcctgtggtataggggaagcgctccgggcctggaatccctacgcgtccctttgggtttagcacgatgagctcaatcggcactgggtatgacctgtcagcctctacattctctcctgacggaagagtttttcaagttgaatatgctatgaaggctgtggaaaatagtagtacagctattggaatcagatgcaaagatggtgttgtctttggggtagaaaaattagtcctttctaaactttatgaagaaggttccaacaaaagactttttaatgttgatcggcatgttggaatggcagtagcaggtttgttggcagatgctcgttctttagcagacatagcaagagaagaagcttccaacttcagatctaactttggctacaacattccactaaaacatcttgcagacagagtggccatgtatgtgcatgcatatacactctacagtgctgttagaccttttggctgcagtttcatgttagggtcttacagtgtgaatgacggtgcgcaactctacatgattgacccatcaggtgtttcatacggttattggggctgtgccatcggcaaagccaggcaagctgcaaagacggaaatagagaagcttcagatgaaagaatgactgcgganatcgtanagangtgcaaaatatttacctagtccaggacgaagttaggggtaagcttttgaccaaaaatcaacggggtgggggaataaataaaggagagatgaaaattgtccaaaaaaattaagccggggaatttcttgggatctctttgggagaggaagccccggtgtnttttttnccccttcccccccc

SEQ ID NO: 364963 - DNA, 934 bp, Homo sapiens
ggcagttcagccaatgagcgggcctgttactagtttgcggcatcctgtggtataggggaagcgctccgggcctggaatccctacgcgtccctttgggtttagcacgatgagctcaatcggcactgggtatgacctgtcagcctctacattctctcctgacggaagagtttttcaagttgaatatgctatgaaggctgtggaaaatagtagtacagctattggaatcagatgcaaagatggtgttgtctttggggtagaaaaattagtcctttctaaactttatgaagaaggttccaacaaaagactttttaatgttgatcggcatgttggaatggcagtagcaggtttgttggcagatgctcgttctttagcagacatagcaagagaagaagcttccaacttcagatctaactttggctacaacattccactaaaatttcatgttagggtcttacagtgtgaatgacggtgcgcaactctacatgattgacccatcaggtgtttcatacggttattggggctgtgccatcggcaaagccaggcaagctgcaaagacggaaatagagaagcttcagatgaaagaaatgacctgccgtgatatcgttaaagaagttgcaaaaataatttacatagtacatgacgaagttaaggataaagcttttgaactagaactcagctgggttggtgaattaactaatggaagacatgaaattgttccaaaagatataagagaagaagcagagaaatatgctaaggaatctctgaaggaagaagatgaatcagatgatgataatatgtaacatttactccagcatctattgtattttaaatttctactccagtccaatgtaactatttagccctggattatacatactgtccaattttcattaaatttttgtcttataaaaaaaaaaaaaaaagtggaaaaaaa

SEQ ID NO: 364964 - DNA, 3627 bp, Homo sapiens
tttttttttgagatggagtctcactctgtcgtccagactggagggcagtggcacgatcttggctcactgcaacctccgcctcccgtgttcaagcaattctcctgcatcagcctctcaagtagctgggattacaggcgcccaccaccacacctggctaatttttgtatttttagtagagacaggctttaccatcttggccaggctggtcttgaactcctgaccttgtgatccacccaccttggcctcccaaagtgctgggattacagatgtgaaccaccgcacctggcctcttgatactttttatgttactttaatatgttgcatgacagtgcctccttctttgctgtaatttgtaaggtactacaatgtgaaggccaggttatgtggcatatatgccattataaaatggacaaggagcttaaaaagactactgccaagaagctataggttgaagagaccactaataattgcaagcacataaattagtttttttttttttatttttttgaaacagagtctcactctgttgcccaggctggagtgcagtgtcgtgatctcagctcactgcagcccctacctcctgggttcaagcaagtctcctgcctcagtttcccgagtagttgggactacaggcctatggccacctcacctggctaatttttgtatttttagtagagacgtgggttcaccatgttggccaggatggtctcgaactcctgacctcatgatccacccgcctctgcctccccaaagtgctaggattacaggcacgagccaccatgtccagccaattagttggttttaaatatatttaagttaatggacaaaatattctaaaagggcacagttaatgacgcctcttcctagtgaatccgtgttctttatgaggtatcttttatagttgtatctttttttttttctgagatggagtctcgctctactgtagcccaggatggagtgcagtagtgtgatcttggctcactgcaacccctgcctcccgggttcaaggaattctcctgccttagcctcctgagtagctgagattacaggcgcccaccaccacacctggctgatttttgtttcttagtagagacagggtttcaccatgttggccaggctagtctcgaactgacctcaagtgatccatccgccttggtctcccaaagtgttgggattacaggtgtgagccactgtgcccagccaagttatatctctaaagcaatgtgcaaaaataaactgaacttgggttgattaggtatattcaacatttgtcgggagagtagatgtttcattttatttcagtccctgtgtaatttgtcttctctaatgttaaatactatgtagaatgtgtctgtgtaattttatagatacttttattatggatggacattctaatttgtactgactttgggtctgtgaactacttcaatgtttggaggttaccaaaatcttacctttcccttttctattctagaatttacatagtacatgacgaagttaaggataaagcttttgaactagaactcagctgggttggtgaattaactaatggaagacatgaaattgttccaaaagatataagagaagaagcagagaaatatgctaaggtaagccacagcacaaaaacttctcttggccaggtacagtcagggaatcacttagcccaggagtttgagaccagcctgagcagcacagcaagacccccatccctaatttaaaaaaaaaaaaaaattctctaaccaaaattatgtgttgaataatataaatagactggggtggtttctatgaaataacactgagagttcagttgaactaaagatagaaattttctaggttatctctagtgggtaaagttgccttggttccaaaaaaaaaaaacttgggaggtttagactgcaaagagttttttaggacttttaatactttaaatatttgttcttttttttttttttttttgagacggagtcttgctctgtcacccaggctggagggcagtggcaccatctctgctcactgcaacctctgcctccagggttcaagcgatcctcctgcctccgcctcccaagtagctgggattacaggaacatgccaccatacctggctacttttgtatttttggcttcaccaataatacagagacgggttttcaccaggctagtttcaaactcttgaactcacgtgatctgcctactttggcccccgtaaagtgctgggattacaggcatgaacactgcaccaggcctcttaagtatatattctatcaaagatacagtcattgcatgttagagcaacatttgcttaattaactttgcttgggtatcttattctgaaactgttcattcagttacaagtagaggaatttaaccacttaattcaggttgttgtagcttaacttgcccacaggtgtgggatataacaattttaaaaatcaattttaaacacctgttttctcttaacaggaatctctgaaggaagaagatgaatcagatgatgataatatgtaacatttactccagcatctattgtattttaaatttctactccagtccaatgtaactatttagccctggattatacatactgtccaattttcattaaatttttgtcttataactattgaagtttggttaatatctgctttacaaaattggtgggggtaaatgaggacatttactcagtattaaaatatagatttatgactactgaaaaattccctggttaaaatgctgcagaattaattccaagactgtagattaattcaaagccccatcttcatcactcaactagaatttacagatcatattctcctgggcttttgtacaaaaagcacctaccaacttagtggacaaataactgatacggtttcccaccttcatatgaagtaactggtggtcatcagtcactgttaatctttagatgtgatacagatgacagatgtttcagttttggataatttttcaaaaactgacccttcctcaaaaaagacccttcaatacatgagtcaaggatgtttttgcttttttcctttattgtggtgaggggcggatttaaggatcaataaagtccctattctgtcactaaaaaaatttcttgatctctaaagattaaaataaaaataccaacatcagacagctttcatgttaaaaatcagaatttatgttaaagtgctctgtaaacagaactgttactaagtggaataaacagtactgtggccgataagaataacttgaagctgaaaagcagtactcacagcaggaacaatttgaactcaggccatgtatacacaccctctagtggactcatgccagtgtcactccattgaagtgttgtgctttcctaagaaggtaatctagccactgaatttgggtgcagggtatcgctggactttgagcatttgtgtagtttaaatagcaaatcattatacctgagtattaatagctaactactacacaaacaactcaaaaccagtaatgtcatgtcattaccatggcttcttttatgtaacattatctgctacattttaccactcaaaatatatttaaaatatgtattttaaaatatattagagcatatggctcaagcaatcctcccacctcagcctcccaagtagctgggaccacaggcaag

SEQ ID NO: 364965 - DNA, 797 bp, Homo sapiens
ggcagttcagccaatgagcgggcctgttactagtttgcggcatcctgtggtataggggaagcgctccgggcctggaatccctacgcgtccctttgggtttagcacgatgagctcaatcggcactgggtatgacctgtcagcctctacattctctcctgacggaagagtttttcaagttgaatatgctatgaaggctgtggaaaatagtagtacagctattggaatcagatgcaaagatggtgttgtctttggggtagaaaaattagtcctttctaaactttatgaagaaggttccaacaaaagactttttaatgttgatcggcatgttggaatggcagtagcaggtttgttggcagatgctcgttctttagcagacatagcaagagaagaagcttccaacttcagatctaactttggctacaacattccactaaaacatcttgcagacagagtggccatgtatgtgcatgcatatacactctacagtgctgttagaccttttggctgcagaatttacatagtacatgacgaagttaaggataaagcttttgaactagaactcagctgggttggtgaattaactaatggaagacatgaaattgttccaaaagatataagagaagaagcagagaaatatgctaaggaatctctgaaggaagaagatgaatcagatgatgataatatgtaacatttactccagcatctattgtattttaaatttctactccagtccaatgtaactatttagccctggattatacatactgtccaattttcattaaatttttgtcttataa

SEQ ID NO: 364966 - DNA, 1761 bp, Homo sapiens
tttttttttgagatggagtctcactctgtcgtccagactggagggcagtggcacgatcttggctcactgcaacctccgcctcccgtgttcaagcaattctcctgcatcagcctctcaagtagctgggattacaggcgcccaccaccacacctggctaatttttgtatttttagtagagacaggctttaccatcttggccaggctggtcttgaactcctgaccttgtgatccacccaccttggcctcccaaagtgctgggattacagatgtgaaccaccgcacctggcctcttgatactttttatgttactttaatatgttgcatgacagtgcctccttctttgctgtaatttgtaaggtactacaatgtgaaggccaggttatgtggcatatatgccattataaaatggacaaggagcttaaaaagactactgccaagaagctataggttgaagagaccactaataattgcaagcacataaattagtttttttttttttatttttttgaaacagagtctcactctgttgcccaggctggagtgcagtgtcgtgatctcagctcactgcagcccctacctcctgggttcaagcaagtctcctgcctcagtttcccgagtagttgggactacaggcctatggccacctcacctggctaatttttgtatttttagtagagacgtgggttcaccatgttggccaggatggtctcgaactcctgacctcatgatccacccgcctctgcctccccaaagtgctaggattacaggcacgagccaccatgtccagccaattagttggttttaaatatatttaagttaatggacaaaatattctaaaagggcacagttaatgacgcctcttcctagtgaatccgtgttctttatgaggtatcttttatagttgtatctttttttttttctgagatggagtctcgctctactgtagcccaggatggagtgcagtagtgtgatcttggctcactgcaacccctgcctcccgggttcaaggaattctcctgccttagcctcctgagtagctgagattacaggcgcccaccaccacacctggctgatttttgtttcttagtagagacagggtttcaccatgttggccaggctagtctcgaactgacctcaagtgatccatccgccttggtctcccaaagtgttgggattacaggtgtgagccactgtgcccagccaagttatatctctaaagcaatgtgcaaaaataaactgaacttgggttgattaggtatattcaacatttgtcgggagagtagatgtttcattttatttcagtccctgtgtaatttgtcttctctaatgttaaatactatgtagaatgtgtctgtgtaattttatagatacttttattatggatggacattctaatttgtactgactttgggtctgtgaactacttcaatgtttggaggttaccaaaatcttacctttcccttttctattctagaatttacatagtacatgacgaagttaaggataaagcttttgaactagaactcagctgggttggtgaattaactaatggaagacatgaaattgttccaaaagatataagagaagaagcagagaaatatgctaaggaatctctgaaggaagaagatgaatcagatgatgataatatgtaacatttactccagcatctattgtattttaaatttctactccagtccaatgtaactatttagccctggattatacatactgtccaattttcattaaatttttgtcttataa

SEQ ID NO: 364967 - DNA, 1999 bp, Homo sapiens
  misc_feature (60)..(60): n is a, c, g, or t
  misc_feature (233)..(233): n is a, c, g, or t
  misc_feature (243)..(243): n is a, c, g, or t
  misc_feature (269)..(269): n is a, c, g, or t
  misc_feature (279)..(279): n is a, c, g, or t
cacaccacctgagtcaaacaaatgcaaagaagcacacgtcaggggtcttataggctcaanagcactgagatgaatcacacaagaaggggaaactttagagaagactacagggaaacacaaagtagttaaacacaactaaccttgaaaataatttgttagtattcctaaacatcacttttgtgtagcaaaatgtttcactgtacaaatgctcacctaaagtgaaaaaaaaaaangtggaaaaanaaatcactcctagggtccaagaaaanttctcatatnttttatggtatgtgtaacttaaagactgcgattatttttttttttttttgagacggagtcttgctctgtcacccaggctggagggcagtggcaccatctctgctcactgcaacctctgcctccagggttcaagcgatcctcctgcctccgcctcccaagtagctgggattacaggaacatgccaccatacctggctacttttgtatttttggcttcaccaataatacagagacgggttttcaccaggctagtttcaaactcttgaactcacgtgatctgcctactttggcccccgtaaagtgctgggattacaggcatgaacactgcaccaggcctcttaagtatatattctatcaaagatacagtcattgcatgttagagcaacatttgcttaattaactttgcttgggtatcttattctgaaactgttcattcagttacaagtagaggaatttaaccacttaattcaggttgttgtagcttaacttgcccacaggtgtgggatataacaattttaaaaatcaattttaaacacctgttttctcttaacaggaatctctgaaggaagaagatgaatcagatgatgataatatgtaacatttactccagcatctattgtattttaaatttctactccagtccaatgtaactatttagccctggattatacatactgtccaattttcattaaatttttgtcttataactattgaagtttggttaatatctgctttacaaaattggtgggggtaaatgaggacatttactcagtattaaaatatagatttatgactactgaaaaattccctggttaaaatgctgcagaattaattccaagactgtagattaattcaaagccccatcttcatcactcaactagaatttacagatcatattctcctgggcttttgtacaaaaagcacctaccaacttagtggacaaataactgatacggtttcccaccttcatatgaagtaactggtggtcatcagtcactgttaatctttagatgtgatacagatgacagatgtttcagttttggataatttttcaaaaactgacccttcctcaaaaaagacccttcaatacatgagtcaaggatgtttttgcttttttcctttattgtggtgaggggcggatttaaggatcaataaagtccctattctgtcactaaaaaaatttcttgatctctaaagattaaaataaaaataccaacatcagacagctttcatgttaaaaatcagaatttatgttaaagtgctctgtaaacagaactgttactaagtggaataaacagtactgtggccgataagaataacttgaagctgaaaagcagtactcacagcaggaacaatttgaactcaggccatgtatacacaccctctagtggactcatgccagtgtcactccattgaagtgttgtgctttcctaagaaggtaatctagccactgaatttgggtgcagggtatcgctggactttgagcatttgtgtagtttaaatagcaaatcattatacctgagtattaatagctaactactacacaaacaactcaaaaccagtaatgtcatgtcattaccatggcttcttttatgtaacattatctgctacattttaccactcaaaatatatttaaaatatgtattttaaaatatattagagcatatggctcaagcaatcctcccacctcagcctcccaagtagctgggaccacaggcaag

SEQ ID NO: 364968 - DNA, 2646 bp, Homo sapiens
ctcaacgctttatacttctggatatatttcctgtccaagagaagaatcatactgtagtatctcctagagcattagaactaagtgatccagtacttgatgagcaccaccaaggtgatcaagatggaggagatcaagatgaaagggctgaaaaatcaaaattaactgggaccaggcaaaatcattcattcatatggtcaggggcatcatttgatctaagtccaggactgcaaaggattttagataaagtatccagtcctctagaaaatgaaaagctaaaatcaatgactataaacttttccagtttgaatagaaaaaatacagagttaaatgaagaacaagaagttatttcaaacttggagacaaaacaagtgcagggaatttcattttcttctaataatgaagtataaagcgttgagtcaacgctttatacttcagagaagcttcagatgaaagaaatgacctgccgtgatatcgttaaagaagttgcaaaaataatttacatagtacatgacgaagttaaggataaagcttttgaactagaactcagctgggttggtgaattaactaatggaagacatgaaattgttccaaaagatataagagaagaagcagagaaatatgctaaggtaagccacagcacaaaaacttctcttggccaggtacagtcagggaatcacttagcccaggagtttgagaccagcctgagcagcacagcaagacccccatccctaatttaaaaaaaaaaaaaaattctctaaccaaaattatgtgttgaataatataaatagactggggtggtttctatgaaataacactgagagttcagttgaactaaagatagaaattttctaggttatctctagtgggtaaagttgccttggttccaaaaaaaaaaaacttgggaggtttagactgcaaagagttttttaggacttttaatactttaaatatttgttcttttttttttttttttttgagacggagtcttgctctgtcacccaggctggagggcagtggcaccatctctgctcactgcaacctctgcctccagggttcaagcgatcctcctgcctccgcctcccaagtagctgggattacaggaacatgccaccatacctggctacttttgtatttttggcttcaccaataatacagagacgggttttcaccaggctagtttcaaactcttgaactcacgtgatctgcctactttggcccccgtaaagtgctgggattacaggcatgaacactgcaccaggcctcttaagtatatattctatcaaagatacagtcattgcatgttagagcaacatttgcttaattaactttgcttgggtatcttattctgaaactgttcattcagttacaagtagaggaatttaaccacttaattcaggttgttgtagcttaacttgcccacaggtgtgggatataacaattttaaaaatcaattttaaacacctgttttctcttaacaggaatctctgaaggaagaagatgaatcagatgatgataatatgtaacatttactccagcatctattgtattttaaatttctactccagtccaatgtaactatttagccctggattatacatactgtccaattttcattaaatttttgtcttataactattgaagtttggttaatatctgctttacaaaattggtgggggtaaatgaggacatttactcagtattaaaatatagatttatgactactgaaaaattccctggttaaaatgctgcagaattaattccaagactgtagattaattcaaagccccatcttcatcactcaactagaatttacagatcatattctcctgggcttttgtacaaaaagcacctaccaacttagtggacaaataactgatacggtttcccaccttcatatgaagtaactggtggtcatcagtcactgttaatctttagatgtgatacagatgacagatgtttcagttttggataatttttcaaaaactgacccttcctcaaaaaagacccttcaatacatgagtcaaggatgtttttgcttttttcctttattgtggtgaggggcggatttaaggatcaataaagtccctattctgtcactaaaaaaatttcttgatctctaaagattaaaataaaaataccaacatcagacagctttcatgttaaaaatcagaatttatgttaaagtgctctgtaaacagaactgttactaagtggaataaacagtactgtggccgataagaataacttgaagctgaaaagcagtactcacagcaggaacaatttgaactcaggccatgtatacacaccctctagtggactcatgccagtgtcactccattgaagtgttgtgctttcctaagaaggtaatctagccactgaatttgggtgcagggtatcgctggactttgagcatttgtgtagtttaaatagcaaatcattatacctgagtattaatagctaactactacacaaacaactcaaaaccagtaatgtcatgtcattaccatggcttcttttatgtaacattatctgctacattttaccactcaaaatatatttaaaatatgtattttaaaatatattagagcatatggctcaagcaatcctcccacctcagcctcccaagtagctgggaccacaggcaag

SEQ ID NO: 364969 - DNA, 501 bp, Homo sapiens
ggcagttcagccaatgagcgggcctgttactagtttgcggcatcctgtggtataggggaagcgctccgggcctggaatccctacgcgtccctttgggtttagcacgatgagctcaatcggcactggggcctgcgtctcaggtgaccgtgactcctgaagcttttcagcgcaggtgtagccggcttggcgtcgccgcagtgaggtttggagccgctttggattgctgagtcactttcttcagccacttagggaaaccgaaagtggaaactcgtggggcttgaaatagtgtgttctcttgagaaccaccgaggcagtgagatttgggattccggggtctggagatcgtgctttttgtggactgcgtttgcagttcctagggtgctgctgattcacaggccttctctgtctttaagtgtgcagatcattgaccgctcagtttaagagtcactggaaatcctgtcggaacagaactaataaaaatggtctgaaaaacaaaaaaaa

SEQ ID NO: 364970 - DNA, 682 bp, Homo sapiens
gtgttgtctttggggtagaaaaattagtcctttctaaactttatgaagaaggttccaacaaaagactttttaatgttgatcggcatgttggaatggtaaggtcatgtttaaaatgttcctttttgtcttgtccaatttcttttgaagtaactgattggaatagatcactgtgcagtcacaaaagtaatcagagcaagttactgcatttgtccagttcactgtccagtagaaaggcagcattctcataaccttattagtgatgggggaaaaaccaagttgctgaaagaagagcaggtgagggagagggctggggagtatgcgtagaaatgagatcttggcagcacacattactaatgaaggtatatgcttgagaggtgaagaatctttagctttctgtatctcttgtggggatcactgtcaaagtaaagatgccatcagatagcgaacacctttatataaggtggaacatcaggaaaggatgtttaatgaaaaggaaaagtgaacacatccataatagtttcatagggcatcactgaaattaagttattcatgcagctggtatctaagttatgagtgactaaattgcaagccaagccatagatacatgactggtatatactaaagttaccctacatagatggcagacttggcttagtgagaaccactactgaaagaaaaaaaa

SEQ ID NO: 364971 - DNA, 372 bp, Homo sapiens
tacatgaattttgaataatctcatgtaatagttttaattaattgaaaccactgtttcaaagtacttactgagttatatgtgtattagtaatttatctcagaaagaaaatataactgcattttaaaataattttttcacaaatacttttatgttattgccatggtttaagctgtttgtatactttcatgtttcatgttagggtcttacagtgtgaatgacggtgcgcaactctacatgattgacccatcaggtgtttcatacgtgagtaattttgaatcatttgaaattctattttagtttaatggtatttcattagcatttaagtctcattataagattatatgaaattaaaaaaaaactcattcaaggaaa

SEQ ID NO: 364972 - DNA, 1130 bp, Homo sapiens
ggcagttcagccaatgagcgggcctgttactagtttgcggcatcctgtggtataggggaagcgctccgggcctggaatccctacgcgtccctttgggtttagcacgatgagctcaatcggcactgggtatgacctgtcagcctctacattctctcctgacggaagagtttttcaagttgaatatgctatgaaggctgtggaaaatagtagtacagctattggaatcagatgcaaagatggtgttgtctttggggtagaaaaattagtcctttctaaactttatgaagaaggttccaacaaaagactttttaatgttgatcggcatgttggaatggcagtagcaggtttgttggcagatgctcgttctttagcagacatagcaagagaagaagcttccaacttcagatctaactttggctacaacattccactaaaacatcttgcagacagagtggccatgtatgtgcatgcatatacactctacagtgctgttagaccttttggctgcagtttcatgttagggtcttacagtgtgaatgacggtgcgcaactctacatgattgacccatcaggtgtttcatacggttattggggctgtgccatcggcaaagccaggcaagctgcaaagacggaaatagagaagcttcagatgaaagaaatgacctgccgtgatatcgttaaagaagttgcaaaaataatttacatagtacatgacgaagttaaggataaagcttttgaactagaactcagctgggttggtgaattaactaatggaagacatgaaattgttccaaaagatataagagaagaagcagagaaatatgctaaggaatctctgaaggaagaagatgaatcagatgatgataatatgtaacatttactccagcatctattgtattttaaatttctactccagtccaatgtaactatttagccctggattatacatactgtccaattttcattaaatttttgtcttataaaaaaaaaaaaggcgggggcttaaaatcccggggcgcatgcgtcccgtctgtaaaggccaaggaggaaaaaaagagggcgggtaaaggggaagcgggtttggaccctctgggtggacccaaaccgaaatgatgactgggggtaaatag

SEQ ID NO: 364973 - DNA, 578 bp, Homo sapiens
gatctaacttggctacaacattccactaaaacatcttgcagacagagtggccatgtatgtgcatgcatatacactctacagtgctgttagaccttttggctgcagtttcatgttagggtcttacagtgtgaatgacggtgcgcaactctacatgattgacccatcaggtgtttcatacggttattggggctgtgccatcggcaaagccaggcaagctgcaaagacggaaatagagaagcttcagatgaaagaaatgacctgccgtgatatcgttaaagaagttgcaaaaataatttacatagtacatgacgaagttaaggataaagcttttgaactagaactcagctgggttggtgaattaactaatggaagacatgaaattgttccaaaagatataagagaagaagcagagaaatatgctaaggaatctctgaaggaagaagatgaatcagatgatgataatatgtaacatttactccagcatctattgtattttaaatttctactccagtccaatgtaactatttagccctggattatacatactgtccaattttcattaaatttttgtcttataa

SEQ ID NO: 364974 - DNA, 384 bp, Homo sapiens
ccgggctgcaggaattcggcacgagagactatattcatataaacattggtgcacttgaactgagtgcaaaccacaacattcttcatattgtggtgtgtgtcatgacgtataaaaggaagacaaagaagaagaaaaagaaaaagaagataaagagtcggaagacaataactaatggaagacatgaaattgttccaaaagatataagagaagaagcagagaaatatgctaaggaatctctgaaggaagaagatgaatcagatgatgataatatgtaacatttactccagcatctattgtattttaaatttctactccagtccaatgtaactatttagccctggattatacatactgtccaattttcattaaatttttgtcttataa

SEQ ID NO: 364975 - DNA, 1997 bp, Homo sapiens
ggcagttcagccaatgagcgggcctgttactagtttgcggcatcctgtggtataggggaagcgctccgggcctggaatccctacgcgtccctttgggtttagcacgatgagctcaatcggcactgggtatgacctgtcagcctctacattctctcctgacggaagagtttttcaagttgaatatgctatgaaggctgtggaaaatagtagtacagctattggaatcagatgcaaagatggtgttgtctttggggtagaaaaattagtcctttctaaactttatgaagaaggttccaacaaaagactttttaatgttgatcggcatgttggaatggcagtagcaggtttgttggcagatgctcgttctttagcagacatagcaagagaagaagcttccaacttcagatctaactttggctacaacattccactaaaacatcttgcagacagagtggccatgtatgtgcatgcatatacactctacagtgctgttagaccttttggctgcagtttcatgttagggtcttacagtgtgaatgacggtgcgcaactctacatgattgacccatcaggtgtttcatacggttattggggctgtgccatcggcaaagccaggcaagctgcaaagacggaaatagagaagcttcagatgaaagaaatgacctgccgtgatatcgttaaagaagttgcaaaaataatttacatagtacatgacgaagttaaggataaagcttttgaactagaactcagctgggttggtgaattaactaatggaagacatgaaattgttccaaaagatataagagaagaagcagagaaatatgctaaggaatctctgaaggaagaagatgaatcagatgatgataatatgtaacatttactccagcatctattgtattttaaatttctactccagtccaatgtaactatttagccctggattatacatactgtccaattttcattaaatttttgtcttataactattgaagtttggttaatatctgctttacaaaattggtgggggtaaatgaggacatttactcagtattaaaatatagatttatgactactgaaaaattccctggttaaaatgctgcagaattaattccaagactgtagattaattcaaagccccatcttcatcactcaactagaatttacagatcatattctcctgggcttttgtacaaaaagcacctaccaacttagtggacaaataactgatacggtttcccaccttcatatgaagtaactggtggtcatcagtcactgttaatctttagatgtgatacagatgacagatgtttcagttttggataatttttcaaaaactgacccttcctcaaaaaagacccttcaatacatgagtcaaggatgtttttgcttttttcctttattgtggtgaggggcggatttaaggatcaataaagtccctattctgtcactaaaaaaatttcttgatctctaaagattaaaataaaaataccaacatcagacagctttcatgttaaaaatcagaatttatgttaaagtgctctgtaaacagaactgttactaagtggaataaacagtactgtggccgataagaataacttgaagctgaaaagcagtactcacagcaggaacaatttgaactcaggccatgtatacacaccctctagtggactcatgccagtgtcactccattgaagtgttgtgctttcctaagaaggtaatctagccactgaatttgggtgcagggtatcgctggactttgagcatttgtgtagtttaaatagcaaatcattatacctgagtattaatagctaactactacacaaacaactcaaaaccagtaatgtcatgtcattaccatggcttcttttatgtaacattatctgctacattttaccactcaaaatatatttaaaatatgtattttaaaatatattagagcatatggctcaagcaatcctcccacctcagcctcccaagtagctgggaccacaggcaag

SEQ ID NO: 364976 - DNA, 903 bp, Homo sapiens
ggcagttcagccaatgagcgggcctgttactagtttgcggcatcctgtggtataggggaagcgctccgggcctggaatccctacgcgtccctttgggtttagcacgatgagctcaatcggcactgggtatgacctgtcagcctctacattctctcctgacggaagagtttttcaagttgaatatgctatgaaggctgtggaaaatagtagtacagctattggaatcagatgcaaagatggtgttgtctttggggtagaaaaattagtcctttctaaactttatgaagaaggttccaacaaaagactttttaatgttgatcggcatgttggaatggcagtagcaggtttgttggcagatgctcgttctttagcagacatagcaagagaagaagcttccaacttcagatctaactttggctacaacattccactaaaacatcttgcagacagagtggccatgtatgtgcatgcatatacactctacagtgctgttagaccttttggctgcagtttcatgttagggtcttacagtgtgaatgacggtgcgcaactctacatgattgacccatcaggtgtttcatacggttattggggctgtgccatcggcaaagccaggcaagctgcaaagacggaaatagagaagcttcagatgaaagaaatgacctgccgtgatatcgttaaagaagttgcaaaaataatttacatagtacatgacgaagttaaggataaagcttttgaactagaactcagctgggttggtgaattaactaatggaagacatgaaattgttccaaaagatataagagaagaagcagagaaatatgctaaggaatctctgaaggaagaagatgaatcagatgatgataatatgcacaagcactccaaaaggggatccttagagtc

SEQ ID NO: 364977 - DNA, 2849 bp, Homo sapiens
ggcagttcagccaatgagcgggcctgttactagtttgcggcatcctgtggtataggggaagcgctccgggcctggaatccctacgcgtccctttgggtttagcacgatgagctcaatcggcactgggtatgacctgtcagcctctacattctctcctgacggaagagtttttcaagttgaatatgctatgaaggctgtggaaaatagtagtacagctattggaatcagatgcaaagatggtgttgtctttggggtagaaaaattagtcctttctaaactttatgaagaaggttccaacaaaagactttttaatgttgatcggcatgttggaatggcagtagcaggtttgttggcagatgctcgttctttagcagacatagcaagagaagaagcttccaacttcagatctaactttggctacaacattccactaaaacatcttgcagacagagtggccatgtatgtgcatgcatatacactctacagtgctgttagaccttttggctgcagtttcatgttagggtcttacagtgtgaatgacggtgcgcaactctacatgattgacccatcaggtgtttcatacggttattggggctgtgccatcggcaaagccaggcaagctgcaaagacggaaatagagaagcttcagatgaaagaaatgacctgccgtgatatcgttaaagaagttgcaaaaataatttacatagtacatgacgaagttaaggataaagcttttgaactagaactcagctgggttggtgaattaactaatggaagacatgaaattgttccaaaagatataagagaagaagcagagaaatatgctaaggtaagccacagcacaaaaacttctcttggccaggtacagtcagggaatcacttagcccaggagtttgagaccagcctgagcagcacagcaagacccccatccctaatttaaaaaaaaaaaaaaattctctaaccaaaattatgtgttgaataatataaatagactggggtggtttctatgaaataacactgagagttcagttgaactaaagatagaaattttctaggttatctctagtgggtaaagttgccttggttccaaaaaaaaaaaacttgggaggtttagactgcaaagagttttttaggacttttaatactttaaatatttgttcttttttttttttttttttgagacggagtcttgctctgtcacccaggctggagggcagtggcaccatctctgctcactgcaacctctgcctccagggttcaagcgatcctcctgcctccgcctcccaagtagctgggattacaggaacatgccaccatacctggctacttttgtatttttggcttcaccaataatacagagacgggttttcaccaggctagtttcaaactcttgaactcacgtgatctgcctactttggcccccgtaaagtgctgggattacaggcatgaacactgcaccaggcctcttaagtatatattctatcaaagatacagtcattgcatgttagagcaacatttgcttaattaactttgcttgggtatcttattctgaaactgttcattcagttacaagtagaggaatttaaccacttaattcaggttgttgtagcttaacttgcccacaggtgtgggatataacaattttaaaaatcaattttaaacacctgttttctcttaacaggaatctctgaaggaagaagatgaatcagatgatgataatatgtaacatttactccagcatctattgtattttaaatttctactccagtccaatgtaactatttagccctggattatacatactgtccaattttcattaaatttttgtcttataactattgaagtttggttaatatctgctttacaaaattggtgggggtaaatgaggacatttactcagtattaaaatatagatttatgactactgaaaaattccctggttaaaatgctgcagaattaattccaagactgtagattaattcaaagccccatcttcatcactcaactagaatttacagatcatattctcctgggcttttgtacaaaaagcacctaccaacttagtggacaaataactgatacggtttcccaccttcatatgaagtaactggtggtcatcagtcactgttaatctttagatgtgatacagatgacagatgtttcagttttggataatttttcaaaaactgacccttcctcaaaaaagacccttcaatacatgagtcaaggatgtttttgcttttttcctttattgtggtgaggggcggatttaaggatcaataaagtccctattctgtcactaaaaaaatttcttgatctctaaagattaaaataaaaataccaacatcagacagctttcatgttaaaaatcagaatttatgttaaagtgctctgtaaacagaactgttactaagtggaataaacagtactgtggccgataagaataacttgaagctgaaaagcagtactcacagcaggaacaatttgaactcaggccatgtatacacaccctctagtggactcatgccagtgtcactccattgaagtgttgtgctttcctaagaaggtaatctagccactgaatttgggtgcagggtatcgctggactttgagcatttgtgtagtttaaatagcaaatcattatacctgagtattaatagctaactactacacaaacaactcaaaaccagtaatgtcatgtcattaccatggcttcttttatgtaacattatctgctacattttaccactcaaaatatatttaaaatatgtattttaaaatatattagagcatatggctcaagcaatcctcccacctcagcctcccaagtagctgggaccacaggcaag

SEQ ID NO: 364978 - DNA, 866 bp, Homo sapiens
ggcagttcagccaatgagcgggcctgttactagtttgcggcatcctgtggtataggggaagcgctccgggcctggaatccctacgcgtccctttgggtttagcacgatgagctcaatcggcactgggtatgacctgtcagcctctacattctctcctgacggaagagtttttcaagttgaatatgctatgaaggctgtggaaaatagtagtacagctattggaatcagatgcaaagatggtgttgtctttggggtagaaaaattagtcctttctaaactttatgaagaaggttccaacaaaagactttttaatgttgatcggcatgttggaatggcagtagcaggtttgttggcagatgctcgttctttagcagacatagcaagagaagaagcttccaacttcagatctaactttggctacaacattccactaaaacatcttgcagacagagtggccatgtatgtgcatgcatatacactctacagtgctgttagaccttttggctgcagtttcatgttagggtcttacagtgtgaatgacggtgcgcaactctacatgattgacccatcaggtgtttcatacggttattggggctgtgccatcggcaaagccaggcaagctgcaaagacggaaatagagaagcttcagatgaaagaaatgacctgccgtgatatcgttaaagaagttgcaaaaataatttacatagtacatgacgaagttaaggataaagcttttgaactagaactcagctgggttggtgaattaactaatggaagacatgaaattgttccaaaagatataagagaagaagcagagaaatatgctaagaatctctgatggacgaaagggatccgctagaacagct

SEQ ID NO: 364979 - DNA, 900 bp, Homo sapiens
ggcagttcagccaatgagcgggcctgttactagtttgcggcatcctgtggtataggggaagcgctccgggcctggaatccctacgcgtccctttgggtttagcacgatgagctcaatcggcactgggtacagctattggaatcagatgcaaagatggtgttgtctttggggtagaaaaattagtcctttctaaactttatgaagaaggttccaacaaaagactttttaatgttgatcggcatgttggaatggcagtagcaggtttgttggcagatgctcgttctttagcagacatagcaagagaagaagcttccaacttcagatctaactttggctacaacattccactaaaacatcttgcagacagagtggccatgtatgtgcatgcatatacactctacagtgctgttagaccttttggctgcagtttcatgttagggtcttacagtgtgaatgacggtgcgcaactctacatgattgacccatcaggtgtttcatacggttattggggctgtgccatcggcaaagccaggcaagctgcaaagacggaaatagagaagcttcagatgaaagaaatgacctgccgtgatatcgttaaagaagttgcaaaaataatttacatagtacatgacgaagttaaggataaagcttttgaactagaactcagctgggttggtgaattaactaatggaagacatgaaattgttccaaaagatataagagaagaagcagagaaatatgctaaggaatctctgaaggaagaagatgaatcagatgatgataatatgtaacatttactccagcatctattgtattttaaatttctactccagtccaatgtaactatttagccctggattatacatactgtccaattttcattaaatttttgtcttataa

SEQ ID NO: 364980 - DNA, 1337 bp, Homo sapiens
ggcagttcagccaatgagcgggcctgttactagtttgcggcatcctgtggtataggggaagcgctccgggcctggaatccctacgcgtccctttgggtttagcacgatgagctcaatcggcactgggtatgacctgtcagcctctacattctctcctgacggaagagtttttcaagttgaatatgctatgaaggctgtggaaaatagtagtacagctattggaatcagatgcaaagatggtgttgtctttggggtagaaaaattagtcctttctaaactttatgaagaaggttccaacaaaagactttttaatgttgatcggcatgttggaatggcagtagcaggtttgttggcagatgctcgttctttagcagacatagcaagagaagaagcttccaacttcagatctaactttggctacaacattccactaaaacatcttgcagacagagtggccatgtatgtgcatgcatatacactctacagtgctgttagaccttttggctgcagtttcatgttagggtcttacagtgtgaatgacggtgcgcaactctacatgattgacccatcaggtgtttcatacggttattggggctgtgccatcggcaaagccaggcaagctgcaaagacggaaatagagaagcttcagatgaaagaaatgacctgccgtgatatcgttaaagaagttgcaaaaataatttacatagtacatgacgaagttaaggataaagcttttgaactagaactcagctgggttggtgaatgtaagttatttttgtacatttatttgccttaggaatgatctgtaccacagctaatttacaactgagtgtcctttctaatataatgaaagctaaagcaaatttactaggttgtctaatgaagggaaagttctgcttaataattgacttaagttgtgaacacgttattttttgaaacatccatttcatggttttaagatactatgctataaattaatgctcaggatttataaatagcataatttactttcatttccataagaacttaatatgtaggcacatataatctcatgtagaagcagcacacaaaaatattcgagtattactcatagtacaactttgcaaccttaggtgagtcagatatgtggattgggtagatcctatggtatactgcaagttacaatatggtactcaatttaaaattcatttacacatgtggcttaatttacagttaactaatggaagacatgaaattgttccaaaagatataagagaagaagcagagaaatatgctaagactctctgaaggaagaagagatcagatgatactaagggaccctctagacccacctcaga

SEQ ID NO: 364981 - DNA, 929 bp, Homo sapiens
ggcagttcagccaatgagcgggcctgttactagtttgcggcatcctgtggtataggggaagcgctccgggcctggaatccctacgcgtccctttgggtttagcacgatgagctcaatcggcactgggtatgacctgtcagcctctacattctctcctgacggaagagtttttcaagttgaatatgctatgaaggctgtggaaaatagtagtacagctattggaatcagatgcaaagatggtgttgtctttggggtagaaaaattagtcctttctaaactttatgaagaaggttccaacgcagatgctcgttctttagcagacatagcaagagaagaagcttccaacttcagatctaactttggctacaacattccactaaaacatcttgcagacagagtggccatgtatgtgcatgcatatacactctacagtgctgttagaccttttggctgcagtttcatgttagggtcttacagtgtgaatgacggtgcgcaactctacatgattgacccatcaggtgtttcatacggttattggggctgtgccatcggcaaagccaggcaagctgcaaagacggaaatagagaagcttcagatgaaagaaatgacctgccgtgatatcgttaaagaagttgcaaaaataatttacatagtacatgacgaagttaaggataaagcttttgaactagaactcagctgggttggtgaattaactaatggaagacatgaaattgttccaaaagatataagagaagaagcagagaaatatgctaaggaatctctgaaggaagaagatgaatcagatgatgataatatgtaacatttactccagcatctattgtattttaaatttctactccagtccaatgtaactatttagccctggattatacatactgtccaattttcattaaatttttgtcttataa

SEQ ID NO: 364982 - DNA, 962 bp, Homo sapiens
ggcagttcagccaatgagcgggcctgttactagtttgcggcatcctgtggtataggggaagcgctccgggcctggaatccctacgcgtccctttgggtttagcacgatgagctcaatcggcactgggtatgacctgtcagcctctacattctctcctgacggaagagtttttcaagttgaatatgctatgaaggctgtggaaaatagtagtacagctattggaatcagatgcaaagatggtgttgtctttggggtagaaaaattagtcctttctaaactttatgaagaaggttccaacaaaagactttttaatgttgatcggcatgttggaatggcagtagcaggtttgttggcagatgctcgttctttagcagacatagcaagagaagaagcttccaacttcagatctaactttggctacaacattccactaaaacatcttgcagacagagtggccatgtatgtgcatgcatatacactctacagtgctgttagaccttttggctgcagtgtgaatgacggtgcgcaactctacatgattgacccatcaggtgtttcatacggttattggggctgtgccatcggcaaagccaggcaagctgcaaagacggaaatagagaagcttcagatgaaagaaatgacctgccgtgatatcgttaaagaagttgcaaaaataatttacatagtacatgacgaagttaaggataaagcttttgaactagaactcagctgggttggtgaattaactaatggaagacatgaaattgttccaaaagatataagagaagaagcagagaaatatgctaaggaatctctgaaggaagaagatgaatcagatgatgataatatgtaacatttactccagcatctattgtattttaaatttctactccagtccaatgtaactatttagccctggattatacatactgtccaattttcattaaatttttgtcttataa

SEQ ID NO: 364983 - DNA, 1036 bp, Homo sapiens
ggcagttcagccaatgagcgggcctgttactagtttgcggcatcctgtggtataggggaagcgctccgggcctggaatccctacgcgtccctttgggtttagcacgatgagctcaatcggcactgggtatgacctgtcagcctctacattctctcctgacggaagagtttttcaagttgaatatgctatgaaggctgtggaaaatagtagtacagctattggaatcagatgcaaagatggtgttgtctttggggtagaaaaattagtcctttctaaactttatgaagaaggttccaacaaaagactttttaatgttgatcggcatgttggaatggcagtagcaggtttgttggcagatgctcgttctttagcagacatagcaagagaagaagcttccaacttcagatctaactttggctacaacattccactaaaacatcttgcagacagagtggccatgtatgtgcatgcatatacactctacagtgctgttagaccttttggctgcagtttcatgttagggtcttacagtgtgaatgacggtgcgcaactctacatgattgacccatcaggtgtttcatacggttattggggctgtgccatcggcaaagccaggcaagctgcaaagacggaaatagagaagcttcagatgaaagaaatgacctgccgtgatatcgttaaagaagttgcaaaaattgtaagttgaaatttttcttaccatccacaaaaatatttcatttgacctttgcatatatatattacattaatcctaagaagctgttttcctgtaaaataacttagtgtataatttttagaaggtaaatttaacattctaagaagcctcacgaaggaagaaaatgtttttaagcaatattttttagtagtaatgaataggatgggaaaaatagcttgacaaaataaactcctgttacaggttaaggacatataccattagggtcttaatttgttagctcccaacttctcaaatctcttaagtcctaataatagtaatcttaagattgcctctattgtaaga

SEQ ID NO: 364984 - DNA, 1914 bp, Homo sapiens
ggcagttcagccaatgagcgggcctgttactagtttgcggcatcctgtggtataggggaagcgctccgggcctggaatccctacgcgtccctttgggtttagcacgatgagctcaatcggcactgggtacagctattggaatcagatgcaaagatggtgttgtctttggggtagaaaaattagtcctttctaaactttatgaagaaggttccaacaaaagactttttaatgttgatcggcatgttggaatggcagtagcaggtttgttggcagatgctcgttctttagcagacatagcaagagaagaagcttccaacttcagatctaactttggctacaacattccactaaaacatcttgcagacagagtggccatgtatgtgcatgcatatacactctacagtgctgttagaccttttggctgcagtttcatgttagggtcttacagtgtgaatgacggtgcgcaactctacatgattgacccatcaggtgtttcatacggttattggggctgtgccatcggcaaagccaggcaagctgcaaagacggaaatagagaagcttcagatgaaagaaatgacctgccgtgatatcgttaaagaagttgcaaaaataatttacatagtacatgacgaagttaaggataaagcttttgaactagaactcagctgggttggtgaattaactaatggaagacatgaaattgttccaaaagatataagagaagaagcagagaaatatgctaaggaatctctgaaggaagaagatgaatcagatgatgataatatgtaacatttactccagcatctattgtattttaaatttctactccagtccaatgtaactatttagccctggattatacatactgtccaattttcattaaatttttgtcttataactattgaagtttggttaatatctgctttacaaaattggtgggggtaaatgaggacatttactcagtattaaaatatagatttatgactactgaaaaattccctggttaaaatgctgcagaattaattccaagactgtagattaattcaaagccccatcttcatcactcaactagaatttacagatcatattctcctgggcttttgtacaaaaagcacctaccaacttagtggacaaataactgatacggtttcccaccttcatatgaagtaactggtggtcatcagtcactgttaatctttagatgtgatacagatgacagatgtttcagttttggataatttttcaaaaactgacccttcctcaaaaaagacccttcaatacatgagtcaaggatgtttttgcttttttcctttattgtggtgaggggcggatttaaggatcaataaagtccctattctgtcactaaaaaaatttcttgatctctaaagattaaaataaaaataccaacatcagacagctttcatgttaaaaatcagaatttatgttaaagtgctctgtaaacagaactgttactaagtggaataaacagtactgtggccgataagaataacttgaagctgaaaagcagtactcacagcaggaacaatttgaactcaggccatgtatacacaccctctagtggactcatgccagtgtcactccattgaagtgttgtgctttcctaagaaggtaatctagccactgaatttgggtgcagggtatcgctggactttgagcatttgtgtagtttaaatagcaaatcattatacctgagtattaatagctaactactacacaaacaactcaaaaccagtaatgtcatgtcattaccatggcttcttttatgtaacattatctgctacattttaccactcaaaatatatttaaaatatgtattttaaaatatattagagcatatggctcaagcaatcctcccacctcagcctcccaagtagctgggaccacaggcaag

SEQ ID NO: 364985 - DNA, 1028 bp, Homo sapiens
ggcagttcagccaatgagcgggcctgttactagtttgcggcatcctgtggtataggggaagcgctccgggcctggaatccctacgcgtccctttgggtttagcacgatgagctcaatcggcactgggtatgacctgtcagcctctacattctctcctgacggaagagtttttcaagttgaatatgctatgaaggctgtggaaaatagtagtacagctattggaatcagatgcaaagatggtgttgtctttggggtagaaaaattagtcctttctaaactttatgaagaaggttccaacaaaagactttttaatgttgatcggcatgttggaatggcagtagcaggtttgttggcagatgctcgttctttagcagacatagcaagagaagaagcttccaacttcagatctaactttggctacaacattccactaaaacatcttgcagacagagtggccatgtatgtgcatgcatatacactctacagtgctgttagaccttttggctgcagtttcatgttagggtcttacagtgtgaatgacggtgcgcaactctacatgattgacccatcaggtgtttcatacggttattggggctgtgccatcggcaaagccaggcaagctgcaaagacggaaatagagaagcttcaggtaataattaatgcttgaatttttactatgtcgtcatcctaatgcagtgaaattttatcaccacagacatttcagtctaaggcagggatgtccaatcatttggcttccctgggccacacataaaatacaccaacactaatgatagctgatgagcttaaaaaaaaatctcatcatgtgttaagaaagtttacgaatttgtgtttggccccatgtggcctgtggctggggaagctcggtgtaaggatatagtgtggtttgatgttgagagtttatgaagctgctaagtcactgaatgggaaagctggtaacatattatctgtagagttgtgttatacatccctttatagattctgaataactgctataaagcctcaatcta

SEQ ID NO: 364986 - DNA, 962 bp, Homo sapiens
ggcagttcagccaatgagcgggcctgttactagtttgcggcatcctgtggtataggggaagcgctccgggcctggaatccctacgcgtccctttgggtttagcacgatgagctcaatcggcactgggtatgacctgtcagcctctacattctctcctgacggaagagtttttcaagttgaatatgctatgaaggctgtggaaaatagtagtacagctattggaatcagatgcaaagatggtgttgtctttggggtagaaaaattagtcctttctaaactttatgaagaaggttccaacaaaagactttttaatgttgatcggcatgttggaatggcagtagcaggtttgttggcagatgctcgttctttagcagacatagcaagagaagaagcttccaacttcagatctaactttggctacaacattccactaaaacatcttgcagacagagtggccatgtatgtgcatgcatatacactctacagtgctgttagaccttttggctgcaggtaagaaattttgtgaattattcaaaaggcagatctgtactatagatatttattatgttccccagcatcttagccttttacatacttaaaaatagaaactcttgtcgataagtattagggcaatgattaaataaaacagtgtacatagaaactacttgaggctgggtgccatggctcaagcctgtaatcccagtactttgggaggttgaggtgggaggatccctcgcgcccaggagtatgagaccagcctggccaacgcagtgagaacctatctctacaaaaaaaatttaaaatttagccaggtgcagtatcacatgcctgtagtcacagctacttaggagctgcttgagaggatcatttgagcccaggagttgaaggctggaatgagctgtggccataccactgtactctagctggcgcaatagagactctgcctctttaaaaaaaaaaaa

SEQ ID NO: 364987 - DNA, 4370 bp, Homo sapiens
gagctccgccacgcgaggtttcgggctcgtggttttgcttcctccggccaaggtccccgccgctgcatccctcgcggcttccgctgcgctccgggccggagccgagccgcctgcgctgccacagcagccgcctccacacactcgcagacgctcacacgctctccctccctgttcccccgccccctccccagctccttgatctctgggtctgttttattactcctggtgcgagtcccgcggactccgcggcccgctatttgtcatcagctcgctctccattggcggggagcggagagcagcgaagaagggggtggggaggggaggggaagggaagggggtggaaactgcctggagccgtttctccgcgccgctgttggtgctgccgctgcctcctcctcctccgccgccgccgccgccgccgccgcctcctccggctcttcgctcggcccctctccgcctccatgtgccggatagcgggagcgctgcggaccctgctgccgctgctggcggccctgcttcaggcgtctgtagaggcttctggtgaaatcgcattatgcaagactggatttcctgaagatgtttacagtgcagtcttatcgaaggatgtgcatgaaggacagcctcttctcaatgtgaagtttagcaactgcaatggaaaaagaaaagtacaatatgagagcagtgagcctgcagattttaaggtggatgaagatggcatggtgtatgccgtgagaagctttccactctcttctgagcatgccaagttcctgatatatgcccaagacaaagagacccaggaaaagtggcaagtggcagtaaaattgagcctgaagccaaccttaactgaggagtcagtgaaggagtcagcagaagttgaagaaatagtgttcccaagacaattcagtaagcacagtggccacctacaaaggcagaagagagactgggtcatccctccaatcaacttgccagaaaactccaggggaccttttcctcaagagcttgtcaggatcaggtctgatagagataaaaacctttcactgcggtacagtgtaactgggccaggagctgaccagcctccaactggtatcttcattatcaaccccatctcgggtcagctgtcggtgacaaagcccctggatcgcgagcagatagcccggtttcatttgagggcacatgcagtagatattaatggaaatcaagtggagaaccccattgacattgtcatcaatgttattgacatgaatgacaacagacctgagttcttacaccaggtttggaatgggacagttcctgagggatcaaagcctggaacatatgtgatgaccgtaacagcaattgatgctgacgatcccaatgccctcaatgggatgttgaggtacagaatcgtgtctcaggctccaagcaccccttcacccaacatgtttacaatcaacaatgagactggtgacatcatcacagtggcagctggacttgatcgagaaaaagtgcaacagtatacgttaataattcaagctacagacatggaaggcaatcccacatatggcctttcaaacacagccacggccgtcatcacagtgacagatgtcaatgacaatcctccagagtttactgccatgacgttttatggtgaagttcctgagaacagggtagacatcatagtagctaatctaactgtgaccgataaggatcaaccccatacaccagcctggaacgcagtgtacagaatcagtggcggagatcctactggacggttcgccatccagaccgacccaaacagcaacgacgggttagtcaccgtggtcaaaccaatcgactttgaaacaaataggatgtttgtccttactgttgctgcagaaaatcaagtgccattagccaagggaattcagcacccgcctcagtcaactgcaaccgtgtctgttacagttattgacgtaaatgaaaacccttattttgcccccaatcctaagatcattcgccaagaagaagggcttcatgccggtaccatgttgacaacattcactgctcaggacccagatcgatatatgcagcaaaatattagatacactaaattatctgatcctgccaattggctaaaaatagatcctgtgaatggacaaataactacaattgctgttttggaccgagaatcaccaaatgtgaaaaacaatatatataatgctactttccttgcttctgacaatggaattcctcctatgagtggaacaggaacgctgcagatctatttacttgatattaatgacaatgcccctcaagtgttacctcaagaggcagagacttgcgaaactccagaccccaattcaattaatattacagcacttgattatgacattgatccaaatgctggaccatttgcttttgatcttcctttatctccagtgactattaagagaaattggaccatcactcggcttaatggtgattttgctcagcttaatttaaagataaaatttcttgaagctggtatctatgaagttcccatcataatcacagattcgggtaatcctcccaaatcaaatatttccatcctgcgcgtgaaggtttgccagtgtgactccaacggggactgcacagatgtggacaggattgtgggtgcggggcttggcaccggtgccatcattgccatcctgctctgcatcatcatcctgcttatccttgtgctgatgtttgtggtatggatgaaacgccgggataaagaacgccaggccaaacaacttttaattgatccagaagatgatgtaagagataatattttaaaatatgatgaagaaggtggaggagaagaagaccaggactatgacttgagccagctgcagcagcctgacactgtggagcctgatgccatcaagcctgtgggaatccgacgaatggatgaaagacccatccacgccgagccccagtatccggtccgatctgcagccccacaccctggagacattggggacttcattaatgagggccttaaagcggctgacaatgaccccacagctccaccatatgactccctgttagtgtttgactatgaaggcagtggctccactgctgggtccttgagctcccttaattcctcaagtagtggtggtgagcaggactatgattacctgaacgactgggggccacggttcaagaaacttgctgacatgtatggtggaggtgatgactgaacttcagggtgaacttggtttttggacaagtacaaacaatttcaactgatattcccaaaaagcattcagaagctaggctttaactttgtagtctactagcacagtgcttgctggaggctttggcataggctgcaaaccaatttgggctcagagggaatatcagtgatccatactgtttggaaaaacactgagctcagttacacttgaattttacagtacagaagcactgggattttatgtgcctttttgtacctttttcagattggaattagttttctgtttaaggctttaatggtactgatttctgaaacgataagtaaaagacaaaatattttgtggtgggagcagtaagttaaaccatgatatgcttcaacacgcttttgttacattgcatttgcttttattaaaatacaaaattaaacaaacaaaaaaactcatggagcgattttattatcttgggggatgagaccatgagattggaaaatgtacattacttctagttttagactttagtttgttttttttttttttcactaaaatcttaaaacttactcagctggttgcaaataaagggagttttcatatcaccaatttgtagcaaaattgaattttttcataaactagaatgttagacacattttggtcttaatccatgtacacttttttatttctgtatttttccacttcactgtaaaaatagtatgtgtacataatgttttattggcatagtctatggagaagtgcagaaacttcagaacatgtgtatgtattatttggactatggattcaggttttttgcatgtttatatctttcgttatggataaagtatttacaaaacagtgacatttgattcaattgttgagctgtagttagaatactcaatttttaatttttttaatttttttattttttattttctttttggtttggggagggagaaaagttcttagcacaaatgttttacataatttgtaccaaaaaaaaaaaaaaaggaaaggaaagaaaggggtggcctgacactggtggcactactaagtgtgtgtttttttaaaaaaaaaatggaaaaaaaaaagcttttaaactggagagacttctgacaacagctttgcctctgtattgtgtaccagaatataaatgatacacctctgaccccagcgttctgaataaaatgctaattttggatctgg

SEQ ID NO: 364988 - DNA, 3852 bp, Homo sapiens
agcagaaggaattatgggaaatggaaacttgatggcatgtttttattaaggcgttatgtgtgtatcttcactgagaaattaaagaaccaagcagaattgtatgttttcctttcagtgaagtttagcaactgcaatggaaaaagaaaagtacaatatgagagcagtgagcctgcagattttaaggtggatgaagatggcatggtgtatgccgtgagaagctttccactctcttctgagcatgccaagttcctgatatatgcccaagacaaagagacccaggaaaagtggcaagtggcagtaaaattgagcctgaagccaaccttaactgaggagtcagtgaaggagtcagcagaagttgaagaaatagtgttcccaagacaattcagtaagcacagtggccacctacaaaggcagaagagagactgggtcatccctccaatcaacttgccagaaaactccaggggaccttttcctcaagagcttgtcaggatcaggtctgatagagataaaaacctttcactgcggtacagtgtaactgggccaggagctgaccagcctccaactggtatcttcattatcaaccccatctcgggtcagctgtcggtgacaaagcccctggatcgcgagcagatagcccggtttcatttgagggcacatgcagtagatattaatggaaatcaagtggagaaccccattgacattgtcatcaatgttattgacatgaatgacaacagacctgagttcttacaccaggtttggaatgggacagttcctgagggatcaaagcctggaacatatgtgatgaccgtaacagcaattgatgctgacgatcccaatgccctcaatgggatgttgaggtacagaatcgtgtctcaggctccaagcaccccttcacccaacatgtttacaatcaacaatgagactggtgacatcatcacagtggcagctggacttgatcgagaaaaagtgcaacagtatacgttaataattcaagctacagacatggaaggcaatcccacatatggcctttcaaacacagccacggccgtcatcacagtgacagatgtcaatgacaatcctccagagtttactgccatgacgttttatggtgaagttcctgagaacagggtagacatcatagtagctaatctaactgtgaccgataaggatcaaccccatacaccagcctggaacgcagtgtacagaatcagtggcggagatcctactggacggttcgccatccagaccgacccaaacagcaacgacgggttagtcaccgtggtcaaaccaatcgactttgaaacaaataggatgtttgtccttactgttgctgcagaaaatcaagtgccattagccaagggaattcagcacccgcctcagtcaactgcaaccgtgtctgttacagttattgacgtaaatgaaaacccttattttgcccccaatcctaagatcattcgccaagaagaagggcttcatgccggtaccatgttgacaacattcactgctcaggacccagatcgatatatgcagcaaaatattagatacactaaattatctgatcctgccaattggctaaaaatagatcctgtgaatggacaaataactacaattgctgttttggaccgagaatcaccaaatgtgaaaaacaatatatataatgctactttccttgcttctgacaatggaattcctcctatgagtggaacaggaacgctgcagatctatttacttgatattaatgacaatgcccctcaagtgttacctcaagaggcagagacttgcgaaactccagaccccaattcaattaatattacagcacttgattatgacattgatccaaatgctggaccatttgcttttgatcttcctttatctccagtgactattaagagaaattggaccatcactcggcttaatggtgattttgctcagcttaatttaaagataaaatttcttgaagctggtatctatgaagttcccatcataatcacagattcgggtaatcctcccaaatcaaatatttccatcctgcgcgtgaaggtttgccagtgtgactccaacggggactgcacagatgtggacaggattgtgggtgcggggcttggcaccggtgccatcattgccatcctgctctgcatcatcatcctgcttatccttgtgctgatgtttgtggtatggatgaaacgccgggataaagaacgccaggccaaacaacttttaattgatccagaagatgatgtaagagataatattttaaaatatgatgaagaaggtggaggagaagaagaccaggactatgacttgagccagctgcagcagcctgacactgtggagcctgatgccatcaagcctgtgggaatccgacgaatggatgaaagacccatccacgccgagccccagtatccggtccgatctgcagccccacaccctggagacattggggacttcattaatgagggccttaaagcggctgacaatgaccccacagctccaccatatgactccctgttagtgtttgactatgaaggcagtggctccactgctgggtccttgagctcccttaattcctcaagtagtggtggtgagcaggactatgattacctgaacgactgggggccacggttcaagaaacttgctgacatgtatggtggaggtgatgactgaacttcagggtgaacttggtttttggacaagtacaaacaatttcaactgatattcccaaaaagcattcagaagctaggctttaactttgtagtctactagcacagtgcttgctggaggctttggcataggctgcaaaccaatttgggctcagagggaatatcagtgatccatactgtttggaaaaacactgagctcagttacacttgaattttacagtacagaagcactgggattttatgtgcctttttgtacctttttcagattggaattagttttctgtttaaggctttaatggtactgatttctgaaacgataagtaaaagacaaaatattttgtggtgggagcagtaagttaaaccatgatatgcttcaacacgcttttgttacattgcatttgcttttattaaaatacaaaattaaacaaacaaaaaaactcatggagcgattttattatcttgggggatgagaccatgagattggaaaatgtacattacttctagttttagactttagtttgttttttttttttttcactaaaatcttaaaacttactcagctggttgcaaataaagggagttttcatatcaccaatttgtagcaaaattgaattttttcataaactagaatgttagacacattttggtcttaatccatgtacacttttttatttctgtatttttccacttcactgtaaaaatagtatgtgtacataatgttttattggcatagtctatggagaagtgcagaaacttcagaacatgtgtatgtattatttggactatggattcaggttttttgcatgtttatatctttcgttatggataaagtatttacaaaacagtgacatttgattcaattgttgagctgtagttagaatactcaatttttaatttttttaatttttttattttttattttctttttggtttggggagggagaaaagttcttagcacaaatgttttacataatttgtaccaaaaaaaaaaaaaaaggaaaggaaagaaaggggtggcctgacactggtggcactactaagtgtgtgtttttttaaaaaaaaaatggaaaaaaaaaagcttttaaactggagagacttctgacaacagctttgcctctgtattgtgtaccagaatataaatgatacacctctgaccccagcgttctgaataaaatgctaattttggatctgg

SEQ ID NO: 364989 - DNA, 4316 bp, Homo sapiens
gagctccgccacgcgaggtttcgggctcgtggttttgcttcctccggccaaggtccccgccgctgcatccctcgcggcttccgctgcgctccgggccggagccgagccgcctgcgctgccacagcagccgcctccacacactcgcagacgctcacacgctctccctccctgttcccccgccccctccccagctccttgatctctgggtctgttttattactcctggtgcgagtcccgcggactccgcggcccgctatttgtcatcagctcgctctccattggcggggagcggagagcagcgaagaagggggtggggaggggaggggaagggaagggggtggaaactgcctggagccgtttctccgcgccgctgttggtgctgccgctgcctcctcctcctccgccgccgccgccgccgccgccgcctcctccggctcttcgctcggcccctctccgcctccatgtgccggatagcgggagcgctgcggaccctgctgccgctgctggcggccctgcttcaggcgtctgtagaggcttctggtgaaatcgcattatgcaagactggatttcctgaagatgtttacagtgcagtcttatcgaaggatgtgcatgaaggacagcctcttctcaatgtgaagtttagcaactgcaatggaaaaagaaaagtacaatatgagagcagtgagcctgcagattttaaggtggatgaagatggcatggtgtatgccgtgagaagctttccactctcttctgagcatgccaagttcctgatatatgcccaagacaaagagacccaggaaaagtggcaagtggcagtaaaattgagcctgaagccaaccttaactgaggagtcagtgaaggagtcagcagaagttgaagaaatagtgttcccaagacaattcagtaagcacagtggccacctacaaaggcagaagagagactgggtcatccctccaatcaacttgccagaaaactccaggggaccttttcctcaagagcttgtcaggatcaggtctgatagagataaaaacctttcactgcggtacagtgtaactgggccaggagctgaccagcctccaactggtatcttcattatcaaccccatctcgggtcagctgtcggtgacaaagcccctggatcgcgagcagatagcccggtttcatttgagggcacatgcagtagatattaatggaaatcaagtggagaaccccattgacattgtcatcaatgttattgacatgaatgacaacagacctgagttcttacaccaggtttggaatgggacagttcctgagggatcaaagcctggaacatatgtgatgaccgtaacagcaattgatgctgacgatcccaatgccctcaatgggatgttgaggtacagaatcgtgtctcaggctccaagcaccccttcacccaacatgtttacaatcaacaatgagactggtgacatcatcacagtggcagctggacttgatcgagaaaaagtgcaacagtatacgttaataattcaagctacagacatggaaggcaatcccacatatggcctttcaaacacagccacggccgtcatcacagtgacagatgtcaatgacaatcctccagagtttactgccatgacgttttatggtgaagttcctgagaacagggtagacatcatagtagctaatctaactgtgaccgataaggatcaaccccatacaccagcctggaacgcagtgtacagaatcagtggcggagatcctactggacggttcgccatccagaccgacccaaacagcaacgacgggttagtcaccgtggtcaaaccaatcgactttgaaacaaataggatgtttgtccttactgttgctgcagaaaatcaagtgccattagccaagggaattcagcacccgcctcagtcaactgcaaccgtgtctgttacagttattgacgtaaatgaaaacccttattttgcccccaatcctaagatcattcgccaagaagaagggcttcatgccggtaccatgttgacaacattcactgctcaggacccagatcgatatatgcagcaaaatattagatacactaaattatctgatcctgccaattggctaaaaatagatcctgtgaatggacaaataactacaattgctgttttggaccgagaatcaccaaatgtgaaaaacaatatatataatgctactttccttgcttctgacaatggaattcctcctatgagtggaacaggaacgctgcagatctatttacttgatattaatgacaatgcccctcaagtgttacctcaagaggcagagacttgcgaaactccagaccccaattcaattaatattacagcacttgattatgacattgatccaaatgctggaccatttgcttttgatcttcctttatctccagtgactattaagagaaattggaccatcactcggcttaatggtgattttgctcagcttaatttaaagataaaatttcttgaagctggtatctatgaagttcccatcataatcacagattcgggtaatcctcccaaatcaaatatttccatcctgcgcgtgaaggtttgccagtgtgactccaacggggactgcacagatgtggacaggattgtgggtgcggggcttggcaccggtgccatcattgccatcctgctctgcatcatcatcctgcttatccttgtgctgatgtttgtggtatggatgaaacgccgggataaagaacgccaggccaaacaacttttaattgatccagaagatgatgtaagagataatattttactgcagcagcctgacactgtggagcctgatgccatcaagcctgtgggaatccgacgaatggatgaaagacccatccacgccgagccccagtatccggtccgatctgcagccccacaccctggagacattggggacttcattaatgagggccttaaagcggctgacaatgaccccacagctccaccatatgactccctgttagtgtttgactatgaaggcagtggctccactgctgggtccttgagctcccttaattcctcaagtagtggtggtgagcaggactatgattacctgaacgactgggggccacggttcaagaaacttgctgacatgtatggtggaggtgatgactgaacttcagggtgaacttggtttttggacaagtacaaacaatttcaactgatattcccaaaaagcattcagaagctaggctttaactttgtagtctactagcacagtgcttgctggaggctttggcataggctgcaaaccaatttgggctcagagggaatatcagtgatccatactgtttggaaaaacactgagctcagttacacttgaattttacagtacagaagcactgggattttatgtgcctttttgtacctttttcagattggaattagttttctgtttaaggctttaatggtactgatttctgaaacgataagtaaaagacaaaatattttgtggtgggagcagtaagttaaaccatgatatgcttcaacacgcttttgttacattgcatttgcttttattaaaatacaaaattaaacaaacaaaaaaactcatggagcgattttattatcttgggggatgagaccatgagattggaaaatgtacattacttctagttttagactttagtttgttttttttttttttcactaaaatcttaaaacttactcagctggttgcaaataaagggagttttcatatcaccaatttgtagcaaaattgaattttttcataaactagaatgttagacacattttggtcttaatccatgtacacttttttatttctgtatttttccacttcactgtaaaaatagtatgtgtacataatgttttattggcatagtctatggagaagtgcagaaacttcagaacatgtgtatgtattatttggactatggattcaggttttttgcatgtttatatctttcgttatggataaagtatttacaaaacagtgacatttgattcaattgttgagctgtagttagaatactcaatttttaatttttttaatttttttattttttattttctttttggtttggggagggagaaaagttcttagcacaaatgttttacataatttgtaccaaaaaaaaaaaaaaaggaaaggaaagaaaggggtggcctgacactggtggcactactaagtgtgtgtttttttaaaaaaaaaatggaaaaaaaaaagcttttaaactggagagacttctgacaacagctttgcctctgtattgtgtaccagaatataaatgatacacctctgaccccagcgttctgaataaaatgctaattttggatctgg

SEQ ID NO: 364990 - DNA, 4316 bp, Homo sapiens
gagctccgccacgcgaggtttcgggctcgtggttttgcttcctccggccaaggtccccgccgctgcatccctcgcggcttccgctgcgctccgggccggagccgagccgcctgcgctgccacagcagccgcctccacacactcgcagacgctcacacgctctccctccctgttcccccgccccctccccagctccttgatctctgggtctgttttattactcctggtgcgagtcccgcggactccgcggcccgctatttgtcatcagctcgctctccattggcggggagcggagagcagcgaagaagggggtggggaggggaggggaagggaagggggtggaaactgcctggagccgtttctccgcgccgctgttggtgctgccgctgcctcctcctcctccgccgccgccgccgccgccgccgcctcctccggctcttcgctcggcccctctccgcctccatgtgccggatagcgggagcgctgcggaccctgctgccgctgctggcggccctgcttcaggcgtctgtagaggcttctggtgaaatcgcattatgcaagactggatttcctgaagatgtttacagtgcagtcttatcgaaggatgtgcatgaaggacagcctcttctcaatgtgaagtttagcaactgcaatggaaaaagaaaagtacaatatgagagcagtgagcctgcagattttaaggtggatgaagatggcatggtgtatgccgtgagaagctttccactctcttctgagcatgccaagttcctgatatatgcccaagacaaagagacccaggaaaagtggcaagtggcagtaaaattgagcctgaagccaaccttaactgaggagtcagtgaaggagtcagcagaagttgaagaaatagtgttcccaagacaattcagtaagcacagtggccacctacaaaggcagaagagagactgggtcatccctccaatcaacttgccagaaaactccaggggaccttttcctcaagagcttgtcaggatcaggtctgatagagataaaaacctttcactgcggtacagtgtaactgggccaggagctgaccagcctccaactggtatcttcattatcaaccccatctcgggtcagctgtcggtgacaaagcccctggatcgcgagcagatagcccggtttcatttgagggcacatgcagtagatattaatggaaatcaagtggagaaccccattgacattgtcatcaatgttattgacatgaatgacaacagacctgagttcttacaccaggtttggaatgggacagttcctgagggatcaaagcctggaacatatgtgatgaccgtaacagcaattgatgctgacgatcccaatgccctcaatgggatgttgaggtacagaatcgtgtctcaggctccaagcaccccttcacccaacatgtttacaatcaacaatgagactggtgacatcatcacagtggcagctggacttgatcgagaaaaagtgcaacagtatacgttaataattcaagctacagacatggaaggcaatcccacatatggcctttcaaacacagccacggccgtcatcacagtgacagatgtcaatgacaatcctccagagtttactgccatgacgttttatggtgaagttcctgagaacagggtagacatcatagtagctaatctaactgtgaccgataaggatcaaccccatacaccagcctggaacgcagtgtacagaatcagtggcggagatcctactggacggttcgccatccagaccgacccaaacagcaacgacgggttagtcaccgtggtcaaaccaatcgactttgaaacaaataggatgtttgtccttactgttgctgcagaaaatcaagtgccattagccaagggaattcagcacccgcctcagtcaactgcaaccgtgtctgttacagttattgacgtaaatgaaaacccttattttgcccccaatcctaagatcattcgccaagaagaagggcttcatgccggtaccatgttgacaacattcactgctcaggacccagatcgatatatgcagcaaaatattagatacactaaattatctgatcctgccaattggctaaaaatagatcctgtgaatggacaaataactacaattgctgttttggaccgagaatcaccaaatgtgaaaaacaatatatataatgctactttccttgcttctgacaatggaattcctcctatgagtggaacaggaacgctgcagatctatttacttgatattaatgacaatgcccctcaagtgttacctcaagaggcagagacttgcgaaactccagaccccaattcaattaatattacagcacttgattatgacattgatccaaatgctggaccatttgcttttgatcttcctttatctccagtgactattaagagaaattggaccatcactcggcttaatggtgattttgctcagcttaatttaaagataaaatttcttgaagctggtatctatgaagttcccatcataatcacagattcgggtaatcctcccaaatcaaatatttccatcctgcgcgtgaaggtttgccagtgtgactccaacggggactgcacagatgtggacaggattgtgggtgcggggcttggcaccggtgccatcattgccatcctgctctgcatcatcatcctgcttatccttgtgctgatgtttgtggtatggatgaaacgccgggataaagaacgccaggccaaacaacttttaattgatccagaagatgatgtaagagataatattttaaaatatgatgaagaaggtggaggagaagaagaccaggactatgacttgagccagctgcagcagcctgacactgtggagcctgatgccatcaagcctgtgggaatccgacgaatggatgaaagacccatccacgccgagccccagtatccggtccgatctgcagccccacaccctggagacattggggacttcattaatgagggccttaaagcggctgacaatgaccccacagctccaccatatgactccctgttagtgtttgactatgaaggcagtggctccactgctgggtccttgagctcccttaattcctcaagtagtggtggtgagcaggactatgattacctgaacgactgggggccacggttcaagaaacttgctgacatgtatggtggaggtgatgactgaacttcagggtgaacttggtttttggacaagtacaaacaatttcaactgatattcccatggaggctttggcataggctgcaaaccaatttgggctcagagggaatatcagtgatccatactgtttggaaaaacactgagctcagttacacttgaattttacagtacagaagcactgggattttatgtgcctttttgtacctttttcagattggaattagttttctgtttaaggctttaatggtactgatttctgaaacgataagtaaaagacaaaatattttgtggtgggagcagtaagttaaaccatgatatgcttcaacacgcttttgttacattgcatttgcttttattaaaatacaaaattaaacaaacaaaaaaactcatggagcgattttattatcttgggggatgagaccatgagattggaaaatgtacattacttctagttttagactttagtttgttttttttttttttcactaaaatcttaaaacttactcagctggttgcaaataaagggagttttcatatcaccaatttgtagcaaaattgaattttttcataaactagaatgttagacacattttggtcttaatccatgtacacttttttatttctgtatttttccacttcactgtaaaaatagtatgtgtacataatgttttattggcatagtctatggagaagtgcagaaacttcagaacatgtgtatgtattatttggactatggattcaggttttttgcatgtttatatctttcgttatggataaagtatttacaaaacagtgacatttgattcaattgttgagctgtagttagaatactcaatttttaatttttttaatttttttattttttattttctttttggtttggggagggagaaaagttcttagcacaaatgttttacataatttgtaccaaaaaaaaaaaaaaaggaaaggaaagaaaggggtggcctgacactggtggcactactaagtgtgtgtttttttaaaaaaaaaatggaaaaaaaaaagcttttaaactggagagacttctgacaacagctttgcctctgtattgtgtaccagaatataaatgatacacctctgaccccagcgttctgaataaaatgctaattttggatctgg

SEQ ID NO: 364991 - DNA, 3228 bp, Homo sapiens
gagctccgccacgcgaggtttcgggctcgtggttttgcttcctccggccaaggtccccgccgctgcatccctcgcggcttccgctgcgctccgggccggagccgagccgcctgcgctgccacagcagccgcctccacacactcgcagacgctcacacgctctccctccctgttcccccgccccctccccagctccttgatctctgggtctgttttattactcctggtgcgagtcccgcggactccgcggcccgctatttgtcatcagctcgctctccattggcggggagcggagagcagcgaagaagggggtggggaggggaggggaagggaagggggtggaaactgcctggagccgtttctccgcgccgctgttggtgctgccgctgcctcctcctcctccgccgccgccgccgccgccgccgcctcctccggctcttcgctcggcccctctccgcctccatgtgccggatagcgggagcgctgcggaccctgctgccgctgctggcggccctgcttcaggcgtctgtagaggcttctggtgaaatcgcattatgcaagactggatttcctgaagatgtttacagtgcagtcttatcgaaggatgtgcatgaaggacagcctcttctcaatgtgaagtttagcaactgcaatggaaaaagaaaagtacaatatgagagcagtgagcctgcagattttaaggtggatgaagatggcatggtgtatgccgtgagaagctttccactctcttctgagcatgccaagttcctgatatatgcccaagacaaagagacccaggaaaagtggcaagtggcagtaaaattgagcctgaagccaaccttaactgaggagtcagtgaaggagtcagcagaagttgaagaaatagtgttcccaagacaattcagtaagcacagtggccacctacaaaggcagaagagagactgggtcatccctccaatcaacttgccagaaaactccaggggaccttttcctcaagagcttgtcaggatcaggtctgatagagataaaaacctttcactgcggtacagtgtaactgggccaggagctgaccagcctccaactggtatcttcattatcaaccccatctcgggtcagctgtcggtgacaaagcccctggatcgcgagcagatagcccggtttcatttgagggcacatgcagtagatattaatggaaatcaagtggagaaccccattgacattgtcatcaatgttattgacatgaatgacaacagacctgagttcttacaccaggtttggaatgggacagttcctgagggatcaaagcctggaacatatgtgatgaccgtaacagcaattgatgctgacgatcccaatgccctcaatgggatgttgaggtacagaatcgtgtctcaggctccaagcaccccttcacccaacatgtttacaatcaacaatgagactggtgacatcatcacagtggcagctggacttgatcgagaaaaagtgcaacagtatacgttaataattcaagctacagacatggaaggcaatcccacatatggcctttcaaacacagccacggccgtcatcacagtgacagatgtcaatgacaatcctccagagtttactgccatgacgttttatggtgaagttcctgagaacagggtagacatcatagtagctaatctaactgtgaccgataaggatcaaccccatacaccagcctggaacgcagtgtacagaatcagtggcggagatcctactggacggttcgccatccagaccgacccaaacagcaacgacgggttagtcaccgtggtcaaaccaatcgactttgaaacaaataggatgtttgtccttactgttgctgcagaaaatcaagtgccattagccaagggaattcagcacccgcctcagtcaactgcaaccgtgtctgttacagttattgacgtaaatgaaaacccttattttgcccccaatcctaagatcattcgccaagaagaagggcttcatgccggtaccatgttgacaacattcactgctcaggacccagatcgatatatgcagcaaaatattagatacactaaattatctgatcctgccaattggctaaaaatagatcctgtgaatggacaaataactacaattgctgttttggaccgagaatcaccaaatgtgaaaaacaatatatataatgctactttccttgcttctgacaatggaattcctcctatgagtggaacaggaacgctgcagatctatttacttgatattaatgacaatgcccctcaagtgttacctcaagaggcagagacttgcgaaactccagaccccaattcaattaatattacagcacttgattatgacattgatccaaatgctggaccatttgcttttgatcttcctttatctccagtgactattaagagaaattggaccatcactcggcttaatggtgattttgctcagcttaatttaaagataaaatttcttgaagctggtatctatgaagttcccatcataatcacagattcgggtaatcctcccaaatcaaatatttccatcctgcgcgtgaaggtttgccagtgtgactccaacggggactgcacagatgtggacaggattgtgggtgcggggcttggcaccggtgccatcattgccatcctgctctgcatcatcatcctgcttatccttgtgctgatgtttgtggtatggatgaaacgccgggataaagaacgccaggccaaacaacttttaattgatccagaagatgatgtaagagataatattttaaaatatgatgaagaaggtggaggagaagaagaccaggactatgacttgagccagctgcagcagcctgacactgtggagcctgatgccatcaagcctgtgggaatccgacgaatggatgaaagacccatccacgccgagccccagtatccggtccgatctgcagccccacaccctggagacattggggacttcattaatgagaaaacctggcccatacagagcttacacctatgaccttggcttcgtgggcaccatgatctcagcaatgcatctatcatgcctgcctttggacctaatgagtatgaaccacattacatcagagaagagtgccagggtcaacaattaatattttagagttacaactacatgtgaacctatgtacttgcattttcagcaatattgcagcatagtattatttatctctaaaataaaaaatgcatgaatatattatctg

SEQ ID NO: 364992 - DNA, 1913 bp, Homo sapiens
  misc_feature (1644)..(1644): n is a, c, g, or t
gagctccgccacgcgaggtttcgggctcgtggttttgcttcctccggccaaggtccccgccgctgcatccctcgcggcttccgctgcgctccgggccggagccgagccgcctgcgctgccacagcagccgcctccacacactcgcagacgctcacacgctctccctccctgttcccccgccccctccccagctccttgatctctgggtctgttttattactcctggtgcgagtcccgcggactccgcggcccgctatttgtcatcagctcgctctccattggcggggagcggagagcagcgaagaagggggtggggaggggaggggaagggaagggggtggaaactgcctggagccgtttctccgcgccgctgttggtgctgccgctgcctcctcctcctccgccgccgccgccgccgccgccgcctcctccggctcttcgctcggcccctctccgcctccatgtgccggatagcgggagcgctgcggaccctgctgccgctgctggcggccctgcttcaggcgtctgtagaggcttctggtgaaatcgcattatgcaagactggatttcctgaagatgtttacagtgcagtcttatcgaaggatgtgcatgaaggacagcctcttctcaatgtgaagtttagcaactgcaatggaaaaagaaaagtacaatatgagagcagtgagcctgcagattttaaggtggatgaagatggcatggtgtatgccgtgagaagctttccactctcttctgagcatgccaagttcctgatatatgcccaagacaaagagacccaggaaaagtggcaagtggcagtaaaattgagcctgaagccaaccttaactgaggagtcagtgaaggagtcagcagaagttgaagaaatagtgttcccaagacaattcagtaagcacagtggccacctacaaaggcagaagagagactgggtcatccctccaatcaacttgccagaaaactccaggggaccttttcctcaagagcttgtcaggatcaggtctgatagagataaaaacctttcactgcggtacagtgtaactgggccaggagctgaccagcctccaactggtatcttcattatcaaccccatctcgggtcagctgtcggtgacaaagcccctggatcgcgagcagatagcccggtttcatttgagggcacatgcagtagatattaatggaaatcaagtggagaaccccattgacattgtcatcaatgttattgacatgaatgacaacagacctgagttcttacaccaggtttggaatgggacagttcctgagggatcaaagcctggaacatatgtgatgaccgtaacagcaattgatgctgacgatcccaatgccctcaatgggatgttgaggtacagaatcgtgtctcaggctccaagcaccccttcacccaacatgtttacaatcaacaatgagactggtgacatcatcacagtggcagctggacttgatcgagaaaaagtgcaacagtatacgttaataattcaagctacagacatggaaggcaatcccacatatggcctttcaaacacagccacggccgtcatcacagtgacagatgtcaatgacaatcctccagagtttactgccatgacggtcctttaaggcaaaactgtggagncctagaggtgtgtgtgttaaggcaggtgtctgcagcagtggccagaggggcagggcacgctaggctgggctaggagttaagagtactgtctaaccagtctggcttcttccttcttccagcagccagccctcccctcccattaaagttttactcccacatcctgaaagctcctaacttgaactttgtctaaatagtctctgagactgcatgtgaatttaatgttttttgaaaaagccttcttttttgtttggactatgtagcaatttgat

SEQ ID NO: 364993 - DNA, 748 bp, Homo sapiens
tgcttaagtaagagtgttccactcagataggctagcatgagcaaggcagaagcctgaaacagttggatgtgttccagaaactgtaagcaattgaatacaatggaaatgaagttcatttacaagaccatgatgagagaattgacttttaggctgtggccacattgttgaaggacatgtgtaacactcaaaggatgaagtttagcaactgcaatggaaaaagaaaagtacaatatgagagcagtgagcctgcagattttaaggtggatgaagatggcatggtgtatgccgtgagaagctttccactctcttctgagcatgccaagttcctgatatatgcccaagacaaagagacccaggaaaagtggcaagtggcagtaaaattgagcctgaagccaaccttaactgaggagtcagtgaaggagtcagcagaagttgaagaaatagtgttcccaagacaattcagtaagcacagtggccacctacaaaggcagaagagagactgggtcatccctccaatcaacttgccagaaaactccaggggaccttttcctcaagagcttgtcaggatcaggtctgatagagataaaaacctttcactgcggtacagtgtaactgggccaggagctgaccagcctccaactggtatcttcattatcaaccccatctcgggtcagctgtcggtgacaaagcccctggatcgcgagcagatagcccggtttcatgtaagattccaaccagctgataattc

SEQ ID NO: 364994 - DNA, 532 bp, Homo sapiens
agaggagccgagaagcgcccctcggcccccacgcagcggaggcgcggagtggcgggactgctgctctttgtgggtgcagcacgcacgacccggagcgccctccccgcggcgctgtccccggcgtcttcgtcgcgccgagcggccctggagcggggacccggaggaagcaaaaccacgagcccgaaacctcgcgtggcggagctcttggggagcgccatccgctccacttccacctccacatcctccaccggccaaggtccccgccgctgcatccctcgcggcttccgctgcgctccgggccggagccgagccgcctgcgctgccacagcagccgcctccacacactcgcagacgctcacacgctctccctccctgttcccccgccccctccccagctccttgatctctgggtctgttttattactcctggtgcgagtcccgcggactccgcggcccgctatttgtcatcagctcgctctccattggcggggagcggagagcagcgaagaagggggtggggaggggaggggaa

SEQ ID NO: 364995 - DNA, 3225 bp, Homo sapiens
  misc_feature (348)..(348): n is a, c, g, or t
  misc_feature (679)..(679): n is a, c, g, or t
caagaacgtcctagccgccagcagcatctatttcaagtccctggtcctgcacgacaacctcatcaacctggacacagacatggtcagctccacagtgttccagcagatcttggacttcatctacacaggcaagctgctgcccagcgaccagccagccgagcccaacttcagcaccctcctcactgccgccagctacctccagctgcccgagttggcagccctctgccgccgcaaactcaagcgagccggcaagccctttggctctgggagggcggggtccactggcatggggcggcccccccgcagccagcggctgtccacggcctctgtcatccaagctcggtatcnggggctcgtggatgggcgcaagggggcccacgccccccaggagctcccccaagccaaaggctcagacgatgaactctttcttggtggctctaaccaggatagcgtgcaaggtctgggccgggctgtctgcccagctggcggggaggcgggtctggggggctgcagcagcagcaccaacgggagcagcgggggctgcgagcaggagctgggcttggacctgtccaagaaaagcccacccttgccccctgccaccccaggtccccacctcactcccgatgacgcagcccagctgagcgacagccaacatggctcgccccctgcggcctctgcncctcccgttgccaacagtgcctcttattctgagctggggggcacccctgatgagcccatggatctggagggggccgaggacaaccacctgagcctgctggaggcgcctggtgggcagcctcggaagagcctccggcactccactcggaagaaggagtggggcaagaaggagcctgtggctggctccccctttgagcggagagaagcagggcccaagggtccctgcccgggagaggagggtgagggggtcggggacagggttcccaatggcatcctggctagtggggctggccctagcgggccctatggggagcccccctacccctgcaaggaggaggaggagaacggcaaggatgcaagtgaagacagtgcgcagagcgggagcgaggggggcagcggccacgccagcgcccactacatgtaccggcaggagggctacgagacggtgtcctacggggacaacttgtatgtgtgcattccctgcgccaagggcttccccagctctgagcagctcaatgcgcacgtggagactcacacggaggaagagctgttcatcaaggaagagggggcctacgagacaggcagtgggggtgccgaggaggaggccgaggacctgtcagcacccagtgcggcctacacggctgagccccggcccttcaagtgttcggtctgcgagaagacctacaaggacccagccacgctgcggcagcacgagaagacgcactggctgacacggcccttcccctgcaacatctgtggcaaaatgttcacgcagcgcggcaccatgacgcgtcacatgcggagccacctgggcctgaagcccttcgcctgcgatgagtgtggcatgcgcttcacccgtcagtaccgcctcacggagcacatgcgtgtgcactcgggcgagaaaccttacgagtgccagctgtgcgggggcaagttcacccagcagcgcaacctcatcagccacctgcgcatgcacacctccccctcctagaagccaaagacccgcgggcgccctctgccaccttgctccccgggaacccatggaaggagaagcgaggtgatgcagcagcaggggcaagaccctgggtccagtggaggctccgggtggcccctctggcccccactgcccacacccagagctttaatggacagtccgtaccaagcagagccgagaggagggaagccaggggtcccagcccgtctacctccccatcccacccaggcccccagctccccgcgggggccaccgcagggcctgtgggctgggtcacgtgggtctcgctgggacctggtccctttgttgcaggcggcttggagaaagggcagtgggacgctggccacggccagggtggtgtcgggagcaggcctcaccccgctggccgtgtctgtgtgtgtgcacgtgtgcttgtgtctgtgcgggcgcgtgcagccctggttctgcagggaaaaggtgctgggggtgcagatccctccctccttgagccagggtggcactgttcactggcgctgggacagtcagggtgaccccaccgcctacctctctacaactaaagagccctctgggcctgtgttgctgttattcctactgatctgttcctctgtttttctttttgatttttgttttttaaaccaaaacagacaatagcttattttctttccgccccctccggggctgagcctgggtctgaagactgaatgtaacaggggccgctggcactcctgcgcgtcccccggctctggcgctgcaggggtgtcggcgcgccacctctccaggccccagaagcccttcttgcccaaaggcttccctggtccctgagccctgcctcggctgcctcaggggagagtgcttttcctgtagtttccaaggaatattctttgtttagaggtacttgttttttattaagagaaaaaccagtgtaacgtttatgtgactgtttgaactggaaggtctggggttccggggggtggggggaggctagactcaatgccggggccgtcggtactcttgttttcatttgtgtgtgcgtgcgtgtgtgtgtgtgtatgtgcgtatgtgtgtgtctatgtgtggtgtgtgccgtatgcatgggcagatgtttcgctttccctccttcctcgctgaacaaggtggagacttctgaccttttgctacctcttgaattcatgacaacgatatgttgggcactggctcatttctcgcaaatacctcgaaggggaggggggagggatggggttatagctgttttgtttaattggaactggaagagggatcatgttttgttttatgcccttcccagaaggggggagggacaccgggatcgcactcctgtactggccaccgccgctgtcacttgtcacattgagttcatgtcccttgagagtttgtataaattcaggtcagagctgcagctacacagctgcccagtgtcatagaaaagcaattcaccaacgactgatctctccattcagaagtgtgcagtcttaaatgtacagcgataagaaactgttattttatgatcttttcattaaaagcttgattgaaaactc

SEQ ID NO: 364996 - DNA, 6391 bp, Homo sapiens
  misc_feature (348)..(348): n is a, c, g, or t
  misc_feature (679)..(679): n is a, c, g, or t
caagaacgtcctagccgccagcagcatctatttcaagtccctggtcctgcacgacaacctcatcaacctggacacagacatggtcagctccacagtgttccagcagatcttggacttcatctacacaggcaagctgctgcccagcgaccagccagccgagcccaacttcagcaccctcctcactgccgccagctacctccagctgcccgagttggcagccctctgccgccgcaaactcaagcgagccggcaagccctttggctctgggagggcggggtccactggcatggggcggcccccccgcagccagcggctgtccacggcctctgtcatccaagctcggtatcnggggctcgtggatgggcgcaagggggcccacgccccccaggagctcccccaagccaaaggctcagacgatgaactctttcttggtggctctaaccaggatagcgtgcaaggtctgggccgggctgtctgcccagctggcggggaggcgggtctggggggctgcagcagcagcaccaacgggagcagcgggggctgcgagcaggagctgggcttggacctgtccaagaaaagcccacccttgccccctgccaccccaggtccccacctcactcccgatgacgcagcccagctgagcgacagccaacatggctcgccccctgcggcctctgcncctcccgttgccaacagtgcctcttattctgagctggggggcacccctgatgagcccatggatctggagggggccgaggacaaccacctgagcctgctggaggcgcctggtgggcagcctcggaagagcctccggcactccactcggaagaaggagtggggcaagaaggagcctgtggctggctccccctttgagcggagagaagcagggcccaagggtccctgcccgggagaggagggtgagggggtcggggacagggttcccaatggcatcctggctagtggggctggccctagcgggccctatggggagcccccctacccctgcaaggaggaggaggagaacggcaaggatgcaagtgaagacagtgcgcagagcgggagcgaggggggcagcggccacgccagcgcccactacatgtaccggcaggagggctacgagacggtgtcctacggggacaacttgtatgtgtgcattccctgcgccaagggcttccccagctctgagcagctcaatgcgcacgtggagactcacacggaggaagagctgttcatcaaggaagagggggcctacgagacaggcagtgggggtgccgaggaggaggccgaggacctgtcagcacccagtgcggcctacacggctgagccccggcccttcaagtgttcggtctgcgagaagacctacaaggacccagccacgctgcggcagcacgagaagacgcactggctgacacggcccttcccctgcaacatctgtggcaaaatgttcacgcagcgcggcaccatgacgcgtcacatgcggagccacctgggcctgaagcccttcgcctgcgatgagtgtggcatgcgcttcacccgtcagtaccgcctcacggagcacatgcgtgtgcactcgggcgagaaaccttacgagtgccagctgtgcgggggcaagttcacccagcagcgcaacctcatcagccacctgcgcatgcacacctccccctcctagaagccaaagacccgcgggcgccctctgccaccttgctccccgggaacccatggaaggagaagcgaggtgatgcagcagcaggggcaagaccctgggtccagtggaggctccgggtggcccctctggcccccactgcccacacccagagctttaatggacagtccgtaccaagcagagccgagaggagggaagccaggggtcccagcccgtctacctccccatcccacccaggcccccagctccccgcgggggccaccgcagggcctgtgggctgggtcacgtgggtctcgctgggacctggtccctttgttgcaggcggcttggagaaagggcagtgggacgctggccacggccagggtggtgtcgggagcaggcctcaccccgctggccgtgtctgtgtgtgtgcacgtgtgcttgtgtctgtgcgggcgcgtgcagccctggttctgcagggaaaaggtgctgggggtgcagatccctccctccttgagccagggtggcactgttcactggcgctgggacagtcagggtgaccccaccgcctacctctctacaactaaagagccctctgggcctgtgttgctgttattcctactgatctgttcctctgtttttctttttgatttttgttttttaaaccaaaacagacaatagcttattttctttccgccccctccggggctgagcctgggtctgaagactgaatgtaacaggggccgctggcactcctgcgcgtcccccggctctggcgctgcaggggtgtcggcgcgccacctctccaggccccagaagcccttcttgcccaaaggcttccctggtccctgagccctgcctcggctgcctcaggggagagtgcttttcctgtagtttccaaggaatattctttgtttagaggtacttgttttttattaagagaaaaaccagtgtaacgtttatgtgactgtttgaactggaaggtctggggttccggggggtggggggaggctagactcaatgccggggccgtcggtactcttgttttcatttgtgtgtgcgtgcgtgtgtgtgtgtgtatgtgcgtatgtgtgtgtctatgtgtggtgtgtgccgtatgcatgggcagatgtttcgctttccctccttcctcgctgaacaaggtggagacttctgaccttttgctacctcttgaattcatgacaacgatatgttggtgactggcagtggaagcccttgacactcttgttttccttcgcttagcacctaggaagtcgtgtgcaggagccagcagggcgccaagtggcccagtgcctgcagctcacctgtgggttttccctttgagcctttggccacatccacctcgaggggaccctggcaccccgggcacacaaacctctgtggtataggtgaggggtgtgaggccccagcctggagccaggcactgggtgctgacaggggaaccatgaggagggtggcaggtctttgcagctcccggccagggtgaggcggaagtgagccctcatcctgccactcctatcctccattcctgcaagagttttaagcttgagagagctgaccacagggccccccggggaacagggatggcacttccctgagcagtcctggcccccggccactgtctcggggcccacctctcgcccctcatcttggtaattagccagcctcagatacttctgtgggccctgaagtgggctctcaaggtcagaccaaggttgctgatctcagtcccactgtcttcagccagctgaagctgtggggctgggctggcagcctttattgtcatcttgcttcaccatttttttttctctctcttttcattctattttaagtttagaccaaaaaaatacagagtcatcccctacccccacccctctagagaccctccagctaaaaacagagcctgagttcagggacccaagtggtgagcggcgtcttttgggggtgagggagcttgggtagatgaggctcctggctgagccctccctgtggtgatcccagcctaagatggcccctcttccctcctggtgggagacagaggactggaccctgggtctcaggttccagcaagtcaggctagggacctggggggaggagacccatggacttcacccatactcagtgagggggctcctgccgtcctgacgccaccccgccccatcagcacttaagccacatgacacaaagtctgtaccgcacgggaaatgttcacgcgcctggccgtgtgcatggcctcccgggctgtgggcagccgcatctgtgaggtgactcgtgaaagtaggtgattcctttgcagaacttcagggactgggagcagaggcccctcactcaacgacgtttgtgcgacatagtattgtatccaccttagtattgtatcgagccttttctgtgttttaatgagaaagcagaacactagtttcctatttaagactttaagggtttgtggggcggggcgggattaacacaacatttggctttgttttctttttcctttgatttccacatcaggtgtgtgcgagtgtgtgtgtgtggagatgttaagagcctcacaaggaaactgggttattggaggccaaggcggcttacagttctctgcgttcgtcacttaattcctgaatgtttcagagaaacaggaatcagaaaatagcagatatcatgtaggaaagagaggataaacaaagaaaaaagaaaaaaaaataagctcatacccaaattcacaaagcctattttttaaaccaaagcacattttgaatgagtatggaacctccatgggctcagaaaaaagatgctaatatatttatctcattgtttacataagcttttacagtttcagacctcagcagctgtaaggccagtccagggaaccctcccctgctgctggaaacccttctgagttggccctggagtggctcacgggcagagaagggtagccctggggctgggggagggattggaagcctccctggagtcacctgagccctcgtccccattcccagggcccctccaagcccagctggcaccaaagagcttgggcccgtgctgaccagcccccaaggccctctggccggaccatgctggtcctgaccagctagcctacgcggggatggccgtcagttctggccacaggacccgagtctgggcttgggtccccctgctgctctgcccgtgacccttggggatgggttgatgcgagggtcccactcaagccaaaaagccgggacctttgcgcagctctgtcgactctggtgggtccccactcctggggccccctaaccccaccccaggcagcggaaggggctgactgggtctggtccttaccaacatagacggtgcaaacactcttaacagtgttgtttttgtatcaatatgtttgtgcagtgatgaatgtatttatttctcagacttggggcgagtgagcgggtggcaggccgggctccgccactgcatgctcccgccggaccgagccccagcaagggctcctccaggattgcaaaaaaaaaggaagagaaaagatgaacctttaagcaaataagaatctcagagactcgcagcatagccatacacctcagcctgtgaaatgaacgatccggaccctcaccaactttccccacctcaggcagccctgtgtgtttaccgttcatcaccactcgggggcaccgggccgcccacccactcccaaaatccgtcagtattcactggacctcaggccctgtgcaggagtgcgatccgggctgggccgctgggcaggctgaccccctgccctcctgcggccatcctgagttggggtgaggcctgggcagccggagggcagggctcagggagcaggaggctgcatccgtccacccccaggcgtgggggacaaaagccaaaggtgccaggccttagagcagacaagggctctcagccctggcatgccccctaaagggaccaaggtcctcctatttcccagaaccccgttggggcagatgttactgaacctgtgaatcagacgccaggagtgagggctggggagggacctaactggagcctcagtctgacattccacgccggggtgggggtgggcatgagcggtgggaactgaggctgcccaggacccccttcctaggatgccccggcttcagtcaccccactttaactttctaccaggaccccctccccctacctcaccttgctatttattgctgtaatttattgacctcaaaaatgctgcataacagacctcactggggcagggaggatccccagggctcccaccctccacttggcgggccccgtggggccaggtgctgaggggagcctctctaccccacccatcactagcttccctctgccctctcccaccccgggggggacccaggttgggcactggctcatttctcgcaaatacctcgaaggggaggggggagggatggggttatagctgttttgtttaattggaactggaagagggatcatgttttgttttatgcccttcccagaaggggggagggacaccgggatcgcactcctgtactggccaccgccgctgtcacttgtcacattgagttcatgtcccttgagagtttgtataaattcaggtcagagctgcagctacacagctgcccagtgtcatagaaaagcaattcaccaacgactgatctctccattcagaagtgtgcagtcttaaatgtacagcgataagaaactgttattttatgatcttttcattaaaagcttgattgaaaactc

SEQ ID NO: 364997 - DNA, 5579 bp, Homo sapiens
  misc_feature (348)..(348): n is a, c, g, or t
  misc_feature (679)..(679): n is a, c, g, or t
caagaacgtcctagccgccagcagcatctatttcaagtccctggtcctgcacgacaacctcatcaacctggacacagacatggtcagctccacagtgttccagcagatcttggacttcatctacacaggcaagctgctgcccagcgaccagccagccgagcccaacttcagcaccctcctcactgccgccagctacctccagctgcccgagttggcagccctctgccgccgcaaactcaagcgagccggcaagccctttggctctgggagggcggggtccactggcatggggcggcccccccgcagccagcggctgtccacggcctctgtcatccaagctcggtatcnggggctcgtggatgggcgcaagggggcccacgccccccaggagctcccccaagccaaaggctcagacgatgaactctttcttggtggctctaaccaggatagcgtgcaaggtctgggccgggctgtctgcccagctggcggggaggcgggtctggggggctgcagcagcagcaccaacgggagcagcgggggctgcgagcaggagctgggcttggacctgtccaagaaaagcccacccttgccccctgccaccccaggtccccacctcactcccgatgacgcagcccagctgagcgacagccaacatggctcgccccctgcggcctctgcncctcccgttgccaacagtgcctcttattctgagctggggggcacccctgatgagcccatggatctggagggggccgaggacaaccacctgagcctgctggaggcgcctggtgggcagcctcggaagagcctccggcactccactcggaagaaggagtggggcaagaaggagcctgtggctggctccccctttgagcggagagaagcagggcccaagggtccctgcccgggagaggagggtgagggggtcggggacagggttcccaatggcatcctggctagtggggctggccctagcgggccctatggggagcccccctacccctgcaaggaggaggaggagaacggcaaggatgcaagtgaagacagtgcgcagagcgggagcgaggggggcagcggccacgccagcgcccactacatgtaccggcaggagggctacgagacggtgtcctacggggacaacttgtatgtgtgcattccctgcgccaagggcttccccagctctgagcagctcaatgcgcacgtggagactcacacggaggaagagctgttcatcaaggaagagggggcctacgagacaggcagtgggggtgccgaggaggaggccgaggacctgtcagcacccagtgcggcctacacggctgagccccggcccttcaagtgttcggtctgcgagaagacctacaaggacccagccacgctgcggcagcacgagaagacgcactggctgacacggcccttcccctgcaacatctgtggcaaaatgttcacgcagcgcggcaccatgacgcgtcacatgcggagccacctgggcctgaagcccttcgcctgcgatgagtgtggcatgcgcttcacccgtcagtaccgcctcacggagcacatgcgtgtgcactcgggcgagaaaccttacgagtgccagctgtgcgggggcaagttcacccagcagcgcaacctcatcagccacctgcgcatgcacacctccccctcctagaagccaaagacccgcgggcgccctctgccaccttgctccccgggaacccatggaaggagaagcgaggtgatgcagcagcaggggcaagaccctgggtccagtggaggctccgggtggcccctctggcccccactgcccacacccagagctttaatggacagtccgtaccaagcagagccgagaggagggaagccaggggtcccagcccgtctacctccccatcccacccaggcccccagctccccgcgggggccaccgcagggcctgtgggctgggtcacgtgggtctcgctgggacctggtccctttgttgcaggcggcttggagaaagggcagtgggacgctggccacggccagggtggtgtcgggagcaggcctcaccccgctggccgtgtctgtgtgtgtgcacgtgtgcttgtgtctgtgcgggcgcgtgcagccctggttctgcagggaaaaggtgctgggggtgcagatccctccctccttgagccagggtggcactgttcactggcgctgggacagtcagggtgaccccaccgcctacctctctacaactaaagagccctctgggcctgtgttgctgttattcctactgatctgttcctctgtttttctttttgatttttgttttttaaaccaaaacagacaatagcttattttctttccgccccctccggggctgagcctgggtctgaagactgaatgtaacaggggccgctggcactcctgcgcgtcccccggctctggcgctgcaggggtgtcggcgcgccacctctccaggccccagaagcccttcttgcccaaaggcttccctggtccctgagccctgcctcggctgcctcaggggagagtgcttttcctgtagtttccaaggaatattctttgtttagaggtacttgttttttattaagagaaaaaccagtgtaacgtttatgtgactgtttgaactggaaggtctggggttccggggggtggggggaggctagactcaatgccggggccgtcggtactcttgttttcatttgtgtgtgcgtgcgtgtgtgtgtgtgtatgtgcgtatgtgtgtgtctatgtgtggtgtgtgccgtatgcatgggcagatgtttcgctttccctccttcctcgctgaacaaggtggagacttctgaccttttgctacctcttgaattcatgacaacgatatgttggtgactggcagtggaagcccttgacactcttgttttccttcgcttagcacctaggaagtcgtgtgcaggagccagcagggcgccaagtggcccagtgcctgcagctcacctgtgggttttccctttgagcctttggccacatccacctcgaggggaccctggcaccccgggcacacaaacctctgtggtataggtgaggggtgtgaggccccagcctggagccaggcactgggtgctgacaggggaaccatgaggagggtggcaggtctttgcagctcccggccagggtgaggcggaagtgagccctcatcctgccactcctatcctccattcctgcaagagttttaagcttgagagagctgaccacagggccccccggggaacagggatggcacttccctgagcagtcctggcccccggccactgtctcggggcccacctctcgcccctcatcttggtaattagccagcctcagatacttctgtgggccctgaagtgggctctcaaggtcagaccaaggttgctgatctcagtcccactgtcttcagccagctgaagctgtggggctgggctggcagcctttattgtcatcttgcttcaccatttttttttctctctcttttcattctattttaagtttagaccaaaaaaatacagagtcatcccctacccccacccctctagagaccctccagctaaaaacagagcctgagttcagggacccaagtggtgagcggcgtcttttgggggtgagggagcttgggtagatgaggctcctggctgagccctccctgtggtgatcccagcctaagatggcccctcttccctcctggtgggagacagaggactggaccctgggtctcaggttccagcaagtcaggctagggacctggggggaggagacccatggacttcacccatactcagtgagggggctcctgccgtcctgacgccaccccgccccatcagcacttaagccacatgacacaaagtctgtaccgcacgggaaatgttcacgcgcctggccgtgtgcatggcctcccgggctgtgggcagccgcatctgtgaggtgactcgtgaaagtaggtgattcctttgcagaacttcagggactgggagcagaggcccctcactcaacgacgtttgtgcgacatagtattgtatccaccttagtattgtatcgagccttttctgtgttttaatgagaaagcagaacactagtttcctatttaagactttaagggtttgtggggcggggcgggattaacacaacatttggctttgttttctttttcctttgatttccacatcaggtgtgtgcgagtgtgtgtgtgtggagatgttaagagcctcacaaggaaactgggttattggaggccaaggcggcttacagttctctgcgttcgtcacttaattcctgaatgtttcagagaaacaggaatcagaaaatagcagatatcatgtaggaaagagaggataaacaaagaaaaaagaaaaaaaaataagctcatacccaaattcacaaagcctattttttaaaccaaagcacattttgaatgagtatggaacctccatgggctcagaaaaaagatgctaatatatttatctcattgtttacataagcttttacagtttcagacctcagcagctgtaaggccagtccagggaaccctcccctgctgctggaaacccttctgagttggccctggagtggctcacgggcagagaagggtagccctggggctgggggagggattggaagcctccctggagtcacctgagccctcgtccccattcccagggcccctccaagcccagctggcaccaaagagcttgggcccgtgctgaccagcccccaaggccctctggccggaccatgctggtcctgaccagctagcctacgcggggatggccgtcagttctggccacaggacccgagtctgggcttgggtccccctgctgctctgcccgtgacccttggggatgggttgatgcgagggtcccactcaagccaaaaagccgggacctttgcgcagctctgtcgactctggtgggtccccactcctggggccccctaaccccaccccaggcagcggaaggggctgactgggtctggtccttaccaacatagacggtgcaaacactcttaacagtgttgtttttgtatcaatatgtttgtgcagtgatgaatgtatttatttctcagacttggggcgagtgagcgggtggcaggccgggctccgccactgcatgctcccgccggaccgagccccagcaagggctcctccaggattgcaaaaaaaaaggaagagaaaagatgaacctttaagcaaataagaatctcagagactcgcagcatagccatacacctcagcctgtgaaatgaacgatccggaccctcaccaactttccccacctcaggcagccctgtgtgtttaccgttcatcaccactcgggggcaccgggccgcccacccactcccaaaatccgtcagtattcactggactggccaccgccgctgtcacttgtcacattgagttcatgtcccttgagagtttgtataaattcaggtcagagctgcagctacacagctgcccagtgtcatagaaaagcaattcaccaacgactgatctctccattcagaagtgtgcagtcttaaatgtacagcgataagaaactgttattttatgatcttttcattaaaagcttgattgaaaactc

SEQ ID NO: 364998 - DNA, 3741 bp, Homo sapiens
tcatgatagccgcgattttatggagaggcggtcttgttttcatttgtgtgtgcgtgcgtgtgtgtgtgtgtatgtgcgtatgtgtgtgtctatgtgtggtgtgtgccgtatgcatgggcagatgtttcgctttccctccttcctcgctgaacaaggtggagacttctgaccttttgctacctcttgaattcatgacaacgatatgttggtgactggcagtggaagcccttgacactcttgttttccttcgcttagcacctaggaagtcgtgtgcaggagccagcagggcgccaagtggcccagtgcctgcagctcacctgtgggttttccctttgagcctttggccacatccacctcgaggggaccctggcaccccgggcacacaaacctctgtggtataggtgaggggtgtgaggccccagcctggagccaggcactgggtgctgacaggggaaccatgaggagggtggcaggtctttgcagctcccggccagggtgaggcggaagtgagccctcatcctgccactcctatcctccattcctgcaagagttttaagcttgagagagctgaccacagggccccccggggaacagggatggcacttccctgagcagtcctggcccccggccactgtctcggggcccacctctcgcccctcatcttggtaattagccagcctcagatacttctgtgggccctgaagtgggctctcaaggtcagaccaaggttgctgatctcagtcccactgtcttcagccagctgaagctgtggggctgggctggcagcctttattgtcatcttgcttcaccatttttttttctctctcttttcattctattttaagtttagaccaaaaaaatacagagtcatcccctacccccacccctctagagaccctccagctaaaaacagagcctgagttcagggacccaagtggtgagcggcgtcttttgggggtgagggagcttgggtagatgaggctcctggctgagccctccctgtggtgatcccagcctaagatggcccctcttccctcctggtgggagacagaggactggaccctgggtctcaggttccagcaagtcaggctagggacctggggggaggagacccatggacttcacccatactcagtgagggggctcctgccgtcctgacgccaccccgccccatcagcacttaagccacatgacacaaagtctgtaccgcacgggaaatgttcacgcgcctggccgtgtgcatggcctcccgggctgtgggcagccgcatctgtgaggtgactcgtgaaagtaggtgattcctttgcagaacttcagggactgggagcagaggcccctcactcaacgacgtttgtgcgacatagtattgtatccaccttagtattgtatcgagccttttctgtgttttaatgagaaagcagaacactagtttcctatttaagactttaagggtttgtggggcggggcgggattaacacaacatttggctttgttttctttttcctttgatttccacatcaggtgtgtgcgagtgtgtgtgtgtggagatgttaagagcctcacaaggaaactgggttattggaggccaaggcggcttacagttctctgcgttcgtcacttaattcctgaatgtttcagagaaacaggaatcagaaaatagcagatatcatgtaggaaagagaggataaacaaagaaaaaagaaaaaaaaataagctcatacccaaattcacaaagcctattttttaaaccaaagcacattttgaatgagtatggaacctccatgggctcagaaaaaagatgctaatatatttatctcattgtttacataagcttttacagtttcagacctcagcagctgtaaggccagtccagggaaccctcccctgctgctggaaacccttctgagttggccctggagtggctcacgggcagagaagggtagccctggggctgggggagggattggaagcctccctggagtcacctgagccctcgtccccattcccagggcccctccaagcccagctggcaccaaagagcttgggcccgtgctgaccagcccccaaggccctctggccggaccatgctggtcctgaccagctagcctacgcggggatggccgtcagttctggccacaggacccgagtctgggcttgggtccccctgctgctctgcccgtgacccttggggatgggttgatgcgagggtcccactcaagccaaaaagccgggacctttgcgcagctctgtcgactctggtgggtccccactcctggggccccctaaccccaccccaggcagcggaaggggctgactgggtctggtccttaccaacatagacggtgcaaacactcttaacagtgttgtttttgtatcaatatgtttgtgcagtgatgaatgtatttatttctcagacttggggcgagtgagcgggtggcaggccgggctccgccactgcatgctcccgccggaccgagccccagcaagggctcctccaggattgcaaaaaaaaaggaagagaaaagatgaacctttaagcaaataagaatctcagagactcgcagcatagccatacacctcagcctgtgaaatgaacgatccggaccctcaccaactttccccacctcaggcagccctgtgtgtttaccgttcatcaccactcgggggcaccgggccgcccacccactcccaaaatccgtcagtattcactggacctcaggccctgtgcaggagtgcgatccgggctgggccgctgggcaggctgaccccctgccctcctgcggccatcctgagttggggtgaggcctgggcagccggagggcagggctcagggagcaggaggctgcatccgtccacccccaggcgtgggggacaaaagccaaaggtgccaggccttagagcagacaagggctctcagccctggcatgccccctaaagggaccaaggtcctcctatttcccagaaccccgttggggcagatgttactgaacctgtgaatcagacgccaggagtgagggctggggagggacctaactggagcctcagtctgacattccacgccggggtgggggtgggcatgagcggtgggaactgaggctgcccaggacccccttcctaggatgccccggcttcagtcaccccactttaactttctaccaggaccccctccccctacctcaccttgctatttattgctgtaatttattgacctcaaaaatgctgcataacagacctcactggggcagggaggatccccagggctcccaccctccacttggcgggccccgtggggccaggtgctgaggggagcctctctaccccacccatcactagcttccctctgccctctcccaccccgggggggacccaggttgggcactggctcatttctcgcaaatacctcgaaggggaggggggagggatggggttatagctgttttgtttaattggaactggaagagggatcatgttttgttttatgcccttcccagaaggggggagggacaccgggatcgcactcctgtactggccaccgccgctgtcacttgtcacattgagttcatgtcccttgagagtttgtataaattcaggtcagagctgcagctacacagctgcccagtgtcatagaaaagcaattcaccaacgactgatctctccattcagaagtgtgcagtcttaaatgtacagcgataagaaactgttattttatgatcttttcattaaaagcttgattgaaaactc

SEQ ID NO: 364999 - DNA, 838 bp, Homo sapiens
  misc_feature (1)..(1): n is a, c, g, or t
ncacttgttgtgccgggcggcggggcctggccccaatacaaaaaacaaaacaaaaaattttacggtgacccgttggacataccagatggtcgaagagctccacttcctgctcattaccggagcagtagtactcgcagcattgacactcagactccttctgtccaggagcgcagcagtagctgcagcagtcattcaccctgtgtctcccctttttgtcccccggaatcccaggatggtagcccttgctcaacagaagatttgctctatgatcgtgataaagacagtgggagtagctcaccgttacccaagtatgcttcatctcccaaaccaaacaacagctacatgttcaaacgggagcccccagagggatgtgagcgagtgaaggtctttgaggaaatggcgtctcgtcagcctatctcggcccctctcttttcatgtcctgacaaaaacaaggttaatttcatcccaaccggatcagctttctgtcctgtaaaacttctaggccccctcttacctgcttctgaccttatgctcaagaactcccctaactctggccagagctcagctttggcaactctgaccgttgagcagctctcatcccgggtttcctttacgtctctttctgatgacaccagcacagcgggctccatggaggcctctgtccagcagccatcccagcagcagcagctcctgcaggaactgcagggtgaggaccacatctctgctcagaactatgtgatcatctaaaaaagggggagctggcctccaccctatgttccatggattcggaacaagatttcagacatctgcatgagtgacaaactttctgaacaccacc

SEQ ID NO: 365000 - DNA, 312 bp, Homo sapiens
aagcttgcggccgcagccccggccgagcaggcgccgcgggccaagggccgcccgagacggtccccagagagccaccggaggagcagctcacctgagagacggagccccggctcgcccgtgtgcagaggtagcgagcccaaccctcccgtcctcccgggctgcgtctccccgacggtgccctccgtggaaacttcagcctcttcgggcttctctttgctagtgcattatcgaaggtgtgaaagtggctttgggaatctcacccccctgcggtcgctgtggggcttggaggagcgaactgaaaagcgactttta

SEQ ID NO: 365001 - DNA, 2246 bp, Homo sapiens
atcagcaggattcccggcggtgggacttgaccccggaagtggggtgtgaagctccggtgctggtgcggcgggggactgcggggccagcctcaggtagcagcagcagcagcagcagcagcagcagcagcagcagcagcagcagcagcaatgtttcacttcttcagaaagcctccggaatctaaaaagccctcagtaccagagacagaagcagatggattcgtccttttaggagatacaacagatgagcaaagaatgacagcaagaggcaaaacttcggacatagaggccaaccaacctttggagaccaacaaagaaaattcatccagtgtgactgtatcagaccctgagatggaaaataaggcaggccagactctggagaacagctcattaatggccgagctcctgagcgatgtgccgttcaccctggccccgcatgtgctggcagtacagggcaccatcactgaccttcccgaccacttactctcctatgatggcagcgaaaacttatcacggttttggtatgatttcactcttgaaaattcagtgctctgtgattcataacctttatgtctgtttgcaccttaacagctttaaaatatgttcgcctattttatctaacctgtttgatgttctttgccgtttcactgtttaaggtcctcagcaaggatcataaagcaaagaaaatagcattatgttcactactctatttttaagaaaaaggtacatttgtatacaaattgaacttaagttctacttcctttctcccatataataaatatacaaattaggctatgaaggttttaggaaaggactcgattccttcagatggtctctcaaaatataacacctcaaatttatcttagaagaactgtgaaaaagaattgtggcatttttcagtcactacagctccgaagtctgagcaagaagtgggtgtgaagtctcctctctggtttgtaggaagttgaattggtgttattcctgcatttttttcttccacagtgtttatgaatgaattcagaaaaaaagttgccagttagcttaatttcttcagatgcattgatgtggaaatttaaaacttgtcctaaacagcagtgctagtttgctgatacaaggatgctagacctgctctgcgtgctctttctggagtggcccatttcggttttctgaaacccatggcagccctttccatcgtgaataatcgttgtgttcccacctttgttctctgcctttttgctacttcagtgtgctctctgaccagctttccaaagaactttccctgcttctgcctcggttgccatttgctctccttaccacatatgttcccagtttatgaagagatccacatttcctttcaacccctctgcctcctgaagaaaaacatctcatgatgatacatattattgctgataacacccttatttagaaatttgttggccacaatacagatggaaatgttttactgctggaaaaactgaaatcaactcatttccaattagagtataggcagaacacctagatatgacttttagttcttgaatatccattacttactttaatgaaaacagaactgccattggtcaataaactgtaaagggaagaggtaaattgtgatagagaattttctatgtcatgggaaattgaaatcacatttattttgattaccagcaatatgatttgttaactctgtgccaagttttaagtatattttttcacaaagatagagtgccatagtgaaactaaacactgtgcataaaggtacatgaattattccagttttaaagtattatgcatgtttgtttaataaatgtggcatggttttaatacaaatgctatgttatttaaaagttagaggaacatttctattgacaaaaatatgcttcatttacatataatgttaccatatggtgttaatgattaaattagatctttacatagttcttacaaagcatcagtctaggaaatatgacttattactgatgcaaacgtgaacattttgtagtagttttgtaaaagaacatccttttcaaatatctgtgttaatgtacccttgaaattaaatgcaagcacatagtcagtttgtctaattttgtgtgaaattttgtcgaaaatacctaaacatttcatctatatttgtgcctaccatgttataaatgttcataagtaccttcatgtgtctataaaaaatgttatatttaaataaatgtgaattaaaataaaatttttgattattttcagatccagaaaaa

SEQ ID NO: 365002 - DNA, 2761 bp, Homo sapiens
ttcaggcttttgccacttgttggctgagggtcgatttactcccttagctgcgtcactctactttctccactttctccacctgtaagaagagagattgatccgattacttctaagacgttttttagcccaacctggccacactgcggaggcgccggttctttcaccccgctaacccctccgtgttggcagccaatagaagcacttaaggatgggtaacggggaagaaccactggccagtactaggggagacaagcttaaatcgttgttagaccccgagctagggttccccgagctagggttctcccttctgaggcgtgttttccccatctgcaaaacgaagggttaggcggaatgatttgcaaggtcccagttgactctgacttttggccatatgtttgactcaacagtttaaaccccctcagcagtctttctgtcgttgccctccacactgcgagactctggagggcgatctggaggtctggaagataaccgattcctgggagatttgggggtagtctccaatctgtccctggctcatcttgtgacccgaagccggcggccttgccaggagtattctagaatgagtgcacataaaaataccttcaaacggtacagcagcagcagcagcagcagcagcagcagcagcagcagcagcagcagcaatgtttcacttcttcagaaagcctccggaatctaaaaagccctcagtaccagagacagaagcagatggattcgtccttttaggagatacaacagatgagcaaagaatgacagcaagaggcaaaacttcggacatagaggccaaccaacctttggagaccaacaaagaaaattcatccagtgtgactgtatcagaccctgagatggaaaataaggcaggccagactctggagaacagctcattaatggccgagctcctgagcgatgtgccgttcaccctggccccgcatgtgctggcagtacagggcaccatcactgaccttcccgaccacttactctcctatgatggcagcgaaaacttatcacggttttggtatgatttcactcttgaaaattcagtgctctgtgattcataacctttatgtctgtttgcaccttaacagctttaaaatatgttcgcctattttatctaacctgtttgatgttctttgccgtttcactgtttaaggtcctcagcaaggatcataaagcaaagaaaatagcattatgttcactactctatttttaagaaaaaggtacatttgtatacaaattgaacttaagttctacttcctttctcccatataataaatatacaaattaggctatgaaggttttaggaaaggactcgattccttcagatggtctctcaaaatataacacctcaaatttatcttagaagaactgtgaaaaagaattgtggcatttttcagtcactacagctccgaagtctgagcaagaagtgggtgtgaagtctcctctctggtttgtaggaagttgaattggtgttattcctgcatttttttcttccacagtgtttatgaatgaattcagaaaaaaagttgccagttagcttaatttcttcagatgcattgatgtggaaatttaaaacttgtcctaaacagcagtgctagtttgctgatacaaggatgctagacctgctctgcgtgctctttctggagtggcccatttcggttttctgaaacccatggcagccctttccatcgtgaataatcgttgtgttcccacctttgttctctgcctttttgctacttcagtgtgctctctgaccagctttccaaagaactttccctgcttctgcctcggttgccatttgctctccttaccacatatgttcccagtttatgaagagatccacatttcctttcaacccctctgcctcctgaagaaaaacatctcatgatgatacatattattgctgataacacccttatttagaaatttgttggccacaatacagatggaaatgttttactgctggaaaaactgaaatcaactcatttccaattagagtataggcagaacacctagatatgacttttagttcttgaatatccattacttactttaatgaaaacagaactgccattggtcaataaactgtaaagggaagaggtaaattgtgatagagaattttctatgtcatgggaaattgaaatcacatttattttgattaccagcaatatgatttgttaactctgtgccaagttttaagtatattttttcacaaagatagagtgccatagtgaaactaaacactgtgcataaaggtacatgaattattccagttttaaagtattatgcatgtttgtttaataaatgtggcatggttttaatacaaatgctatgttatttaaaagttagaggaacatttctattgacaaaaatatgcttcatttacatataatgttaccatatggtgttaatgattaaattagatctttacatagttcttacaaagcatcagtctaggaaatatgacttattactgatgcaaacgtgaacattttgtagtagttttgtaaaagaacatccttttcaaatatctgtgttaatgtacccttgaaattaaatgcaagcacatagtcagtttgtctaattttgtgtgaaattttgtcgaaaatacctaaacatttcatctatatttgtgcctaccatgttataaatgttcataagtaccttcatgtgtctataaaaaatgttatatttaaataaatgtgaattaaaataaaatttttgattattttcagatccagaaaaa

SEQ ID NO: 365003 - DNA, 2412 bp, Homo sapiens
atcagcaggattcccggcggtgggacttgaccccggaagtggggtgtgaagctccggtgctggtgcggcgggggactgcggggccagcctcaggtagcagcagcagcagcagcagcagcagcagcagcagcagcagcagcagcagcaatgtttcacttcttcagaaagcctccggaatctaaaaagccctcagtaccagagacagaagcagatggattcgtccttttaggagatacaacagatgagcaaagaatgacagcaagaggcaaaacttcggacatagaggccaaccaacctttggagaccaacaaagaaaattcatccagtgtgactgtatcagaccctgagatggaaaataaggcaggccagactctggagaacagctcattaatggccgagctcctgagcgatgtgccgttcaccctggccccgcatgtgctggcagtacagggcaccatcactgaccttcccgaccacttactctcctatgatggcagcgaaaacttatcacggttttggtatgatttcactcttgaaaattcagtgctctgtgattcataacctttatgtctgtttgcaccttaacagctttaaaatatgttcgcctattttatctaacctgtttgatgttctttgccgtttcactgtttaaggtcctcagcaaggatcataaagcaaagaaaatagcattatgttcactactctatttttaagaaaaaggtacatttgtatacaaattgaacttaagttctacttcctttctcccatataataaatatacaaattaggctatgaaggttttaggaaaggactcgattccttcagatggtctctcaaaatataacacctcaaatttatcttagaagaactgtgaaaaagaattgtggcatttttcagtcactacagctccgaagtctgagcaagaagtgggtgtgaagtctcctctctggtttgtaggaagttgaattggtgttattcctgcatttttttcttccacagtgtttatgaatgaattcagaaaaaaagttgccagttagcttaatttcttcagatgcattgatgtggaaatttaaaacttgtcctaaacagcagtgctagtttgctgatacaaggatgctagacctgctctgcgtgctctttctggagtggcccatttcggttttctgaaacccatggcagccctttccatcgtgaataatcgttgtgttcccacctttgttctctgcctttttgctacttcagtgtgctctctgaccagctttccaaagaactttccctgcttctgcctcggttgccatttgctctccttaccacatatgttcccagtttatgaagagatccacatttcctttcaacccctctgcctcctgaagaaaaacatctcatgatgatacatattattgctgataacacccttatttagaaatttgttggccacaatacagatggaaatgttttactgctggaaaaactgaaatcaactcatttccaattagagtataggcagaacacctagatatgacttttagttcttgaatatccattacttactttaatgaaaacagaactgccattggtcaataaactgtaaagggaagaggtaaattgtgatagagaattttctatgtcatgggaaattgaaatcacatttattttgattaccagcaatatgatttgttaactctgtgccaagttttaagtatattttttcacaaagatagagtgccatagtgaaactaaacactgtgcataaaggtacatgaattattccagttttaaagtattatgcatgtttgtttaataaatgtggcatggttttaatacaaatgctatgttatttaaaagttagaggaacatttctattgacaaaaatatgcttcatttacatataatgttaccatatggtgttaatgattaaattagatctttacatagttcttacaaagcatcagtctaggaaatatgacttattactgatgcaaacgtgaacattttgtagtagttttgtaaaagaacatccttttcaaatatctgtgttaatgtacccttgaaattaaatgcaagcacatagtcagtttgtctaattttgtgtgaaattttgtcgaaaatacctaaacatttcatctatatttgtgcctaccatgttataaatgttcataagtaccttcatgtgtctataaaaaatgttatatttaaataaatgtgaattaaaataaaatttttgattattttcagatccagaaaaaaaaaaaaaaagaagaaaaaaaaagagaaaaaaaaaagaaaaaaaaagaaaaaaaaataaaaagaggggggtaataaggagaaagagatatgagagaaagaaaagggggaaagagaaaagttagagtgggaacaaaaaatttggtgtgaagaacataggaagagaga

SEQ ID NO: 365004 - DNA, 2192 bp, Homo sapiens
atcagcaggattcccggcggtgggacttgaccccggaagtggggtgtgaagctccggtgctggtgcggcgggggactgcggggccagcctcaggtagcagcagcagcagcagcagcagcagcagcagcagcagcagcagcagcagcaatgtttcacttcttcagaaagcctccggaatctaaaaagccctcagtaccagagacagaagcagatggattcgtccttttaggagatacaacagatgagcaaagaatgacagcaagaggcaaaacttcggacatagaggccaaccaacctttggagaccaacaaagaaaattcatccagtgtgactgtatcagaccctgagatggaaaataaggcaggccagactctggagaacagctcattaatggccgagctcctgagcgatgtgccgttcaccctggccccgcatgtgctggcagtacagggcaccatcactgaccttcccgaccacttactctcctatgatggcagcgaaaacttatcacggttttggtatgatttcactcttgaaaattcagtgctctgtgattcataacctttatgtctgtttgcaccttaacagctttaaaatatgttcgcctattttatctaacctgtttgatgttctttgccgtttcactgtttaaggtcctcagcaaggatcataaagcaaagaaaatagcattatgttcactactctatttttaagaaaaaggtacatttgtatacaaattgaacttaagttctacttcctttctcccatataataaatatacaaattaggctatgaaggttttaggaaaggactcgattccttcagatggtctctcaaaatataacacctcaaatttatcttagaagaactgtgaaaaagaattgtggcatttttcagtcactacagctccgaagtctgagcaagaagtgggtgtgaagtctcctctctggtttgtaggaagttgaattggtgttattcctgcatttttttcttccacagtgtttatgaatgaattcagaaaaaaagttgccagttagcttaatttcttcagatgcattgatgtggaaatttaaaacttgtcctaaacagcagtgctagtttgctgatacaaggatgctagacctgctctgcgtgctctttctggagtggcccatttcggttttctgaaacccatggcagccctttccatcgtgaataatcgttgtgttcccacctttgttctctgcctttttgctacttcagtgtgctctctgaccagctttccaaagaactttccctgcttctgcctcggttgccatttgctctccttaccacatatgttcccagtttatgaagagatccacatttcctttcaacccctctgcctcctgaagaaaaacatctcatgatgatacatattattgctgataacacccttatttagaaatttgttggccacaatacagatggaaatgttttactgctggaaattttagttcttgaatatccattacttactttaatgaaaacagaactgccattggtcaataaactgtaaagggaagaggtaaattgtgatagagaattttctatgtcatgggaaattgaaatcacatttattttgattaccagcaatatgatttgttaactctgtgccaagttttaagtatattttttcacaaagatagagtgccatagtgaaactaaacactgtgcataaaggtacatgaattattccagttttaaagtattatgcatgtttgtttaataaatgtggcatggttttaatacaaatgctatgttatttaaaagttagaggaacatttctattgacaaaaatatgcttcatttacatataatgttaccatatggtgttaatgattaaattagatctttacatagttcttacaaagcatcagtctaggaaatatgacttattactgatgcaaacgtgaacattttgtagtagttttgtaaaagaacatccttttcaaatatctgtgttaatgtacccttgaaattaaatgcaagcacatagtcagtttgtctaattttgtgtgaaattttgtcgaaaatacctaaacatttcatctatatttgtgcctaccatgttataaatgttcataagtaccttcatgtgtctataaaaaatgttatatttaaataaatgtgaattaaaataaaatttttgattattttcagatccagaaaaa

SEQ ID NO: 365005 - DNA, 1405 bp, Homo sapiens
aagcttgcggccgcagccccggccgagcaggcgccgcgggccaagggccgcccgagacggtccccagagagccaccggaggagcagctcacctgagagacggagccccggctcgcccgtgtgcagagcggacaaggcaaaatctcagcaagttcggacctctagtacaataaggcgaacctcctctttggatacaataacaggaccttacctcacaggacagtggccacgggatcctcatgttcactacccttcatgcatgaaagacaaagctactcagacacctagctgttgggcagaagagggtgcagaaaagaggtcacatcagcgttctgcgtcatgggggagtgctgatcaactaaaagagcagatcgccaaactgaggcagcaactacaacgcagtaaacagagtagtcgtcacagtaaggagaaagatcgccagtcacctcttcatggcaaccatataacaatcagtcacactcaggctactggatcaaggtcagttcctatgccactgtcaaatatatcagtgccaaaatcatctgtttcgcgtgtgccctgcaatgtagaaggaataagtcctgaattagaaaaggtattcattaaagaaaataatgggaaggaagaagtatccaagccgttggacataccagatggtcgaagagctccacttcctgctcattaccggagcagtagtactcgcagcattgacactcagactccttctgtccaggagcgcagcagtagctgcagcagtcattcaccctgtgtctcccctttttgtcccccggaatcccaggatggtagcccttgctcaacagaagatttgctctatgatcgtgataaagacagtgggagtagctcaccgttacccaagtatgcttcatctcccaaaccaaacaacagctacatgttcaaacgggagcccccagagggatgtgagcgagtgaaggtctttgaggaaatggcgtctcgtcagcctatctcggcccctctcttttcatgtcctgacaaaaacaaggttaatttcatcccaaccggatcagctttctgtcctgtaaaacttctaggccccctcttacctgcttctgaccttatgctcaagaactcccctaactctggccagagctcagctttggcaactctgaccgttgagcagctctcatcccgggtttcctttacgtctctttctgatgacaccagcacagcgggctccatggaggcctctgtccagcagccatcccagcagcagcagctcctgcaggaactgcagggtgaggaccacatctctgctcagaactatgtgatcatctaaaaaagggggagctggcctccaccctatgttccatggattcggaacaagatttcagacatctgcatgagtgacaaactttctgaacaccacc

SEQ ID NO: 365006 - DNA, 2238 bp, Homo sapiens
ttcaggcttttgccacttgttggctgagggtcgatttactcccttagctgcgtcactctactttctccactttctccacctgtaagaagagagattgatccgattacttctaagacgttttttagcccaacctggccacactgcggaggcgccggttctttcaccccgctaacccctccgtgttggcagccaatagaagcacttaaggatgggtaacggggaagaaccactggccagtactaggggagacaagcttaaatcgttgttagaccccgagctagggttccccgagctagggttctcccttctgaggcgtgttttccccatctgcaaaacgaagggttaggcggaatgatttgcaaggtcccagttgactctgacttttggccatatgtttgactcaacagtttaaaccccctcagcagtctttctgtcgttgccctccacactgcgagactctggagggcgatctggaggtctggaagataaccgattcctgggagatttgggggtagtctccaatctgtccctggctcatcttgtgacccgaagccggcggccttgccaggagtattctagaatgagtgcacataaaaataccttcaaacggtacagcagcagcagcagcagcagcagcagcagcagcagcagcagcagcagcaatgtttcacttcttcagaaagcctccggaatctaaaaagccctcagtaccagagacagaagcagatggattcgtccttttaggagatacaacagatgagcaaagaatgacagcaagaggcaaaacttcggacatagaggccaaccaacctttggagacggagtcttgcactggcacccaggctggagtgcagtggcgcaatctcggctcactgcaagctccgcctcccgggttcacgccatgctcctgcctcagcctcccgagtagctgggactacaggcgcccgccaccatggccagcggacaaggcaaaatctcagcaagttcggacctctagtacaataaggcgaacctcctctttggatacaataacaggaccttacctcacaggacagtggccacgggatcctcatgttcactacccttcatgcatgaaagacaaagctactcagacacctagctgttgggcagaagagggtgcagaaaagaggtcacatcagcgttctgcgtcatgggggagtgctgatcaactaaaagagcagatcgccaaactgaggcagcaactacaacgcagtaaacagagtagtcgtcacagtaaggagaaagatcgccagtcacctcttcatggcaaccatataacaatcagtcacactcaggctactggatcaaggtcagttcctatgccactgtcaaatatatcagtgccaaaatcatctgtttcgcgtgtgccctgcaatgtagaaggaataagtcctgaattagaaaaggtattcattaaagaaaataatgggaaggaagaagtatccaagccgttggacataccagatggtcgaagagctccacttcctgctcattaccggagcagtagtactcgcagcattgacactcagactccttctgtccaggagcgcagcagtagctgcagcagtcattcaccctgtgtctcccctttttgtcccccggaatcccaggatggtagcccttgctcaacagaagatttgctctatgatcgtgataaagacagtgggagtagctcaccgttacccaagtatgcttcatctcccaaaccaaacaacagctacatgttcaaacgggagcccccagagggatgtgagcgagtgaaggtctttgaggaaatggcgtctcgtcagcctatctcggcccctctcttttcatgtcctgacaaaaacaaggttaatttcatcccaaccggatcagctttctgtcctgtaaaacttctaggccccctcttacctgcttctgaccttatgctcaagaactcccctaactctggccagagctcagctttggcaactctgaccgttgagcagctctcatcccgggtttcctttacgtctctttctgatgacaccagcacagcgggctccatggaggcctctgtccagcagccatcccagcagcagcagctcctgcaggaactgcagggtgaggaccacatctctgctcagaactatgtgatcatctaaaaaagggggagctggcctccaccctatgttccatggattcggaacaagatttcagacatctgcatgagtgacaaactttctgaacaccacc

SEQ ID NO: 365007 - DNA, 1504 bp, Homo sapiens
tatgtttattgcggcactattcacaatagcaaagacttggaaccaacccaaatgtccatcagtgatagactggattaagaaaatgtggcatatatacaccatggaatactatgcagccataaaaaagaatgagttcatgacctttgcaaggatgtggatgaagctggaaaccatcattctgagcaaattatcgcaaggaccaaacactgcatgtcctcactcatagcggacaaggcaaaatctcagcaagttcggacctctagtacaataaggcgaacctcctctttggatacaataacaggaccttacctcacaggacagtggccacgggatcctcatgttcactacccttcatgcatgaaagacaaagctactcagacacctagctgttgggcagaagagggtgcagaaaagaggtcacatcagcgttctgcgtcatgggggagtgctgatcaactaaaagagcagatcgccaaactgaggcagcaactacaacgcagtaaacagagtagtcgtcacagtaaggagaaagatcgccagtcacctcttcatggcaaccatataacaatcagtcacactcaggctactggatcaaggtcagttcctatgccactgtcaaatatatcagtgccaaaatcatctgtttcgcgtgtgccctgcaatgtagaaggaataagtcctgaattagaaaaggtattcattaaagaaaataatgggaaggaagaagtatccaagccgttggacataccagatggtcgaagagctccacttcctgctcattaccggagcagtagtactcgcagcattgacactcagactccttctgtccaggagcgcagcagtagctgcagcagtcattcaccctgtgtctcccctttttgtcccccggaatcccaggatggtagcccttgctcaacagaagatttgctctatgatcgtgataaagacagtgggagtagctcaccgttacccaagtatgcttcatctcccaaaccaaacaacagctacatgttcaaacgggagcccccagagggatgtgagcgagtgaaggtctttgaggaaatggcgtctcgtcagcctatctcggcccctctcttttcatgtcctgacaaaaacaaggttaatttcatcccaaccggatcagctttctgtcctgtaaaacttctaggccccctcttacctgcttctgaccttatgctcaagaactcccctaactctggccagagctcagctttggcaactctgaccgttgagcagctctcatcccgggtttcctttacgtctctttctgatgacaccagcacagcgggctccatggaggcctctgtccagcagccatcccagcagcagcagctcctgcaggaactgcagggtgaggaccacatctctgctcagaactatgtgatcatctaaaaaagggggagctggcctccaccctatgttccatggattcggaacaagatttcagacatctgcatgagtgacaaactttctgaacaccacc

SEQ ID NO: 365008 - DNA, 666 bp, Homo sapiens
aagcttgcggccgcagccccggccgagcaggcgccgcgggccaagggccgcccgagacggtccccagagagccaccggaggagcagctcacctgagagacggagccccggctcgcccgtgtgcagagcggacaaggcaaaatctcagcaagttcggacctctagtacaataaggcgaacctcctctttggatacaataacaggaccttacctcacaggacagtggccacgggatcctcatgttcactacccttcatgcatgaaagacaaagctactcagacacctagctgttgggcagaagagggtgcagaaaagaggtcacatcagcgttctgcgtcatgggggagtgctgatcaactaaaagagagacaaggtctcattatgttgcccagactggtctcgaactcctgggctcaagcagtcctcccgcctcagcctcccaaagtgctggaatcacaagtatgagccaccacacgcagctgcagctgatgatttaagccagtgctcatttgccattctgaaaatcctggggatcttaaaaattatgctatgtctattgtgcttgtactttataaagtggaagaacaaagcctggatgatatagcacatctatttacaacatggtttactgaatattttaagcccactatggggacatactgctca

SEQ ID NO: 365009 - DNA, 1141 bp, Homo sapiens
ttcaggcttttgccacttgttggctgagggtcgatttactcccttagctgcgtcactctactttctccactttctccacctgtaagaagagagattgatccgattacttctaagacgttttttagcccaacctggccacactgcggaggcgccggttctttcaccccgctaacccctccgtgttggcagccaatagaagcacttaaggatgggtaacggggaagaaccactggccagtactaggggagacaagcttaaatcgttgttagaccccgagctagggttccccgagctagggttctcccttctgaggcgtgttttccccatctgcaaaacgaagggttaggcggaatgatttgcaaggtcccagttgactctgacttttggccatatgtttgactcaacagtttaaaccccctcagcagtctttctgtcgttgccctccacactgcgagactctggagggcgatctggaggtctggaagataaccgattcctgggagatttgggggtagtctccaatctgtccctggctcatcttgtgacccgaagccggcggccttgccaggagtattctagaatgagtgcacataaaaataccttcaaacggtacagcagcagcagcagcagcagcagcagcagcagcagcagcagcagcagcaatgtttcacttcttcagaaagcctccggaatctaaaaagccctcagtaccagagacagaagcagatggattcgtccttttaggagatacaacagatgagcaaagaatgacagcaagaggcaaaacttcggacatagaggccaaccaacctttggagtatgctttctcgtctgaacacacaaggaagaaaagaaggatggctcctgtacgtgaaagtgacccctgcatatagtgcctgaaatcagaggaagcttgtcagtgtgggcagacaccacgagcagaccaatttgacattgtgcttctcttttaacctcttgaaaattaatgaaagttatccgatgaagatccttacattaattgctcccgattaaggtttaaaaccttggtttactgtggggtaaatttatgtttttgatagtcatccaaaatctttgtacgctttcagtttcattacagaataaaaaacaaatttaccacaat

SEQ ID NO: 365010 - DNA, 826 bp, Homo sapiens
atcagcaggattcccggcggtgggacttgaccccggaagtggggtgtgaagctccggtgctggtgcggcgggggactgcggggccagcctcaggtagtttaaaccccctcagcagtctttctgtcgttgccctccacactgcgagactctggagggcgatctggaggtctggaagataaccgattcctgggagatttgggggtagtctccaatctgtccctggctcatcttgtgacccgaagccggcggccttgccaggagtattctagaatgagtgcacataaaaataccttcaaacggtacagcagcagcagcagcagcagcagcagcagcagcagcagcagcagcagcaatgtttcacttcttcagaaagcctccggaatctaaaaagccctcagtaccagagacagaagcagatggattcgtccttttagatggaatcaagttaagatgaggtcatactcattggagtgggccctcctccttcactgactgatgtccttataagaagagggaaatttggacacagggagacacagaggagaaatggccatgtgagagaggcagagatcgaaatgatgccaccacaagccaagggacaccaaggattgcaagaaaccaccagagctaggaagaggcaaggaaggattctgccctagagacttcagagagagcttagccctactgacaacttgattgacgatttctagtctccagaaatgtgacagaataaatttctgttgtgttaagccaccacgtttgtaccattttgctatggcagctttaggaaactaatacagtatgtgaatctctttttctgtcattt

SEQ ID NO: 365011 - DNA, 472 bp, Homo sapiens
cgattcctgggagatttgggggtagtctccaatctgtccctggctcatcttgtgacccgaagccggcggccttgccaggagtattctagaatgagtgcacataaaaataccttcaaacggtacggtggaaattggacagaagttttaattgggtattataacgttgtggaaactgagtctgtgaattggcccaaagctacagaattgtcatcgttcaaattcccttaagcaaaaaagatccgatttgagacttcacgtggcaatttaagattggaatctcatgtacgataattaaatgatagtctcccttagtgtttccttagcacttaataggtttgtcttagttttactcactaacggtactttaaaggatttcattaaacagatgtagaatgtgtgtcagtggtgtataaaaaagttgtggttgtattggtgcaagtcagtaaagtctattttatattacagctttaag

SEQ ID NO: 365012 - DNA, 521 bp, Homo sapiens
aagcttgcggccgcagccccggccgagcaggcgccgcgggccaagggccgcccgagacggtccccagagagccaccggaggagcagctcacctgagagacggagccccggctcgcccgtgtgcagagcggacaaggcaaaatctcagcaagttcggacctctagtacaataaggcgaacctcctctttggatacaataacaggaccttacctcacaggacagtggccacgggatcctcatgttcactacccttcatgcatgaaagacaaagctactcagacacctagctgttgggcagaagagggtgcagaaaagaggtcacatcagcgttctgcgtcatgggggagtgctgatcaactaaaagaggtaagttatttctgttttccgtctgtaacctgttttggtcctagtagattaccttagtatttcctgaatgtaatgacacttttaaaatttatcctaaccttacctctttcagtaaggttaggacaaattctagggtaaggttagaataaattcta

SEQ ID NO: 365013 - DNA, 467 bp, Homo sapiens
aagcttgcggccgcagccccggccgagcaggcgccgcgggccaagggccgcccgagacggtccccagagagccaccggaggagcagctcacctgagagacggagccccggctcgcccgtgtgcagagcggacaaggcaaaatctcagcaagttcggacctctagtacaataaggcgaacctcctctttggatacaataacaggaccttacctcacaggacagtggccacgggatcctcatgttcactacccttcatgcatgaaagacaaagctactcaggtaaaatcaggaaatcaaaatcagcttattaccctgcacttcttctgttttgatcacagtaaagaaaatgtaatataatcaaatttccccaaatttgaaatacatccaaccaaggaagaaaggaaaaatccattgttttaaataaactttgcagtaattgttttttgtcatctggcttttagaagttt

SEQ ID NO: 365014 - DNA, 2451 bp, Homo sapiens
atcagcaggattcccggcggtgggacttgaccccggaagtggggtgtgaagctccggtgctggtgcggcgggggactgcggggccagcctcaggtagtttaaaccccctcagcagtctttctgtcgttgccctccacactgcgagactctggagggcgatctggaggtctggaagataaccgattcctgggagatttgggggtagtctccaatctgtccctggctcatcttgtgacccgaagccggcggccttgccaggagtattctagaatgagtgcacataaaaataccttcaaacggtacagcagcagcagcagcagcagcagcagcagcagcagcagcagcagcagcaatgtttcacttcttcagaaagcctccggaatctaaaaagccctcagtaccagagacagaagcagatggattcgtccttttaggagatacaacagatgagcaaagaatgacagcaagaggcaaaacttcggacatagaggccaaccaacctttggagaccaacaaagaaaattcatccagtgtgactgtatcagaccctgagatggaaaataaggcaggccagactctggagaacagctcattaatggccgagctcctgagcgatgtgccgttcaccctggccccgcatgtgctggcagtacagggcaccatcactgaccttcccgaccacttactctcctatgatggcagcgaaaacttatcacggttttggtatgatttcactcttgaaaattcagtgctctgtgattcataacctttatgtctgtttgcaccttaacagctttaaaatatgttcgcctattttatctaacctgtttgatgttctttgccgtttcactgtttaaggtcctcagcaaggatcataaagcaaagaaaatagcattatgttcactactctatttttaagaaaaaggtacatttgtatacaaattgaacttaagttctacttcctttctcccatataataaatatacaaattaggctatgaaggttttaggaaaggactcgattccttcagatggtctctcaaaatataacacctcaaatttatcttagaagaactgtgaaaaagaattgtggcatttttcagtcactacagctccgaagtctgagcaagaagtgggtgtgaagtctcctctctggtttgtaggaagttgaattggtgttattcctgcatttttttcttccacagtgtttatgaatgaattcagaaaaaaagttgccagttagcttaatttcttcagatgcattgatgtggaaatttaaaacttgtcctaaacagcagtgctagtttgctgatacaaggatgctagacctgctctgcgtgctctttctggagtggcccatttcggttttctgaaacccatggcagccctttccatcgtgaataatcgttgtgttcccacctttgttctctgcctttttgctacttcagtgtgctctctgaccagctttccaaagaactttccctgcttctgcctcggttgccatttgctctccttaccacatatgttcccagtttatgaagagatccacatttcctttcaacccctctgcctcctgaagaaaaacatctcatgatgatacatattattgctgataacacccttatttagaaatttgttggccacaatacagatggaaatgttttactgctggaaaaactgaaatcaactcatttccaattagagtataggcagaacacctagatatgacttttagttcttgaatatccattacttactttaatgaaaacagaactgccattggtcaataaactgtaaagggaagaggtaaattgtgatagagaattttctatgtcatgggaaattgaaatcacatttattttgattaccagcaatatgatttgttaactctgtgccaagttttaagtatattttttcacaaagatagagtgccatagtgaaactaaacactgtgcataaaggtacatgaattattccagttttaaagtattatgcatgtttgtttaataaatgtggcatggttttaatacaaatgctatgttatttaaaagttagaggaacatttctattgacaaaaatatgcttcatttacatataatgttaccatatggtgttaatgattaaattagatctttacatagttcttacaaagcatcagtctaggaaatatgacttattactgatgcaaacgtgaacattttgtagtagttttgtaaaagaacatccttttcaaatatctgtgttaatgtacccttgaaattaaatgcaagcacatagtcagtttgtctaattttgtgtgaaattttgtcgaaaatacctaaacatttcatctatatttgtgcctaccatgttataaatgttcataagtaccttcatgtgtctataaaaaatgttatatttaaataaatgtgaattaaaataaaatttttgattattttcagatccagaaaaa

SEQ ID NO: 365015 - DNA, 2368 bp, Homo sapiens
cagctggtaccggccctgaggttatggatcggaagctggggtgtgaagctccgtgtgctggatgctgcgcggggactgctcgggccagcctcagtgctagcacgcacgcagacagcagcagcagcagcagcagcagcagcagcagcagcagcagcagcagcaatgtttcacttcttcagaaagcctccggaatctaaaaagccctcagtaccagagacagaagcagatggattcgtccttttagaagcatctcagaggctctccagtgacgtgctgttaaaagtgctgaccctgggtcagaccctttgggttggcttcgtggctccacgacttactctctacccttggcaggagatacaacagatgagcaaagaatgacagcaagaggcaaaacttcggacatagaggccaaccaacctttggagaccaacaaagaaaattcatccagtgtgactgtatcagaccctgagatggaaaataaggcaggccagactctggagaacagctcattaatggccgagctcctgagcgatgtgccgttcaccctggccccgcatgtgctggcagtacagggcaccatcactgaccttcccgaccacttactctcctatgatggcagcgaaaacttatcacggttttggtatgatttcactcttgaaaattcagtgctctgtgattcataacctttatgtctgtttgcaccttaacagctttaaaatatgttcgcctattttatctaacctgtttgatgttctttgccgtttcactgtttaaggtcctcagcaaggatcataaagcaaagaaaatagcattatgttcactactctatttttaagaaaaaggtacatttgtatacaaattgaacttaagttctacttcctttctcccatataataaatatacaaattaggctatgaaggttttaggaaaggactcgattccttcagatggtctctcaaaatataacacctcaaatttatcttagaagaactgtgaaaaagaattgtggcatttttcagtcactacagctccgaagtctgagcaagaagtgggtgtgaagtctcctctctggtttgtaggaagttgaattggtgttattcctgcatttttttcttccacagtgtttatgaatgaattcagaaaaaaagttgccagttagcttaatttcttcagatgcattgatgtggaaatttaaaacttgtcctaaacagcagtgctagtttgctgatacaaggatgctagacctgctctgcgtgctctttctggagtggcccatttcggttttctgaaacccatggcagccctttccatcgtgaataatcgttgtgttcccacctttgttctctgcctttttgctacttcagtgtgctctctgaccagctttccaaagaactttccctgcttctgcctcggttgccatttgctctccttaccacatatgttcccagtttatgaagagatccacatttcctttcaacccctctgcctcctgaagaaaaacatctcatgatgatacatattattgctgataacacccttatttagaaatttgttggccacaatacagatggaaatgttttactgctggaaaaactgaaatcaactcatttccaattagagtataggcagaacacctagatatgacttttagttcttgaatatccattacttactttaatgaaaacagaactgccattggtcaataaactgtaaagggaagaggtaaattgtgatagagaattttctatgtcatgggaaattgaaatcacatttattttgattaccagcaatatgatttgttaactctgtgccaagttttaagtatattttttcacaaagatagagtgccatagtgaaactaaacactgtgcataaaggtacatgaattattccagttttaaagtattatgcatgtttgtttaataaatgtggcatggttttaatacaaatgctatgttatttaaaagttagaggaacatttctattgacaaaaatatgcttcatttacatataatgttaccatatggtgttaatgattaaattagatctttacatagttcttacaaagcatcagtctaggaaatatgacttattactgatgcaaacgtgaacattttgtagtagttttgtaaaagaacatccttttcaaatatctgtgttaatgtacccttgaaattaaatgcaagcacatagtcagtttgtctaattttgtgtgaaattttgtcgaaaatacctaaacatttcatctatatttgtgcctaccatgttataaatgttcataagtaccttcatgtgtctataaaaaatgttatatttaaataaatgtgaattaaaataaaatttttgattattttcagatccagaaaaa

SEQ ID NO: 365016 - DNA, 2246 bp, Homo sapiens
  misc_feature (1688)..(1688): n is a, c, g, or t
  misc_feature (1691)..(1691): n is a, c, g, or t
  misc_feature (1693)..(1693): n is a, c, g, or t
  misc_feature (1747)..(1747): n is a, c, g, or t
  misc_feature (1751)..(1751): n is a, c, g, or t
  misc_feature (1765)..(1766): n is a, c, g, or t
  misc_feature (1774)..(1774): n is a, c, g, or t
  misc_feature (1800)..(1800): n is a, c, g, or t
  misc_feature (1812)..(1812): n is a, c, g, or t
  misc_feature (1823)..(1823): n is a, c, g, or t
atcagcaggattcccggcggtgggacttgaccccggaagtggggtgtgaagctccggtgctggtgcggcgggggactgcggggccagcctcaggtagcagcagcagcagcagcagcagcagcagcagcagcagcagcagcagcagcaatgtttcacttcttcagaaagcctccggaatctaaaaagccctcagtaccagagacagaagcagatggattcgtccttttaggagatacaacagatgagcaaagaatgacagcaagaggcaaaacttcggacatagaggccaaccaacctttggagaccaacaaagaaaattcatccagtgtgactgtatcagaccctgagatggaaaataaggcaggccagactctggagaacagctcattaatggccgagctcctgagcgatgtgccgttcaccctggccccgcatgtgctggcagtacagggcaccatcactgaccttcccgaccacttactctcctatgatggcagcgaaaacttatcacggttttggtatgatttcactcttgaaaattcagtgctctgtgattcataacctttatgtctgtttgcaccttaacagctttaaaatatgttcgcctattttatctaacctgtttgatgttctttgccgtttcactgtttaaggtcctcagcaaggatcataaagcaaagaaaatagcattatgttcactactctatttttaagaaaaaggtacatttgtatacaaattgaacttaagttctacttcctttctcccatataataaatatacaaattaggctatgaaggttttaggaaaggactcgattccttcagatggtctctcaaaatataacacctcaaatttatcttagaagaactgtgaaaaagaattgtggcatttttcagtcactacagctccgaagtctgagcaagaagtgggtgtgaagtctcctctctggtttgtaggaagttgaattggtgttattcctgcatttttttcttccacagtgtttatgaatgaattcagaaaaaaagttgccagttagcttaatttcttcagatgcattgatgtggaaatttaaaacttgtcctaaacagcagtgctagtttgctgatacaaggatgctagacctgctctgcgtgctctttctggagtggcccatttcggttttctgaaacccatggcagccctttccatcgtgaataatcgttgtgttcccacctttgttctctgcctttttgctacttcagtgtgctctctgaccagctttccaaagaactttccctgcttctgcctcggttgccatttgctctccttaccacatatgttcccagtttatgaagagatccacatttcctttcaacccctctgcctcctgaagaaaaacatctcatgatgatacatattattgctgataacacccttatttagaaatttgttggccacaatacagatggaaatgttttactgctggaaaaactgaaatcaactcatttccaattagagtataggcagaacacctagatatgacttttagttcttgaatatccattacttactttaatgaaaacagaactgccattggtcaataaactgtaaagggaagaggtaaattgtgatagagaattttctatgtcatgggaaattgaaatcacatccatcccgaacaccagcaacacgacccgtcaaccccgcnccnanccccaagcacacccccccacaaagacagagcgccacagcgaaaccaaacaccgngcanaaagggacaggaannaccccagngggaaagtattaggcagggggggggnagaaaggggggnggggggtaagncaaaggcgatgtgagggaaaagggagaggaacatttctattgacaaaaatatgcttcatttacatataatgttaccatatggtgttaatgattaaattagatctttacatagttcttacaaagcatcagtctaggaaatatgacttattactgatgcaaacgtgaacattttgtagtagttttgtaaaagaacatccttttcaaatatctgtgttaatgtacccttgaaattaaatgcaagcacatagtcagtttgtctaattttgtgtgaaattttgtcgaaaatacctaaacatttcatctatatttgtgcctaccatgttataaatgttcataagtaccttcatgtgtctataaaaaatgttatatttaaataaatgtgaattaaaataaaatttttgattattttcagatccagaaaaa

SEQ ID NO: 365017 - DNA, 1252 bp, Homo sapiens
aagcttgcggccgcagccccggccgagcaggcgccgcgggccaagggccgcccgagacggtccccagagagccaccggaggagcagctcacctgagagacggagccccggctcgcccgtgtgcagagcggacaaggcaaaatctcagcaagttcggacctctagtacaataaggcgaacctcctctttggatacaataacaggaccttacctcacaggacagtggccacgggatcctcatgttcactacccttcatgcatgaaagacaaagctactcagacacctagctgttgggcagaagagggtgcagaaaagaggtcacatcagcgttctgcgtcatgggggagtgctgatcaactaaaagagcagatcgccaaactgaggcagcaactacaacgcagtaaacagagtagtcgtcacagtaaggagaaagatcgccagtcacctcttcatggcaaccatataacaatcagtcacactcagccgttggacataccagatggtcgaagagctccacttcctgctcattaccggagcagtagtactcgcagcattgacactcagactccttctgtccaggagcgcagcagtagctgcagcagtcattcaccctgtgtctcccctttttgtcccccggaatcccaggatggtagcccttgctcaacagaagatttgctctatgatcgtgataaagacagtgggagtagctcaccgttacccaagtatgcttcatctcccaaaccaaacaacagctacatgttcaaacgggagcccccagagggatgtgagcgagtgaaggtctttgaggaaatggcgtctcgtcagcctatctcggcccctctcttttcatgtcctgacaaaaacaaggttaatttcatcccaaccggatcagctttctgtcctgtaaaacttctaggccccctcttacctgcttctgaccttatgctcaagaactcccctaactctggccagagctcagctttggcaactctgaccgttgagcagctctcatcccgggtttcctttacgtctctttctgatgacaccagcacagcgggctccatggaggcctctgtccagcagccatcccagcagcagcagctcctgcaggaactgcagggtgaggaccacatctctgctcagaactatgtgatcatctaaaaaagggggagctggcctccaccctatgttccatggattcggaacaagatttcagacatctgcatgagtgacaaactttctgaacaccacc

SEQ ID NO: 365018 - DNA, 1581 bp, Homo sapiens
atcagcaggattcccggcggtgggacttgaccccggaagtggggtgtgaagctccggtgctggtgcggcgggggactgcggggccagcctcaggtagcagcagcagcagcagcagcagcagcagcagcagcagcagcagcagcagcaatgtttcacttcttcagaaagcctccggaatctaaaaagccctcagtaccagagacagaagcagatggattcgtccttttaggagatacaacagatgagcaaagaatgacagcaagaggcaaaacttcggacatagaggccaaccaacctttggagcggacaaggcaaaatctcagcaagttcggacctctagtacaataaggcgaacctcctctttggatacaataacaggaccttacctcacaggacagtggccacgggatcctcatgttcactacccttcatgcatgaaagacaaagctactcagacacctagctgttgggcagaagagggtgcagaaaagaggtcacatcagcgttctgcgtcatgggggagtgctgatcaactaaaagagcagatcgccaaactgaggcagcaactacaacgcagtaaacagagtagtcgtcacagtaaggagaaagatcgccagtcacctcttcatggcaaccatataacaatcagtcacactcaggctactggatcaaggtcagttcctatgccactgtcaaatatatcagtgccaaaatcatctgtttcgcgtgtgccctgcaatgtagaaggaataagtcctgaattagaaaaggtattcattaaagaaaataatgggaaggaagaagtatccaagccgttggacataccagatggtcgaagagctccacttcctgctcattaccggagcagtagtactcgcagcattgacactcagactccttctgtccaggagcgcagcagtagctgcagcagtcattcaccctgtgtctcccctttttgtcccccggaatcccaggatggtagcccttgctcaacagaagatttgctctatgatcgtgataaagacagtgggagtagctcaccgttacccaagtatgcttcatctcccaaaccaaacaacagctacatgttcaaacgggagcccccagagggatgtgagcgagtgaaggtctttgaggaaatggcgtctcgtcagcctatctcggcccctctcttttcatgtcctgacaaaaacaaggttaatttcatcccaaccggatcagctttctgtcctgtaaaacttctaggccccctcttacctgcttctgaccttatgctcaagaactcccctaactctggccagagctcagctttggcaactctgaccgttgagcagctctcatcccgggtttcctttacgtctctttctgatgacaccagcacagcgggctccatggaggcctctgtccagcagccatcccagcagcagcagctcctgcaggaactgcagggtgaggaccacatctctgctcagaactatgtgatcatctaaaaaagggggagctggcctccaccctatgttccatggattcggaacaagatttcagacatctgcatgagtgacaaactttctgaacaccacc

SEQ ID NO: 365019 - DNA, 1318 bp, Homo sapiens
aagcttgcggccgcagccccggccgagcaggcgccgcgggccaagggccgcccgagacggtccccagagagccaccggaggagcagctcacctgagagacggagccccggctcgcccgtgtgcagagcggacaaggcaaaatctcagcaagttcggacctctagtacaataaggcgaacctcctctttggatacaataacaggaccttacctcacaggacagtggccacgggatcctcatgttcactacccttcatgcatgaaagacaaagctactcagcagatcgccaaactgaggcagcaactacaacgcagtaaacagagtagtcgtcacagtaaggagaaagatcgccagtcacctcttcatggcaaccatataacaatcagtcacactcaggctactggatcaaggtcagttcctatgccactgtcaaatatatcagtgccaaaatcatctgtttcgcgtgtgccctgcaatgtagaaggaataagtcctgaattagaaaaggtattcattaaagaaaataatgggaaggaagaagtatccaagccgttggacataccagatggtcgaagagctccacttcctgctcattaccggagcagtagtactcgcagcattgacactcagactccttctgtccaggagcgcagcagtagctgcagcagtcattcaccctgtgtctcccctttttgtcccccggaatcccaggatggtagcccttgctcaacagaagatttgctctatgatcgtgataaagacagtgggagtagctcaccgttacccaagtatgcttcatctcccaaaccaaacaacagctacatgttcaaacgggagcccccagagggatgtgagcgagtgaaggtctttgaggaaatggcgtctcgtcagcctatctcggcccctctcttttcatgtcctgacaaaaacaaggttaatttcatcccaaccggatcagctttctgtcctgtaaaacttctaggccccctcttacctgcttctgaccttatgctcaagaactcccctaactctggccagagctcagctttggcaactctgaccgttgagcagctctcatcccgggtttcctttacgtctctttctgatgacaccagcacagcgggctccatggaggcctctgtccagcagccatcccagcagcagcagctcctgcaggaactgcagggtgaggaccacatctctgctcagaactatgtgatcatctaaaaaagggggagctggcctccaccctatgttccatggattcggaacaagatttcagacatctgcatgagtgacaaactttctgaacaccacc

SEQ ID NO: 365020 - DNA, 664 bp, Homo sapiens
tgcttaaggccaggagtttgagaccagccctgggaacgtggaaagaccttgtctctatagacaccaaaaaaatacaaaaattagctaggcatggtggcatgagcctgtagtcccagctacttgggaggcttaggtaggaggatcgcctgagcccaggagttgagaggctgaagtgagctatgattgtgtcactgcactccagcctgggcaagaatgaggaaaaaagacattaaatacagttttaagacagtgtttatagtaataaaggaaaatcacatattcaaaatactatatgcactatacagtttctataaataacatactgaaaaaaaaatctttcctctgcctcgtatcagttattaatgataagaaaacatggctgggcctggtggctcacacctgtaatactcgcactttgggagacccaggtgggtagatctcttgaggactggaattcaagaccagtctggccaacatggcaaaggcctgtttctactaaaaataaaaaaaattagccaggtggtgcacacctgtaatcccagctacccgggaggctgaggcagaagaactgtttgaacctgggaggcagaggttgcagtgagctgtgatcacaccactgtgctccagcctgggccacagtgagaccctgttcccccaaaaagga

SEQ ID NO: 365021 - DNA, 3173 bp, Homo sapiens
agcgggtgcgcggggagcgcggggagcgcggggagcgcggggctgcgctcgtgtgcgctcctgggcgctcgccgccgccgctgccgccgcgcgcctttgagtcagcaaactccgcggcccgcaagcccggctcggcccggccctgctctgttctgcccggaggagccgcccattgatcgtgtcctgtgctgaagatgtttccggaacaacagaaagaggaatttgtaagtgtctgggttcgagatcctaggattcagaaggaggacttctggcattcttacattgactatgagatatgtattcatactaatagcatgtgttttacaatgaaaacatcctgtgtacgaagaagatatagagaattcgtgtggctgaggcagagactccaaagtaatgcgttgctggtacaactgccagaacttccatctaaaaacctgtttttcaacatgaacaatcgccagcacgtggatcagcgtcgccagggtctggaagatttcctcagaaaagtcctacagaatgcacttttgctttcagatagcagccttcacctcttcttacagagccatctgaattcagaagacattgaggcgtgtgtttctgggcagactaagtactctgtggaagaagcaattcacaagtttgccttaatgaatagacgtttccctgaagaagatgaagaaggaaaaaaagaaaatgatatagattatgattcagaaagttcatcctctgggcttggacacagtagtgatgacagcagttcacatggatgtaaagtaaatacagctccgcaggaatcctgaaaaataattctaatgttactatcttaggaatagcaaattatgtccagtcatagagaagaaagcttcataataatacattcttacctaaagctcactgtcatgatgttaggtatttaaattcttaaagatgttgggttgtttattagtggtatttttatgttgtcttattttaggtaagcttctgtgtaaagctaaaaatcctgtgaatacaatactatcctttacaggcagacattattggtaaacaagatcttgccctccaatgaaatgacttacatgttttaaaaaaccgagttggttttattgaatttaaaaagataggtaactaagtagcatttaaaatcaagatagagcattccttcttgtatcagtggggcagtgttaccataaacacggtgtatatgttgttaaaccctatgaagagtaacagtgtagaccagactgcctctctcagatatgtgcctgatattttgtggatacctcccctgcactggcaaaacactatgcttttgggtgttagactgaaatattttaagagtatttaacctttccagtattctgtttcacgcttagatggaaatgtatcttatgaatagagacatattaaaataatgtttacatcttagaaaaaacatagatagtgctagtaatattacttataactgtaatatatagattcagaaatacattttcattatccaaaatcagcttcaacaaatggtttctggagacaaataatttgttttcattatcattgtataatcaggttaatgatttattttttgactaaatgtgcaatttcttatcactagataactttcagtatcagtggtggttacttattacttaaatcagaggaaggattttataaagattaataaatttaattttaccaataaatattcccataatttagaaaaggatgtcgacttgctaatttcagaaataattattcatttttaaaaagccccttttaaagcatctacttgaagattggtataattttcataaaatgtctttttttttagtgtcccaaagatatcttagataaactattttgaagttcagatttcagatgaggcaacattttcttgagataattacccaagtttcatccatgttgaatggtacaaaatatttctgtgaaactaacaggaagatattttcagataactaggataacttgttgctttgttacccagcctaattgaagagtggcagaggctactacaaaaagcaaccttttcattttcactaagagtttaaaagctattgtattattaaaaagtctttacaatgcttgtttcaaagaaccaacagaaaaaaaagctaagaaaactgagaactaacattaaaaaaattaaatttagaataagaatgatttctttaatttgtcctttttttctttggtctaaaacattattaaatttttgtaaatattttgatttaatgtgtcttagatcctcattattttaatacaggaaaagaaaagatttagtaatttcttaccatgctaatatgtaaagttcatgccatccaggcatttaagagcgatcctcatcccttcagcaatatgtatttgagttcacactatttctgttttacagcagttttgaaaaacacatactatgccaccaattgtcatattatttttagatgatgtaacatagccatcaaaattaatattatgtaatgcctaatacttagtatgtaaatgtcacgagatcatttttacattaaacgtgaaaaaaaaaaaaaaaaaaaaaaaaaaaaaaaaaaaaaacaccccacccacaaaaaaaaaaaaaaaaaaaaaaaataaactaaaagaaccacataaggcaaccaataaaagataaaaaacaaagcgatataatcaacacacagaaaacaataaactagagtggtgcgggtgtggtcctctttattctgaatcactgctgggctgtgtgcgcctttctgcgagaggtctcatgtgactcgtaatttgtcgagacgagacagactcgacactccaatcgagtgtgatgtatattcacactgcacaacacgctcctcgtgaacccagtagtgatcaattaatcatcatcgcgatgggtatctgcaagaattatgcgctgctatggcacagctgtacatcggaaagaacatactcgctcttcgttcttcgtgggtgtcggcgtgtgcaaggtatcatgactgaactctcatatatcagtagacgagaaatgaatcgatcggactcatgtgcaatcgttcctccacacttacagatccgtcaggggcttgtgtgtctattaggcgagagaaggtaacaacgataatgacaatgtggcgaggggacggcgaagtgaggcatggagtggttagatc

SEQ ID NO: 365022 - DNA, 3294 bp, Homo sapiens
agcgggtgcgcggggagcgcggggagcgcggggagcgcggggctgcgctcgtgtgcgctcctgggcgctcgccgccgccgctgccgccgcgcgcctttgagtcagcaaactccgcggcccgcaagcccggctcggcccggccctgctctgttctgcccggaggagccgcccattgatcgtgtcctgtgctgaagatgtttccggaacaacagaaagaggcatttatttattcattaaatgatactaatggaaggcattggatgtatgaggcattcaagtcttacaagacagcctaagctgccctacaggagcttagcgtctgctagaggaggcctacaggaatttgtaagtgtctgggttcgagatcctaggattcagaaggaggacttctggcattcttacattgactatgagatatgtattcatactaatagcatgtgttttacaatgaaaacatcctgtgtacgaagaagatatagagaattcgtgtggctgaggcagagactccaaagtaatgcgttgctggtacaactgccagaacttccatctaaaaacctgtttttcaacatgaacaatcgccagcacgtggatcagcgtcgccagggtctggaagatttcctcagaaaagtcctacagaatgcacttttgctttcagatagcagccttcacctcttcttacagagccatctgaattcagaagacattgaggcgtgtgtttctgggcagactaagtactctgtggaagaagcaattcacaagtttgccttaatgaatagacgtttccctgaagaagatgaagaaggaaaaaaagaaaatgatatagattatgattcagaaagttcatcctctgggcttggacacagtagtgatgacagcagttcacatggatgtaaagtaaatacagctccgcaggaatcctgaaaaataattctaatgttactatcttaggaatagcaaattatgtccagtcatagagaagaaagcttcataataatacattcttacctaaagctcactgtcatgatgttaggtatttaaattcttaaagatgttgggttgtttattagtggtatttttatgttgtcttattttaggtaagcttctgtgtaaagctaaaaatcctgtgaatacaatactatcctttacaggcagacattattggtaaacaagatcttgccctccaatgaaatgacttacatgttttaaaaaaccgagttggttttattgaatttaaaaagataggtaactaagtagcatttaaaatcaagatagagcattccttcttgtatcagtggggcagtgttaccataaacacggtgtatatgttgttaaaccctatgaagagtaacagtgtagaccagactgcctctctcagatatgtgcctgatattttgtggatacctcccctgcactggcaaaacactatgcttttgggtgttagactgaaatattttaagagtatttaacctttccagtattctgtttcacgcttagatggaaatgtatcttatgaatagagacatattaaaataatgtttacatcttagaaaaaacatagatagtgctagtaatattacttataactgtaatatatagattcagaaatacattttcattatccaaaatcagcttcaacaaatggtttctggagacaaataatttgttttcattatcattgtataatcaggttaatgatttattttttgactaaatgtgcaatttcttatcactagataactttcagtatcagtggtggttacttattacttaaatcagaggaaggattttataaagattaataaatttaattttaccaataaatattcccataatttagaaaaggatgtcgacttgctaatttcagaaataattattcatttttaaaaagccccttttaaagcatctacttgaagattggtataattttcataaaatgtctttttttttagtgtcccaaagatatcttagataaactattttgaagttcagatttcagatgaggcaacattttcttgagataattacccaagtttcatccatgttgaatggtacaaaatatttctgtgaaactaacaggaagatattttcagataactaggataacttgttgctttgttacccagcctaattgaagagtggcagaggctactacaaaaagcaaccttttcattttcactaagagtttaaaagctattgtattattaaaaagtctttacaatgcttgtttcaaagaaccaacagaaaaaaaagctaagaaaactgagaactaacattaaaaaaattaaatttagaataagaatgatttctttaatttgtcctttttttctttggtctaaaacattattaaatttttgtaaatattttgatttaatgtgtcttagatcctcattattttaatacaggaaaagaaaagatttagtaatttcttaccatgctaatatgtaaagttcatgccatccaggcatttaagagcgatcctcatcccttcagcaatatgtatttgagttcacactatttctgttttacagcagttttgaaaaacacatactatgccaccaattgtcatattatttttagatgatgtaacatagccatcaaaattaatattatgtaatgcctaatacttagtatgtaaatgtcacgagatcatttttacattaaacgtgaaaaaaaaaaaaaaaaaaaaaaaaaaaaaaaaaaaaaacaccccacccacaaaaaaaaaaaaaaaaaaaaaaaataaactaaaagaaccacataaggcaaccaataaaagataaaaaacaaagcgatataatcaacacacagaaaacaataaactagagtggtgcgggtgtggtcctctttattctgaatcactgctgggctgtgtgcgcctttctgcgagaggtctcatgtgactcgtaatttgtcgagacgagacagactcgacactccaatcgagtgtgatgtatattcacactgcacaacacgctcctcgtgaacccagtagtgatcaattaatcatcatcgcgatgggtatctgcaagaattatgcgctgctatggcacagctgtacatcggaaagaacatactcgctcttcgttcttcgtgggtgtcggcgtgtgcaaggtatcatgactgaactctcatatatcagtagacgagaaatgaatcgatcggactcatgtgcaatcgttcctccacacttacagatccgtcaggggcttgtgtgtctattaggcgagagaaggtaacaacgataatgacaatgtggcgaggggacggcgaagtgaggcatggagtggttagatc

SEQ ID NO: 365023 - DNA, 3081 bp, Homo sapiens
tgcccgcacccttgcgggctggaaagaggtttgggtcccttgggcttggagcagaggagccgcctccttttcagccgagattgatcgtgtcctgtgctgaagatgtttccggaacaacagaaagaggaatttgtaagtgtctgggttcgagatcctaggattcagaaggaggacttctggcattcttacattgactatgagatatgtattcatactaatagcatgtgttttacaatgaaaacatcctgtgtacgaagaagatatagagaattcgtgtggctgaggcagagactccaaagtaatgcgttgctggtacaactgccagaacttccatctaaaaacctgtttttcaacatgaacaatcgccagcacgtggatcagcgtcgccagggtctggaagatttcctcagaaaagtcctacagaatgcacttttgctttcagatagcagccttcacctcttcttacagagccatctgaattcagaagacattgaggcgtgtgtttctgggcagactaagtactctgtggaagaagcaattcacaagtttgccttaatgaatagacgtttccctgaagaagatgaagaaggaaaaaaagaaaatgatatagattatgattcagaaagttcatcctctgggcttggacacagtagtgatgacagcagttcacatggatgtaaagtaaatacagctccgcaggaatcctgaaaaataattctaatgttactatcttaggaatagcaaattatgtccagtcatagagaagaaagcttcataataatacattcttacctaaagctcactgtcatgatgttaggtatttaaattcttaaagatgttgggttgtttattagtggtatttttatgttgtcttattttaggtaagcttctgtgtaaagctaaaaatcctgtgaatacaatactatcctttacaggcagacattattggtaaacaagatcttgccctccaatgaaatgacttacatgttttaaaaaaccgagttggttttattgaatttaaaaagataggtaactaagtagcatttaaaatcaagatagagcattccttcttgtatcagtggggcagtgttaccataaacacggtgtatatgttgttaaaccctatgaagagtaacagtgtagaccagactgcctctctcagatatgtgcctgatattttgtggatacctcccctgcactggcaaaacactatgcttttgggtgttagactgaaatattttaagagtatttaacctttccagtattctgtttcacgcttagatggaaatgtatcttatgaatagagacatattaaaataatgtttacatcttagaaaaaacatagatagtgctagtaatattacttataactgtaatatatagattcagaaatacattttcattatccaaaatcagcttcaacaaatggtttctggagacaaataatttgttttcattatcattgtataatcaggttaatgatttattttttgactaaatgtgcaatttcttatcactagataactttcagtatcagtggtggttacttattacttaaatcagaggaaggattttataaagattaataaatttaattttaccaataaatattcccataatttagaaaaggatgtcgacttgctaatttcagaaataattattcatttttaaaaagccccttttaaagcatctacttgaagattggtataattttcataaaatgtctttttttttagtgtcccaaagatatcttagataaactattttgaagttcagatttcagatgaggcaacattttcttgagataattacccaagtttcatccatgttgaatggtacaaaatatttctgtgaaactaacaggaagatattttcagataactaggataacttgttgctttgttacccagcctaattgaagagtggcagaggctactacaaaaagcaaccttttcattttcactaagagtttaaaagctattgtattattaaaaagtctttacaatgcttgtttcaaagaaccaacagaaaaaaaagctaagaaaactgagaactaacattaaaaaaattaaatttagaataagaatgatttctttaatttgtcctttttttctttggtctaaaacattattaaatttttgtaaatattttgatttaatgtgtcttagatcctcattattttaatacaggaaaagaaaagatttagtaatttcttaccatgctaatatgtaaagttcatgccatccaggcatttaagagcgatcctcatcccttcagcaatatgtatttgagttcacactatttctgttttacagcagttttgaaaaacacatactatgccaccaattgtcatattatttttagatgatgtaacatagccatcaaaattaatattatgtaatgcctaatacttagtatgtaaatgtcacgagatcatttttacattaaacgtgaaaaaaaaaaaaaaaaaaaaaaaaaaaaaaaaaaaaaacaccccacccacaaaaaaaaaaaaaaaaaaaaaaaataaactaaaagaaccacataaggcaaccaataaaagataaaaaacaaagcgatataatcaacacacagaaaacaataaactagagtggtgcgggtgtggtcctctttattctgaatcactgctgggctgtgtgcgcctttctgcgagaggtctcatgtgactcgtaatttgtcgagacgagacagactcgacactccaatcgagtgtgatgtatattcacactgcacaacacgctcctcgtgaacccagtagtgatcaattaatcatcatcgcgatgggtatctgcaagaattatgcgctgctatggcacagctgtacatcggaaagaacatactcgctcttcgttcttcgtgggtgtcggcgtgtgcaaggtatcatgactgaactctcatatatcagtagacgagaaatgaatcgatcggactcatgtgcaatcgttcctccacacttacagatccgtcaggggcttgtgtgtctattaggcgagagaaggtaacaacgataatgacaatgtggcgaggggacggcgaagtgaggcatggagtggttagatc

SEQ ID NO: 365024 - DNA, 2959 bp, Homo sapiens
caccctggggcaacactgcttatttccatcatcctggctgtcttcagggctgttatgttcctgggttatgtgcaagatttcagagtactggcataaatataaatatatgtttggtggtttaaatcctatttagagtgaatgttgagatcatattgtgaattatagatacaagaaatgcatttttttcctcagacaactgccagaacttccatctaaaaacctgtttttcaacatgaacaatcgccagcacgtggatcagcgtcgccagggtctggaagatttcctcagaaaagtcctacagaatgcacttttgctttcagatagcagccttcacctcttcttacagagccatctgaattcagaagacattgaggcgtgtgtttctgggcagactaagtactctgtggaagaagcaattcacaagtttgccttaatgaatagacgtttccctgaagaagatgaagaaggaaaaaaagaaaatgatatagattatgattcagaaagttcatcctctgggcttggacacagtagtgatgacagcagttcacatggatgtaaagtaaatacagctccgcaggaatcctgaaaaataattctaatgttactatcttaggaatagcaaattatgtccagtcatagagaagaaagcttcataataatacattcttacctaaagctcactgtcatgatgttaggtatttaaattcttaaagatgttgggttgtttattagtggtatttttatgttgtcttattttaggtaagcttctgtgtaaagctaaaaatcctgtgaatacaatactatcctttacaggcagacattattggtaaacaagatcttgccctccaatgaaatgacttacatgttttaaaaaaccgagttggttttattgaatttaaaaagataggtaactaagtagcatttaaaatcaagatagagcattccttcttgtatcagtggggcagtgttaccataaacacggtgtatatgttgttaaaccctatgaagagtaacagtgtagaccagactgcctctctcagatatgtgcctgatattttgtggatacctcccctgcactggcaaaacactatgcttttgggtgttagactgaaatattttaagagtatttaacctttccagtattctgtttcacgcttagatggaaatgtatcttatgaatagagacatattaaaataatgtttacatcttagaaaaaacatagatagtgctagtaatattacttataactgtaatatatagattcagaaatacattttcattatccaaaatcagcttcaacaaatggtttctggagacaaataatttgttttcattatcattgtataatcaggttaatgatttattttttgactaaatgtgcaatttcttatcactagataactttcagtatcagtggtggttacttattacttaaatcagaggaaggattttataaagattaataaatttaattttaccaataaatattcccataatttagaaaaggatgtcgacttgctaatttcagaaataattattcatttttaaaaagccccttttaaagcatctacttgaagattggtataattttcataaaatgtctttttttttagtgtcccaaagatatcttagataaactattttgaagttcagatttcagatgaggcaacattttcttgagataattacccaagtttcatccatgttgaatggtacaaaatatttctgtgaaactaacaggaagatattttcagataactaggataacttgttgctttgttacccagcctaattgaagagtggcagaggctactacaaaaagcaaccttttcattttcactaagagtttaaaagctattgtattattaaaaagtctttacaatgcttgtttcaaagaaccaacagaaaaaaaagctaagaaaactgagaactaacattaaaaaaattaaatttagaataagaatgatttctttaatttgtcctttttttctttggtctaaaacattattaaatttttgtaaatattttgatttaatgtgtcttagatcctcattattttaatacaggaaaagaaaagatttagtaatttcttaccatgctaatatgtaaagttcatgccatccaggcatttaagagcgatcctcatcccttcagcaatatgtatttgagttcacactatttctgttttacagcagttttgaaaaacacatactatgccaccaattgtcatattatttttagatgatgtaacatagccatcaaaattaatattatgtaatgcctaatacttagtatgtaaatgtcacgagatcatttttacattaaacgtgaaaaaaaaaaaaaaaaaaaaaaaaaaaaaaaaaaaaaacaccccacccacaaaaaaaaaaaaaaaaaaaaaaaataaactaaaagaaccacataaggcaaccaataaaagataaaaaacaaagcgatataatcaacacacagaaaacaataaactagagtggtgcgggtgtggtcctctttattctgaatcactgctgggctgtgtgcgcctttctgcgagaggtctcatgtgactcgtaatttgtcgagacgagacagactcgacactccaatcgagtgtgatgtatattcacactgcacaacacgctcctcgtgaacccagtagtgatcaattaatcatcatcgcgatgggtatctgcaagaattatgcgctgctatggcacagctgtacatcggaaagaacatactcgctcttcgttcttcgtgggtgtcggcgtgtgcaaggtatcatgactgaactctcatatatcagtagacgagaaatgaatcgatcggactcatgtgcaatcgttcctccacacttacagatccgtcaggggcttgtgtgtctattaggcgagagaaggtaacaacgataatgacaatgtggcgaggggacggcgaagtgaggcatggagtggttagatc

SEQ ID NO: 365025 - DNA, 2210 bp, Homo sapiens
agcgggtgcgcggggagcgcggggagcgcggggagcgcggggctgcgctcgtgtgcgctcctgggcgctcgccgccgccgctgccgccgcgcgcctttgagtcagcaaactccgcggcccgcaagcccggctcggcccggccctgctctgttctgcccggaggagccgcccattgatcgtgtcctgtgctgaagatgtttccggaacaacagaaagaggaatttgtaagtgtctgggttcgagatcctaggattcagaaggaggacttctggcattcttacattgactatgagatatgtattcatactaatagcatgtgttttacaatgaaaacatcctgtgtacgaagaagatatagagaattcgtgtggctgaggcagagactccaaagtaatgcgttgctggtacaactgccagaacttccatctaaaaacctgtttttcaacatgaacaatcgccagcacgtggatcagcgtcgccagggtctggaagatttcctcagaaaagtcctacagaatgcacttttgctttcagatagcagccttcacctcttcttacagagccatctgaattcagaagacattgaggcgtgtgtttctgggcagactaagtactctgtggaagaagcaattcacaagtttgccttaatgaatagacgtttccctgaagaagatgaagaaggaaaaaaagaaaatgatatagattatgattcagaaagttcatcctctgggcttggacacagtagtgatgacagcagttcacatggatgtaaagtaaatacagctccgcaggaatcctgaaaaataattctaatgttactatcttaggaatagcaaattatgtccagtcatagagaagaaagcttcataataatacattcttacctaaagctcactgtcatgatgttaggtatttaaattcttaaagatgttgggttgtttattagtggtatttttatgttgtcttattttaggtaagcttctgtgtaaagctaaaaatcctgtgaataactaggataacttgttgctttgttacccagcctaattgaagagtggcagaggctactacaaaaagcaaccttttcattttcactaagagtttaaaagctattgtattattaaaaagtctttacaatgcttgtttcaaagaaccaacagaaaaaaaagctaagaaaactgagaactaacattaaaaaaattaaatttagaataagaatgatttctttaatttgtcctttttttctttggtctaaaacattattaaatttttgtaaatattttgatttaatgtgtcttagatcctcattattttaatacaggaaaagaaaagatttagtaatttcttaccatgctaatatgtaaagttcatgccatccaggcatttaagagcgatcctcatcccttcagcaatatgtatttgagttcacactatttctgttttacagcagttttgaaaaacacatactatgccaccaattgtcatattatttttagatgatgtaacatagccatcaaaattaatattatgtaatgcctaatacttagtatgtaaatgtcacgagatcatttttacattaaacgtgaaaaaaaaaaaaaaaaaaaaaaaaaaaaaaaaaaaaaacaccccacccacaaaaaaaaaaaaaaaaaaaaaaaataaactaaaagaaccacataaggcaaccaataaaagataaaaaacaaagcgatataatcaacacacagaaaacaataaactagagtggtgcgggtgtggtcctctttattctgaatcactgctgggctgtgtgcgcctttctgcgagaggtctcatgtgactcgtaatttgtcgagacgagacagactcgacactccaatcgagtgtgatgtatattcacactgcacaacacgctcctcgtgaacccagtagtgatcaattaatcatcatcgcgatgggtatctgcaagaattatgcgctgctatggcacagctgtacatcggaaagaacatactcgctcttcgttcttcgtgggtgtcggcgtgtgcaaggtatcatgactgaactctcatatatcagtagacgagaaatgaatcgatcggactcatgtgcaatcgttcctccacacttacagatccgtcaggggcttgtgtgtctattaggcgagagaaggtaacaacgataatgacaatgtggcgaggggacggcgaagtgaggcatggagtggttagatc

SEQ ID NO: 365026 - DNA, 3411 bp, Homo sapiens
aaaatgatggtatcagaaaattagaacggggaggaggcttgcacatgatctccatcaaacctttcattttacagacagggaggctaaggccgagggacgctgagtgttgggaccaggatcattcagccagatgggagcagaaccaggcctacaacctggcaggcttctgacttccaccccggagttatgtccacctctggggcctgggaactgggtttggattgcataagctccccctcctctcccaggagggggctgggctggaggctgaggccttcgccaggaagaagcagggactgcttggatagttgaccagcttctgcaggggctcctcagtgagagaatggaggtgaggtcagggactcctgccttgcctctgccatcacttccagtgatgcctattcctaagattgatcgtgtcctgtgctgaagatgtttccggaacaacagaaagaggaatttgtaagtgtctgggttcgagatcctaggattcagaaggaggacttctggcattcttacattgactatgagatatgtattcatactaatagcatgtgttttacaatgaaaacatcctgtgtacgaagaagatatagagaattcgtgtggctgaggcagagactccaaagtaatgcgttgctggtacaactgccagaacttccatctaaaaacctgtttttcaacatgaacaatcgccagcacgtggatcagcgtcgccagggtctggaagatttcctcagaaaagtcctacagaatgcacttttgctttcagatagcagccttcacctcttcttacagagccatctgaattcagaagacattgaggcgtgtgtttctgggcagactaagtactctgtggaagaagcaattcacaagtttgccttaatgaatagacgtttccctgaagaagatgaagaaggaaaaaaagaaaatgatatagattatgattcagaaagttcatcctctgggcttggacacagtagtgatgacagcagttcacatggatgtaaagtaaatacagctccgcaggaatcctgaaaaataattctaatgttactatcttaggaatagcaaattatgtccagtcatagagaagaaagcttcataataatacattcttacctaaagctcactgtcatgatgttaggtatttaaattcttaaagatgttgggttgtttattagtggtatttttatgttgtcttattttaggtaagcttctgtgtaaagctaaaaatcctgtgaatacaatactatcctttacaggcagacattattggtaaacaagatcttgccctccaatgaaatgacttacatgttttaaaaaaccgagttggttttattgaatttaaaaagataggtaactaagtagcatttaaaatcaagatagagcattccttcttgtatcagtggggcagtgttaccataaacacggtgtatatgttgttaaaccctatgaagagtaacagtgtagaccagactgcctctctcagatatgtgcctgatattttgtggatacctcccctgcactggcaaaacactatgcttttgggtgttagactgaaatattttaagagtatttaacctttccagtattctgtttcacgcttagatggaaatgtatcttatgaatagagacatattaaaataatgtttacatcttagaaaaaacatagatagtgctagtaatattacttataactgtaatatatagattcagaaatacattttcattatccaaaatcagcttcaacaaatggtttctggagacaaataatttgttttcattatcattgtataatcaggttaatgatttattttttgactaaatgtgcaatttcttatcactagataactttcagtatcagtggtggttacttattacttaaatcagaggaaggattttataaagattaataaatttaattttaccaataaatattcccataatttagaaaaggatgtcgacttgctaatttcagaaataattattcatttttaaaaagccccttttaaagcatctacttgaagattggtataattttcataaaatgtctttttttttagtgtcccaaagatatcttagataaactattttgaagttcagatttcagatgaggcaacattttcttgagataattacccaagtttcatccatgttgaatggtacaaaatatttctgtgaaactaacaggaagatattttcagataactaggataacttgttgctttgttacccagcctaattgaagagtggcagaggctactacaaaaagcaaccttttcattttcactaagagtttaaaagctattgtattattaaaaagtctttacaatgcttgtttcaaagaaccaacagaaaaaaaagctaagaaaactgagaactaacattaaaaaaattaaatttagaataagaatgatttctttaatttgtcctttttttctttggtctaaaacattattaaatttttgtaaatattttgatttaatgtgtcttagatcctcattattttaatacaggaaaagaaaagatttagtaatttcttaccatgctaatatgtaaagttcatgccatccaggcatttaagagcgatcctcatcccttcagcaatatgtatttgagttcacactatttctgttttacagcagttttgaaaaacacatactatgccaccaattgtcatattatttttagatgatgtaacatagccatcaaaattaatattatgtaatgcctaatacttagtatgtaaatgtcacgagatcatttttacattaaacgtgaaaaaaaaaaaaaaaaaaaaaaaaaaaaaaaaaaaaaacaccccacccacaaaaaaaaaaaaaaaaaaaaaaaataaactaaaagaaccacataaggcaaccaataaaagataaaaaacaaagcgatataatcaacacacagaaaacaataaactagagtggtgcgggtgtggtcctctttattctgaatcactgctgggctgtgtgcgcctttctgcgagaggtctcatgtgactcgtaatttgtcgagacgagacagactcgacactccaatcgagtgtgatgtatattcacactgcacaacacgctcctcgtgaacccagtagtgatcaattaatcatcatcgcgatgggtatctgcaagaattatgcgctgctatggcacagctgtacatcggaaagaacatactcgctcttcgttcttcgtgggtgtcggcgtgtgcaaggtatcatgactgaactctcatatatcagtagacgagaaatgaatcgatcggactcatgtgcaatcgttcctccacacttacagatccgtcaggggcttgtgtgtctattaggcgagagaaggtaacaacgataatgacaatgtggcgaggggacggcgaagtgaggcatggagtggttagatc

SEQ ID NO: 365027 - DNA, 3090 bp, Homo sapiens
agcggagttaacacctactcatctttactgtgctacaaagattcaaactaagctatgatggaaaattttaaaaaacacacctatcacaatggctaaaataaaaaatagtgataatccccctggaaactgtaataggaatttgtaagtgtctgggttcgagatcctaggattcagaaggaggacttctggcattcttacattgactatgagatatgtattcatactaatagcatgtgttttacaatgaaaacatcctgtgtacgaagaagatatagagaattcgtgtggctgaggcagagactccaaagtaatgcgttgctggtacaactgccagaacttccatctaaaaacctgtttttcaacatgaacaatcgccagcacgtggatcagcgtcgccagggtctggaagatttcctcagaaaagtcctacagaatgcacttttgctttcagatagcagccttcacctcttcttacagagccatctgaattcagaagacattgaggcgtgtgtttctgggcagactaagtactctgtggaagaagcaattcacaagtttgccttaatgaatagacgtttccctgaagaagatgaagaaggaaaaaaagaaaatgatatagattatgattcagaaagttcatcctctgggcttggacacagtagtgatgacagcagttcacatggatgtaaagtaaatacagctccgcaggaatcctgaaaaataattctaatgttactatcttaggaatagcaaattatgtccagtcatagagaagaaagcttcataataatacattcttacctaaagctcactgtcatgatgttaggtatttaaattcttaaagatgttgggttgtttattagtggtatttttatgttgtcttattttaggtaagcttctgtgtaaagctaaaaatcctgtgaatacaatactatcctttacaggcagacattattggtaaacaagatcttgccctccaatgaaatgacttacatgttttaaaaaaccgagttggttttattgaatttaaaaagataggtaactaagtagcatttaaaatcaagatagagcattccttcttgtatcagtggggcagtgttaccataaacacggtgtatatgttgttaaaccctatgaagagtaacagtgtagaccagactgcctctctcagatatgtgcctgatattttgtggatacctcccctgcactggcaaaacactatgcttttgggtgttagactgaaatattttaagagtatttaacctttccagtattctgtttcacgcttagatggaaatgtatcttatgaatagagacatattaaaataatgtttacatcttagaaaaaacatagatagtgctagtaatattacttataactgtaatatatagattcagaaatacattttcattatccaaaatcagcttcaacaaatggtttctggagacaaataatttgttttcattatcattgtataatcaggttaatgatttattttttgactaaatgtgcaatttcttatcactagataactttcagtatcagtggtggttacttattacttaaatcagaggaaggattttataaagattaataaatttaattttaccaataaatattcccataatttagaaaaggatgtcgacttgctaatttcagaaataattattcatttttaaaaagccccttttaaagcatctacttgaagattggtataattttcataaaatgtctttttttttagtgtcccaaagatatcttagataaactattttgaagttcagatttcagatgaggcaacattttcttgagataattacccaagtttcatccatgttgaatggtacaaaatatttctgtgaaactaacaggaagatattttcagataactaggataacttgttgctttgttacccagcctaattgaagagtggcagaggctactacaaaaagcaaccttttcattttcactaagagtttaaaagctattgtattattaaaaagtctttacaatgcttgtttcaaagaaccaacagaaaaaaaagctaagaaaactgagaactaacattaaaaaaattaaatttagaataagaatgatttctttaatttgtcctttttttctttggtctaaaacattattaaatttttgtaaatattttgatttaatgtgtcttagatcctcattattttaatacaggaaaagaaaagatttagtaatttcttaccatgctaatatgtaaagttcatgccatccaggcatttaagagcgatcctcatcccttcagcaatatgtatttgagttcacactatttctgttttacagcagttttgaaaaacacatactatgccaccaattgtcatattatttttagatgatgtaacatagccatcaaaattaatattatgtaatgcctaatacttagtatgtaaatgtcacgagatcatttttacattaaacgtgaaaaaaaaaaaaaaaaaaaaaaaaaaaaaaaaaaaaaacaccccacccacaaaaaaaaaaaaaaaaaaaaaaaataaactaaaagaaccacataaggcaaccaataaaagataaaaaacaaagcgatataatcaacacacagaaaacaataaactagagtggtgcgggtgtggtcctctttattctgaatcactgctgggctgtgtgcgcctttctgcgagaggtctcatgtgactcgtaatttgtcgagacgagacagactcgacactccaatcgagtgtgatgtatattcacactgcacaacacgctcctcgtgaacccagtagtgatcaattaatcatcatcgcgatgggtatctgcaagaattatgcgctgctatggcacagctgtacatcggaaagaacatactcgctcttcgttcttcgtgggtgtcggcgtgtgcaaggtatcatgactgaactctcatatatcagtagacgagaaatgaatcgatcggactcatgtgcaatcgttcctccacacttacagatccgtcaggggcttgtgtgtctattaggcgagagaaggtaacaacgataatgacaatgtggcgaggggacggcgaagtgaggcatggagtggttagatc

SEQ ID NO: 365028 - DNA, 3028 bp, Homo sapiens
gagggggcctcccctgcaccgcccagattgatcgtgtcctgtgctgaagatgtttccggaacaacagaaagaggaatttgtaagtgtctgggttcgagatcctaggattcagaaggaggacttctggcattcttacattgactatgagatatgtattcatactaatagcatgtgttttacaatgaaaacatcctgtgtacgaagaagatatagagaattcgtgtggctgaggcagagactccaaagtaatgcgttgctggtacaactgccagaacttccatctaaaaacctgtttttcaacatgaacaatcgccagcacgtggatcagcgtcgccagggtctggaagatttcctcagaaaagtcctacagaatgcacttttgctttcagatagcagccttcacctcttcttacagagccatctgaattcagaagacattgaggcgtgtgtttctgggcagactaagtactctgtggaagaagcaattcacaagtttgccttaatgaatagacgtttccctgaagaagatgaagaaggaaaaaaagaaaatgatatagattatgattcagaaagttcatcctctgggcttggacacagtagtgatgacagcagttcacatggatgtaaagtaaatacagctccgcaggaatcctgaaaaataattctaatgttactatcttaggaatagcaaattatgtccagtcatagagaagaaagcttcataataatacattcttacctaaagctcactgtcatgatgttaggtatttaaattcttaaagatgttgggttgtttattagtggtatttttatgttgtcttattttaggtaagcttctgtgtaaagctaaaaatcctgtgaatacaatactatcctttacaggcagacattattggtaaacaagatcttgccctccaatgaaatgacttacatgttttaaaaaaccgagttggttttattgaatttaaaaagataggtaactaagtagcatttaaaatcaagatagagcattccttcttgtatcagtggggcagtgttaccataaacacggtgtatatgttgttaaaccctatgaagagtaacagtgtagaccagactgcctctctcagatatgtgcctgatattttgtggatacctcccctgcactggcaaaacactatgcttttgggtgttagactgaaatattttaagagtatttaacctttccagtattctgtttcacgcttagatggaaatgtatcttatgaatagagacatattaaaataatgtttacatcttagaaaaaacatagatagtgctagtaatattacttataactgtaatatatagattcagaaatacattttcattatccaaaatcagcttcaacaaatggtttctggagacaaataatttgttttcattatcattgtataatcaggttaatgatttattttttgactaaatgtgcaatttcttatcactagataactttcagtatcagtggtggttacttattacttaaatcagaggaaggattttataaagattaataaatttaattttaccaataaatattcccataatttagaaaaggatgtcgacttgctaatttcagaaataattattcatttttaaaaagccccttttaaagcatctacttgaagattggtataattttcataaaatgtctttttttttagtgtcccaaagatatcttagataaactattttgaagttcagatttcagatgaggcaacattttcttgagataattacccaagtttcatccatgttgaatggtacaaaatatttctgtgaaactaacaggaagatattttcagataactaggataacttgttgctttgttacccagcctaattgaagagtggcagaggctactacaaaaagcaaccttttcattttcactaagagtttaaaagctattgtattattaaaaagtctttacaatgcttgtttcaaagaaccaacagaaaaaaaagctaagaaaactgagaactaacattaaaaaaattaaatttagaataagaatgatttctttaatttgtcctttttttctttggtctaaaacattattaaatttttgtaaatattttgatttaatgtgtcttagatcctcattattttaatacaggaaaagaaaagatttagtaatttcttaccatgctaatatgtaaagttcatgccatccaggcatttaagagcgatcctcatcccttcagcaatatgtatttgagttcacactatttctgttttacagcagttttgaaaaacacatactatgccaccaattgtcatattatttttagatgatgtaacatagccatcaaaattaatattatgtaatgcctaatacttagtatgtaaatgtcacgagatcatttttacattaaacgtgaaaaaaaaaaaaaaaaaaaaaaaaaaaaaaaaaaaaaacaccccacccacaaaaaaaaaaaaaaaaaaaaaaaataaactaaaagaaccacataaggcaaccaataaaagataaaaaacaaagcgatataatcaacacacagaaaacaataaactagagtggtgcgggtgtggtcctctttattctgaatcactgctgggctgtgtgcgcctttctgcgagaggtctcatgtgactcgtaatttgtcgagacgagacagactcgacactccaatcgagtgtgatgtatattcacactgcacaacacgctcctcgtgaacccagtagtgatcaattaatcatcatcgcgatgggtatctgcaagaattatgcgctgctatggcacagctgtacatcggaaagaacatactcgctcttcgttcttcgtgggtgtcggcgtgtgcaaggtatcatgactgaactctcatatatcagtagacgagaaatgaatcgatcggactcatgtgcaatcgttcctccacacttacagatccgtcaggggcttgtgtgtctattaggcgagagaaggtaacaacgataatgacaatgtggcgaggggacggcgaagtgaggcatggagtggttagatc

SEQ ID NO: 365029 - DNA, 2960 bp, Homo sapiens
tctttccagtcctacttgcagttctgaagaatatttctttgtttatgatgccattacaggaatttgtaagtgtctgggttcgagatcctaggattcagaaggaggacttctggcattcttacattgactatgagatatgtattcatactaatagcatgtgttttacaatgaaaacatcctgtgtacgaagaagatatagagaattcgtgtggctgaggcagagactccaaagtaatgcgttgctggtacaactgccagaacttccatctaaaaacctgtttttcaacatgaacaatcgccagcacgtggatcagcgtcgccagggtctggaagatttcctcagaaaagtcctacagaatgcacttttgctttcagatagcagccttcacctcttcttacagagccatctgaattcagaagacattgaggcgtgtgtttctgggcagactaagtactctgtggaagaagcaattcacaagtttgccttaatgaatagacgtttccctgaagaagatgaagaaggaaaaaaagatgatgacagcagttcacatggatgtaaagtaaatacagctccgcaggaatcctgaaaaataattctaatgttactatcttaggaatagcaaattatgtccagtcatagagaagaaagcttcataataatacattcttacctaaagctcactgtcatgatgttaggtatttaaattcttaaagatgttgggttgtttattagtggtatttttatgttgtcttattttaggtaagcttctgtgtaaagctaaaaatcctgtgaatacaatactatcctttacaggcagacattattggtaaacaagatcttgccctccaatgaaatgacttacatgttttaaaaaaccgagttggttttattgaatttaaaaagataggtaactaagtagcatttaaaatcaagatagagcattccttcttgtatcagtggggcagtgttaccataaacacggtgtatatgttgttaaaccctatgaagagtaacagtgtagaccagactgcctctctcagatatgtgcctgatattttgtggatacctcccctgcactggcaaaacactatgcttttgggtgttagactgaaatattttaagagtatttaacctttccagtattctgtttcacgcttagatggaaatgtatcttatgaatagagacatattaaaataatgtttacatcttagaaaaaacatagatagtgctagtaatattacttataactgtaatatatagattcagaaatacattttcattatccaaaatcagcttcaacaaatggtttctggagacaaataatttgttttcattatcattgtataatcaggttaatgatttattttttgactaaatgtgcaatttcttatcactagataactttcagtatcagtggtggttacttattacttaaatcagaggaaggattttataaagattaataaatttaattttaccaataaatattcccataatttagaaaaggatgtcgacttgctaatttcagaaataattattcatttttaaaaagccccttttaaagcatctacttgaagattggtataattttcataaaatgtctttttttttagtgtcccaaagatatcttagataaactattttgaagttcagatttcagatgaggcaacattttcttgagataattacccaagtttcatccatgttgaatggtacaaaatatttctgtgaaactaacaggaagatattttcagataactaggataacttgttgctttgttacccagcctaattgaagagtggcagaggctactacaaaaagcaaccttttcattttcactaagagtttaaaagctattgtattattaaaaagtctttacaatgcttgtttcaaagaaccaacagaaaaaaaagctaagaaaactgagaactaacattaaaaaaattaaatttagaataagaatgatttctttaatttgtcctttttttctttggtctaaaacattattaaatttttgtaaatattttgatttaatgtgtcttagatcctcattattttaatacaggaaaagaaaagatttagtaatttcttaccatgctaatatgtaaagttcatgccatccaggcatttaagagcgatcctcatcccttcagcaatatgtatttgagttcacactatttctgttttacagcagttttgaaaaacacatactatgccaccaattgtcatattatttttagatgatgtaacatagccatcaaaattaatattatgtaatgcctaatacttagtatgtaaatgtcacgagatcatttttacattaaacgtgaaaaaaaaaaaaaaaaaaaaaaaaaaaaaaaaaaaaaacaccccacccacaaaaaaaaaaaaaaaaaaaaaaaataaactaaaagaaccacataaggcaaccaataaaagataaaaaacaaagcgatataatcaacacacagaaaacaataaactagagtggtgcgggtgtggtcctctttattctgaatcactgctgggctgtgtgcgcctttctgcgagaggtctcatgtgactcgtaatttgtcgagacgagacagactcgacactccaatcgagtgtgatgtatattcacactgcacaacacgctcctcgtgaacccagtagtgatcaattaatcatcatcgcgatgggtatctgcaagaattatgcgctgctatggcacagctgtacatcggaaagaacatactcgctcttcgttcttcgtgggtgtcggcgtgtgcaaggtatcatgactgaactctcatatatcagtagacgagaaatgaatcgatcggactcatgtgcaatcgttcctccacacttacagatccgtcaggggcttgtgtgtctattaggcgagagaaggtaacaacgataatgacaatgtggcgaggggacggcgaagtgaggcatggagtggttagatc

SEQ ID NO: 365030 - DNA, 1502 bp, Homo sapiens
agtcacccaatgaatggctgtcctggtcacagggccgcacccctggcccctcacgaggggaatgtgtgtagcagagggggtgctgaccatgctggaactgcggcgactacagagcctgcgggaacctcccctttcgcccaagatctgctctgtccccctcatcctcctcccagggccctggcgtctgggtcaagcagcgccccacacctcgacccctcaccccctcctcccgggctcttcctgcggcctcccctccacagtccgcaggctctgggacaggaccgagtccttggctgcctgtggagctcctgtgccagcagctgcgccccggctgcgctccggatacccccatccccgccaccgccgacctcccgctccaccgactgctgctcacgcccgacgggttcacgccgcccctgccccgtgaaggaccgcgctgcggtgcggaggcaggatgacgcaaaacacggtgattgtgaatggagttgctatggcctctaggccatcccagcccacccacgtcaacgtccacatccaccaggagtcagctttgacacaactgctgaaagctggaggttctctgaagaagtttctttttcaccctggggacactgtgccttccacagccaggattggttatgagcagctggctctaggggtgactcagatattgctgggggttgtgagttgtgttcttggagtgtgtctcagcttggggccctggactgtgctgcgtgcctcaggctgtgccttctgggcggggtctgtggtgatcgcagcaggagctggggccattgtccatgagaagcacccgggcaaacttgctggctatatatccagcctgctcaccctggcaggctttgctacagctatggctgctgttgtcctctgcgtgaatagcttcatctggcaaactgaaccctttttatacatcgacactgtgtgtgatcgctcagaccctgtcttccctaccactgggtacagatggatgcggcgaagtcaagagaaccaatggcagaaggaggagtgtagagcttacatgcagatgctgaggaagttgttcacagcaatccgtgccctgttcctggctgtctgtgtcttgaaggtcattgtgtccttggtttccttgggagtaggtcttcgaaacttgtgtggccagagctcccagcccctgaatgaggaaggatcagagaagaggctactgggggagaattcagtgcccccttcgccctctagggagcagacctccactgccattgtcctgtgagccgccaaagaccccacggggtgcccgcatgtccctgtctagggcagcccagggcccccactcctggctcctcacacttgcctcccctatggccgctctccagaccctcctcctttcttctccccacatccgcacctgctgttcccactctggggttctcaagtccatgaacagatattgttgcattttccacaatgctgattaaacataataaacaatccagaaaagcagtttt

SEQ ID NO: 365031 - DNA, 1378 bp, Homo sapiens
gcgggggtggggctgaacttcagcccctcgggttcatgacaggctgcagggcctggggtccgtctggggttctcctgctgcgcgagggtcactgggctctggggagctgggagggtccgcgggcggacggccctgggaaagcccgtggggtcgttctcgcctccagccccgcccggccagggccggcgtgcaagtgtgcgcgagtgggagcgcagggggcgcgcgggggctcggtcttctcccgcccggtccgctcctccgggcggaaccccctttgccgggcccccgggccgcagctggtttcgggaaaccgcgcagcctgggcggggccgcagcccccacccgtgcatctgccgtctccgccctcccgtcgctcccctgctcggggtcagctagtgtccgctctgctcggccgcgggctcccggaggactgcaggcaggatgacgcaaaacacggtgattgtgaatggagttgctatggcctctaggccatcccagcccacccacgtcaacgtccacatccaccaggagtcagctttgacacaactgctgaaagctggaggttctctgaagaagtttctttttcaccctggggacactgtgccttccacagccaggattggttatgagcagctggctctaggggtgatcgcagcaggagctggggccattgtccatgagaagcacccgggcaaacttgctggctatatatccagcctgctcaccctggcaggctttgctacagctatggctgctgttgtcctctgcgtgaatagcttcatctggcaaactgaaccctttttatacatcgacactgtgtgtgatcgctcagaccctgtcttccctaccactgggtacagatggatgcggcgaagtcaagagaaccaatggcagaaggaggagtgtagagcttacatgcagatgctgaggaagttgttcacagcaatccgtgccctgttcctggctgtctgtgtcttgaaggtcattgtgtccttggtttccttgggagtaggtcttcgaaacttgtgtggccagagctcccagcccctgaatgaggaaggatcagagaagaggctactgggggagaattcagtgcccccttcgccctctagggagcagacctccactgccattgtcctgtgagccgccaaagaccccacggggtgcccgcatgtccctgtctagggcagcccagggcccccactcctggctcctcacacttgcctcccctatggccgctctccagaccctcctcctttcttctccccacatccgcacctgctgttcccactctggggttctcaagtccatgaacagatattgttgcattttccacaatgctgattaaacataataaacaatccagaaaagcagtttt

SEQ ID NO: 365032 - DNA, 496 bp, Homo sapiens
gcctacattcctaggggaacttcatttctgctcaggagagaattttaaatcactgagaaaaagaggatgtattttccgcaaatggaacgtatctttcagaagttaaacatctgaatgacagcaacagaacttggatccgtgtctcccaacggcgaaggttggtcacccagctcccaaattccagatggtcggcatttaaaagtgaaaactgaaagcataaaggcacttagaagaaaatgtggaagattattttataatctcgaaacggggaagtcctttaaaagtgtaagagctagacaccataaatagaatgaaatagaacatggattgtatgaatatacaagcaaggtcaaaaaataaacttcaaattgtaaagaaacatttgaaactcatatcacaaacggtaattttgtgaatagataaagaacttccatagaaaaaagcaaaacaaaacaaaacgaaacaaggacataggatgtgaacggagagctcacaa

SEQ ID NO: 365033 - DNA, 1041 bp, Homo sapiens
gcgggggtggggctgaacttcagcccctcgggttcatgacaggctgcagggcctggggtccgtctggggttctcctgctgcgcgagggtcactgggctctggggagctgggagggtccgcgggcggacggccctgggaaagcccgtggggtcgttctcgcctccagccccgcccggccagggccggcgtgcaagtgtgcgcgagtgggagcgcagggggcgcgcgggggctcggtcttctcccgcccggtccgctcctccgggcggaaccccctttgccgggcccccgggccgcagctggtttcgggaaaccgcgcagcctgggcggggccgcagcccccacccgtgcatctgccgtctccgccctcccgtcgctcccctgctcggggtcagctagtgtccgctctgctcggccgcgggctcccggaggactgcaggcagggcctccgcggcccgggagaccctcttgccgcaggaccctctgtcacgaggagtccccagggccatgcccccaccccgtcctgtccacaggacgtctttcttcctccaacctggtttccaggaggactcacgtaggagggagggacagctgggtgcaggtgtttctccccagaaaaacggctggagagcgggaggagaggcctggggctggcgcgtcccgtccaccttctgccgcctgcacgcctggaccctggctggagccctacggtggggtggctcctgggacggggccagggagcggcggggctgccggacgctttccccagccccggggcacgggaagagctggacagaggaaagtgttcggggcagccgggaagagcccaccacctaccaggcgtcgggcggcccgcaggggaatctccgtggtgccggcctggttcagatccgactcttcaggcgggggcgaggcagatctaggggttggcgtggggcgggggaagcggtggtcctgggggcccggaggtagctggaacccgaggtgccctcagggcgaggcctgggccgtcaagggaaggtctggctggaatctggggctggg

SEQ ID NO: 365034 - DNA, 1623 bp, Homo sapiens
gcgggggtggggctgaacttcagcccctcgggttcatgacaggctgcagggcctggggtccgtctggggttctcctgctgcgcgagggtcactgggctctggggagctgggagggtccgcgggcggacggccctgggaaagcccgtggggtcgttctcgcctccagccccgcccggccagggccggcgtgcaagtgtgcgcgagtgggagcgcagggggcgcgcgggggctcggtcttctcccgcccggtccgctcctccgggcggaaccccctttgccgggcccccgggccgcagctggtttcgggaaaccgcgcagcctgggcggggccgcagcccccacccgtgcatctgccgtctccgccctcccgtcgctcccctgctcggggtcagctagtgtccgctctgctcggccgcgggctcccggaggactgcaggcaggatgacgcaaaacacggtgattgtgaatggagttgctatggcctctaggccatcccagcccacccacgtcaacgtccacatccaccaggagtcagctttgacacaactgctgaaagctggaggttctctgaagaagtttctttttcaccctggggacactgtgccttccacagccaggattggttatgagcagctggctctaggggtgactcagatattgctgggggttgtgagttgtgttcttggagtgtgtctcagcttggggccctggactgtgctgcgtgcctcaggctgtgccttctgggcggggtctgtggtgatcgcagcaggagctggggccattgtccatgagaagcacccgggcaaacttgctggctatatatccagcctgctcaccctggcaggctttgctacagctatggctgctgttgtcctctgcgtgaatagcttcatctggcaaactgaaccctttttatacatcgacactgtgtgtgatcgctcagaccctgtcttccctaccactgggtacagatggatgcggcgaagtcaagagaaccaatggcagaaggaggagtgtagagcttacatgcagatgctgaggaagttgttcacagcaatccgtgccctgttcctggctgtctgtgtcttgaaggtcattgtgtccttggtttccttgggagtaggtcttcgaaacttgtgtggccagagctcccagcccctgaatgaggaaggatcagagaagaggctactgggggagaattcagtgcccccttcgccctctagggagcagacctccactgccattgtcctgtgagccgccaaagaccccacggggtgcccgcatgtccctgtctagggcagcccagggcccccactcctggctcctcacacttgcctcccctatggccgctctccagaccctcctcctttcttctccccacatccgcacctgctgttcccactctggggttctcaagtccatgaacagatattgttgcattttccacaatgctgattaaacataataaacaatccagaaaagcagttttgcccagaaagatatggtttccttttgtttattacacctcgtgcggccatggaaagggctttctttgtgtcggtatgtatgaggttaaatggggagctgatttatcccattaaaacactgtcccaagaagattaa

SEQ ID NO: 365035 - DNA, 1229 bp, Homo sapiens
tcgctagctgttcagaggatcccgacggcattgcagcacgggtgatgacaggccgtgagctattgtgcccagctgggatcttgacaaagacactatttctctcctttcacctgtgctgtgtatttttccctcgcctagttcccagacctcactgctatatgtcttctccctggcaggcaggatgacgcaaaacacggtgattgtgaatggagttgctatggcctctaggccatcccagcccacccacgtcaacgtccacatccaccaggagtcagctttgacacaactgctgaaagctggaggttctctgaagaagtttctttttcaccctggggacactgtgccttccacagccaggattggttatgagcagctggctctaggggtgactcagatattgctgggggttgtgagttgtgttcttggagtgtgtctcagcttggggccctggactgtgctgcgtgcctcaggctgtgccttctgggcggggtctgtggtgatcgcagcaggagctggggccattgtccatgagaagcacccgggcaaacttgctggctatatatccagcctgctcaccctggcaggctttgctacagctatggctgctgttgtcctctgcgtgaatagcttcatctggcaaactgaaccctttttatacatcgacactgtgtgtgatcgctcagaccctgtcttccctaccactgggtacagatggatgcggcgaagtcaagagaaccaatggcagaaggaggagtgtagagcttacatgcagatgctgaggaagttgttcacagcaatccgtgccctgttcctggctgtctgtgtcttgaaggtcattgtgtccttggtttccttgggagtaggtcttcgaaacttgtgtggccagagctcccagcccctgaatgaggaaggatcagagaagaggctactgggggagaattcagtgcccccttcgccctctagggagcagacctccactgccattgtcctgtgagccgccaaagaccccacggggtgcccgcatgtccctgtctagggcagcccagggcccccactcctggctcctcacacttgcctcccctatggccgctctccagaccctcctcctttcttctccccacatccgcacctgctgttcccactctggggttctcaagtccatgaacagatattgttgcattttccacaatgctgattaaacataataaacaatccagaaaagcagtttt

SEQ ID NO: 365036 - DNA, 1841 bp, Homo sapiens
  misc_feature (1524)..(1524): n is a, c, g, or t
  misc_feature (1527)..(1527): n is a, c, g, or t
  misc_feature (1541)..(1541): n is a, c, g, or t
  misc_feature (1551)..(1551): n is a, c, g, or t
  misc_feature (1553)..(1553): n is a, c, g, or t
  misc_feature (1555)..(1555): n is a, c, g, or t
  misc_feature (1557)..(1558): n is a, c, g, or t
  misc_feature (1565)..(1565): n is a, c, g, or t
  misc_feature (1568)..(1568): n is a, c, g, or t
  misc_feature (1571)..(1571): n is a, c, g, or t
  misc_feature (1573)..(1573): n is a, c, g, or t
  misc_feature (1583)..(1583): n is a, c, g, or t
  misc_feature (1585)..(1585): n is a, c, g, or t
gcgggggtggggctgaacttcagcccctcgggttcatgacaggctgcagggcctggggtccgtctggggttctcctgctgcgcgagggtcactgggctctggggagctgggagggtccgcgggcggacggccctgggaaagcccgtggggtcgttctcgcctccagccccgcccggccagggccggcgtgcaagtgtgcgcgagtgggagcgcagggggcgcgcgggggctcggtcttctcccgcccggtccgctcctccgggcggaaccccctttgccgggcccccgggccgcagctggtttcgggaaaccgcgcagcctgggcggggccgcagcccccacccgtgcatctgccgtctccgccctcccgtcgctcccctgctcggggtcagctagtgtccgctctgctcggccgcgggctcccggaggactgcaggcaggatgacgcaaaacacggtgattgtgaatggagttgctatggcctctaggccatcccagcccacccacgtcaacgtccacatccaccaggagtcagctttgacacaactgctgaaagctggaggttctctgaagaagtttctttttcaccctggggacactgtgccttccacagccaggattggttatgagcagctggctctaggggtgactcagatattgctgggggttgtgagttgtgttcttggagtgtgtctcagcttggggccctggactgtgctgcgtgcctcaggctgtgccttctgggcggggtctgtggtgatcgcagcaggagctggggccattgtccatgagaagcacccgggcaaacttgctggctatatatccagcctgctcaccctggcaggctttgctacagctatggctgctgttgtcctctgcgtgaatagcttcatctggcaaactgaaccctttttatacatcgacactgtgtgtgatcgctcagaccctgtcttccctaccactgggtacagatggatgcggcgaagtcaagagaaccaatggcagaaggaggagtgtagagcttacatgcagatgctgaggaagttgttcacagcaatccgtgccctgttcctggctgtctgtgtcttgaaggtcattgtgtccttggtttccttgggagtaggtcttcgaaacttgtgtggccagagctcccagcccctgaatgaggaaggatcagagaagaggctactgggggagaattcagtgcccccttcgccctctagggagcagacctccactgccattgtcctgtgagccgccaaagaccccacggggtgcccgcatgtccctgtctagggcagcccagggcccccactcctggctcctcacacttgcctcccctatggccgctctccagaccctcctcctttcttctccccacatccgcacctgctgttcccactctggggttctcaagtccatgaacagatattgttgcattttccacaatgctgattaaacataataaacaatccagaaaagcagttttaaaaaaaaaaaaaaaaaaaaaaaaaaaaaaaaaanaanaaaaaaaaaaaaangaaaaaaaanananannaacaaanaanacnanaaaaaaaaananagaaagaaaggcgaaacaaaaagttaaaagagaacgactatcacaacaggacaacgagcgccacaataaatgacccagaagactaaacaacaaacaacccggacacgctcgcgaccacaagtgcactcgagcccaaaacgcccatcgagcgggtggcacaatccaggaagaaagcgacccacgagaggtgacccaccaacagggaaagaccacaaccccgcagaaccagtctataccagcggacgcaagactacac

SEQ ID NO: 365037 - DNA, 1091 bp, Homo sapiens
tcatcaaaccctcccctataataaaacttttaagaagtcacattattggaaaactaaacttcaacatttggcctactcaagctcttgtgaagttctcctagggtttcgatgaccatcgaaaccctaccaggagtcagctttgacacaactgctgaaagctggaggttctctgaagaagtttctttttcaccctggggacactgtgccttccacagccaggattggttatgagcagctggctctaggggtgactcagatattgctgggggttgtgagttgtgttcttggagtgtgtctcagcttggggccctggactgtgctgcgtgcctcaggctgtgccttctgggcggggtctgtggtgatcgcagcaggagctggggccattgtccatgagaagcacccgggcaaacttgctggctatatatccagcctgctcaccctggcaggctttgctacagctatggctgctgttgtcctctgcgtgaatagcttcatctggcaaactgaaccctttttatacatcgacactgtgtgtgatcgctcagaccctgtcttccctaccactgggtacagatggatgcggcgaagtcaagagaaccaatggcagaaggaggagtgtagagcttacatgcagatgctgaggaagttgttcacagcaatccgtgccctgttcctggctgtctgtgtcttgaaggtcattgtgtccttggtttccttgggagtaggtcttcgaaacttgtgtggccagagctcccagcccctgaatgaggaaggatcagagaagaggctactgggggagaattcagtgcccccttcgccctctagggagcagacctccactgccattgtcctgtgagccgccaaagaccccacggggtgcccgcatgtccctgtctagggcagcccagggcccccactcctggctcctcacacttgcctcccctatggccgctctccagaccctcctcctttcttctccccacatccgcacctgctgttcccactctggggttctcaagtccatgaacagatattgttgcattttccacaatgctgattaaacataataaacaatccagaaaagcagtttt

SEQ ID NO: 365038 - DNA, 1063 bp, Homo sapiens
aaatagccaagcctatgagaagggtgaggggagacccaggccagtgctgcttcatggattttaaggggacagaatcttccagaatcagagctgcagagaggtcaaggcagaggaaaaggagaggagagccacctaggtaggagccaggcagctggtcccagggcagccggggcatgtggactcacgggaaggggtctggtttctcatcctgtcttgcaggtgactcagatattgctgggggttgtgagttgtgttcttggagtgtgtctcagcttggggccctggactgtgctgcgtgcctcaggctgtgccttctgggcggggtctgtggtgatcgcagcaggagctggggccattgtccatgagaagcacccgggcaaacttgctggctatatatccagcctgctcaccctggcaggctttgctacagctatggctgctgttgtcctctgcgtgaatagcttcatctggcaaactgaaccctttttatacatcgacactgtgtgtgatcgctcagaccctgtcttccctaccactgggtacagatggatgcggcgaagtcaagagaaccaatggcagaaggaggagtgtagagcttacatgcagatgctgaggaagttgttcacagcaatccgtgccctgttcctggctgtctgtgtcttgaaggtcattgtgtccttggtttccttgggagtaggtcttcgaaacttgtgtggccagagctcccagcccctgaatgaggaaggatcagagaagaggctactgggggagaattcagtgcccccttcgccctctagggagcagacctccactgccattgtcctgtgagccgccaaagaccccacggggtgcccgcatgtccctgtctagggcagcccagggcccccactcctggctcctcacacttgcctcccctatggccgctctccagaccctcctcctttcttctccccacatccgcacctgctgttcccactctggggttctcaagtccatgaacagatattgttgcattttccacaatgctgattaaacataataaacaatccagaaaagcagtttt

SEQ ID NO: 365039 - DNA, 1303 bp, Homo sapiens
aggagaaggagaaagaagaagaggcaggaggaggagaaaagagaagggaaaggaaggagaggagagccggcccatcctgagtttgggccctggcgtctgggtcaagcagcgccccacacctcgacccctcaccccctcctcccgggctcttcctgcggcctcccctccacagtccgcaggctctgggacaggaccgagtccttggctgcctgtggagctcctgtgccagcagctgcgccccggctgcgctccggatacccccatccccgccaccgccgacctcccgctccaccgactgctgctcacgcccgacgggttcacgccgcccctgccccgtgaaggaccgcgctgcggtgcggaggcaggatgacgcaaaacacggtgattgtgaatggagttgctatggcctctaggccatcccagcccacccacgtcaacgtccacatccaccaggagtcagctttgacacaactgctgaaagctggaggttctctgaagaagtttctttttcaccctggggacactgtgccttccacagccaggattggttatgagcagctggctctaggggtgatcgcagcaggagctggggccattgtccatgagaagcacccgggcaaacttgctggctatatatccagcctgctcaccctggcaggctttgctacagctatggctgctgttgtcctctgcgtgaatagcttcatctggcaaactgaaccctttttatacatcgacactgtgtgtgatcgctcagaccctgtcttccctaccactgggtacagatggatgcggcgaagtcaagagaaccaatggcagaaggaggagtgtagagcttacatgcagatgctgaggaagttgttcacagcaatccgtgccctgttcctggctgtctgtgtcttgaaggtcattgtgtccttggtttccttgggagtaggtcttcgaaacttgtgtggccagagctcccagcccctgaatgaggaaggatcagagaagaggctactgggggagaattcagtgcccccttcgccctctagggagcagacctccactgccattgtcctgtgagccgccaaagaccccacggggtgcccgcatgtccctgtctagggcagcccagggcccccactcctggctcctcacacttgcctcccctatggccgctctccagaccctcctcctttcttctccccacatccgcacctgctgttcccactctggggttctcaagtccatgaacagatattgttgcattttccacaatgctgattaaacataataaacaatccagaaaagcagtttt

SEQ ID NO: 365040 - DNA, 1394 bp, Homo sapiens
gcgggggtggggctgaacttcagcccctcgggttcatgacaggctgcagggcctggggtccgtctggggttctcctgctgcgcgagggtcactgggctctggggagctgggagggtccgcgggcggacggccctgggaaagcccgtggggtcgttctcgcctccagccccgcccggccagggccggcgtgcaagtgtgcgcgagtgggagcgcagggggcgcgcgggggctcggtcttctcccgcccggtccgctcctccgggcggaaccccctttgccgggcccccgggccgcagctggtttcgggaaaccgcgcagcctgggcggggccgcagcccccacccgtgcatctgccgtctccgccctcccgtcgctcccctgctcggggtcagctagtgtccgctctgctcggccgcgggctcccggaggactgcaggcaggatgacgcaaaacacggtgattgtgaatggagttgctatggcctctaggccatcccagcccacccacgtcaacgtccacatccaccaggagtcagctttgacacaactgctgaaagctggaggttctctgaagaagtttctttttcaccctggggacactgtgccttccacagccaggattggttatgagcagctggctctaggggtgactcagatattgctgggggttgtgagttgtgttcttggagtgtgtctcagcttggggccctggactgtgctgcgtgcctcaggctgtgccttctgggcggggtctgtggtgatcgcagcaggagctggggccattgtccatgagaagcacccgggcaaacttgctggctatatatccagcctgctcaccctggcaggctttgctacagctatggctgctgttgtcctctgcgtgaatagcttcatctggcaaactgaaccctttttatacatcgacactgtgtgtgatcgctcagaccaagttgttcacagcaatccgtgccctgttcctggctgtctgtgtcttgaaggtcattgtgtccttggtttccttgggagtaggtcttcgaaacttgtgtggccagagctcccagcccctgaatgaggaaggatcagagaagaggctactgggggagaattcagtgcccccttcgccctctagggagcagacctccactgccattgtcctgtgagccgccaaagaccccacggggtgcccgcatgtccctgtctagggcagcccagggcccccactcctggctcctcacacttgcctcccctatggccgctctccagaccctcctcctttcttctccccacatccgcacctgctgttcccactctggggttctcaagtccatgaacagatattgttgcattttccacaatgctgattaaacataataaacaatccagaaaagcagtttt

SEQ ID NO: 365041 - DNA, 1292 bp, Homo sapiens
gcgggggtggggctgaacttcagcccctcgggttcatgacaggctgcagggcctggggtccgtctggggttctcctgctgcgcgagggtcactgggctctggggagctgggagggtccgcgggcggacggccctgggaaagcccgtggggtcgttctcgcctccagccccgcccggccagggccggcgtgcaagtgtgcgcgagtgggagcgcagggggcgcgcgggggctcggtcttctcccgcccggtccgctcctccgggcggaaccccctttgccgggcccccgggccgcagctggtttcgggaaaccgcgcagcctgggcggggccgcagcccccacccgtgcatctgccgtctccgccctcccgtcgctcccctgctcggggtcagctagtgtccgctctgctcggccgcgggctcccggaggactgcaggcaggatgacgcaaaacacggtgattgtgaatggagttgctatggcctctaggccatcccagcccacccacgtcaacgtccacatccaccaggagtcagctttgacacaactgctgaaagctggaggttctctgaagaagtttctttttcaccctggggacactgtgccttccacagccaggattggttatgagcagctggctctaggggtgactcagatattgctgggggttgtgagttgtgttcttggagtgtgtctcagcttggggccctggactgtgctgcgtgcctcaggctgtgccttctgggcggggtctgtggtgatcgcagcaggagctggggccattgtccatgagaagcacccgggcaaacttgctggctatatatccagcctgctcaccctggcaggctttgctacagctatggctgctgttgtcctctgcgtgaatagcttcatctggcaaactgaaccctttttatacatcgacactgtgtgtgatcgctcagaccctgtcttccctaccactgggtacagatggatgcggcgaagtcaagagaaccaatggcagaaggaggagtgtagagcttacatgcagatgctgaggctgaacagcaagtgcggagccctggtggaggggcgagcctggcctgtgagaactgtgagggtcaggctggacactgcagagcaggcaacgggttgggaggagcagagtttggaaagatggggttgtgccactgtaaggggctttggctttcatgccgaatgagatgggagccactagagggctcggagcgagcactgagactctctaatgtatatgacgaatagactcccagtgggacacgggataagcct

SEQ ID NO: 365042 - DNA, 738 bp, Homo sapiens
gagtggctagcctggactggctgggctcatgagaatgagttgcctccaccctgtcccaacagctgacagccaggagccactctcccagctgcaggcctttgtggtccatcttgtcctgcttcctcactgtggacccctgtctgggccaccctagtgtgctaagctgagcagtgcagtgtgaacagggcccatggtgtattctaggccacagcccagcactcctctgggctgctctcaaaccatgtcccatcttcagcatccctcccatcagcctctacagaggctgatggaagttgttcacagcaatccgtgccctgttcctggctgtctgtgtcttgaaggtcattgtgtccttggtttccttgggagtaggtcttcgaaacttgtgtggccagagctcccagcccctgaatgaggaaggatcagagaagaggctactgggggagaattcagtgcccccttcgccctctagggagcagacctccactgccattgtcctgtgagccgccaaagaccccacggggtgcccgcatgtccctgtctagggcagcccagggcccccactcctggctcctcacacttgcctcccctatggccgctctccagaccctcctcctttcttctccccacatccgcacctgctgttcccactctggggttctcaagtccatgaacagatattgttgcattttccacaatgctgattaaacataataaacaatccagaaaagcagtttt

SEQ ID NO: 365043 - DNA, 1203 bp, Homo sapiens
gcgggggtggggctgaacttcagcccctcgggttcatgacaggctgcagggcctggggtccgtctggggttctcctgctgcgcgagggtcactgggctctggggagctgggagggtccgcgggcggacggccctgggaaagcccgtggggtcgttctcgcctccagccccgcccggccagggccggcgtgcaagtgtgcgcgagtgggagcgcagggggcgcgcgggggctcggtcttctcccgcccggtccgctcctccgggcggaaccccctttgccgggcccccgggccgcagctggtttcgggaaaccgcgcagcctgggcggggccgcagcccccacccgtgcatctgccgtctccgccctcccgtcgctcccctgctcggggtcagctagtgtccgctctgctcggccgcgggctcccggaggactgcaggcaggatgacgcaaaacacggtgattgtgaatggagttgctatggcctctaggccatcccagcccacccacgtcaacgtccacatccaccaggagtcagctttgacacaactgctgaaagctggaggttctctgaagaagtttctttttcaccctggggacactgtgccttccacagccaggattggttatgagcagctggctctaggggtgactcagatattgctgggggttgtgagttgtgttcttggagtgtgtctcagcttggggccctggactgtgctgcgtgcctcaggctgtgccttctgggcggggtctgtggtgatcgcagcaggagctggggccattgtccatgagaagcacccgggcaaacttgctggctatatatccagcctgctcaccctggcaggctttgctacagctatggctgctgttgtcctctgcgtgaatagcttcatctggcaaactgaaccctttttatacatcgacactgtgtgtgatcgctcagaccctccactgccattgtcctgtgagccgccaaagaccccacggggtgcccgcatgtccctgtctagggcagcccagggcccccactcctggctcctcacacttgcctcccctatggccgctctccagaccctcctcctttcttctccccacatccgcacctgctgttcccactctggggttctcaagtccatgaacagatattgttgcattttccacaatgctgattaaacataataaacaatccagaaaagcagtttt

SEQ ID NO: 365044 - DNA, 611 bp, Homo sapiens
gagtggctagcctggactggctgggctcatgagaatgagttgcctccaccctgtcccaacagctgacagccaggagccactctcccagctgcaggcctttgtggtccatcttgtcctgcttcctcactgtggacccctgtctgggccaccctagtgtgctaagctgagcagtgcagtgtgaacagggcccatggtgtattctaggccacagcccagcactcctctgggctgctctcaaaccatgtcccatcttcagcatccctcccatcagcctctacagaggctgatggaagttgttcacagcaatccgtgccctgttcctggctgtctgtgtcttgaaggtcattgtgtccttggtttccttgggagtaggtcttcgaaacttgtgtggccagagctcccagcccctgaatgaggaaggatcagagaagaggctactgggggagaattcagtgcccccttcgccctctagggagcagaccctcctcctttcttctccccacatccgcacctgctgttcccactctggggttctcaagtccatgaacagatattgttgcattttccacaatgctgattaaacataataaacaatccagaaaagcagtttt

SEQ ID NO: 365045 - DNA, 1489 bp, Homo sapiens
gcgggggtggggctgaacttcagcccctcgggttcatgacaggctgcagggcctggggtccgtctggggttctcctgctgcgcgagggtcactgggctctggggagctgggagggtccgcgggcggacggccctgggaaagcccgtggggtcgttctcgcctccagccccgcccggccagggccggcgtgcaagtgtgcgcgagtgggagcgcagggggcgcgcgggggctcggtcttctcccgcccggtccgctcctccgggcggaaccccctttgccgggcccccgggccgcagctggtttcgggaaaccgcgcagcctgggcggggccgcagcccccacccgtgcatctgccgtctccgccctcccgtcgctcccctgctcggggtcagctagtgtccgctctgctcggccgcgggctcccggaggactgcaggcaggatgacgcaaaacacggtgattgtgaatggagttgctatggcctctaggccatcccagcccacccacgtcaacgtccacatccaccaggagtcagctttgacacaactgctgaaagctggaggttctctgaagaagtttctttttcaccctggggacactgtgccttccacagccaggattggttatgagcagctggctctaggggtgactcagatattgctgggggttgtgagttgtgttcttggagtgtgtctcagcttggggccctggactgtgctgcgtgcctcaggctgtgccttctgggcggggtctgtggtgatcgcagcaggagctggggccattgtccatgagaagcacccgggcaaacttgctggctatatatccagcctgctcaccctggcaggctttgctacagctatggctgctgttgtcctctgcgtgaatagcttcatctggcaaactgaaccctttttatacatcgacactgtgtgtgatcgctcagaccctgtcttccctaccactgggtacagatggatgcggcgaagtcaagagaaccaatggcagaaggaggagtgtagagcttacatgcagatgctgaggaagttgttcacagcaatccgtgccctgttcctggctgtctgtgtcttgaaggtcattgtgtccttggtttccttgggagtaggtcttcgaaacttgtgtggccagagctcccagcccctgaatgaggaaggatcagagaagaggctactgggggagaattcagtgcccccttcgccctctagggagcagacctccactgccattgtcctgtgagccgccaaagaccccacggggtgcccgcatgtccctgtctagggcagcccagggcccccactcctggctcctcacacttgcctcccctatggccgctctccagaccctcctcctttcttctccccacatccgcacctgctgttcccactctggggttctcaagtccatgaacagatattgttgcattttccacaatgctgattaaacataataaacaatccagaaaagcagtttt

SEQ ID NO: 365046 - DNA, 1216 bp, Homo sapiens
caacaccccatctctctctctctaaaaaaagagaactggccgtgagctattgtgcccagctgggatcttgacaaagacactatttctctcctttcacctgtgctgtgtatttttccctcgcctagttcccagacctcactgctatatgtcttctccctggcaggcaggatgacgcaaaacacggtgattgtgaatggagttgctatggcctctaggccatcccagcccacccacgtcaacgtccacatccaccaggagtcagctttgacacaactgctgaaagctggaggttctctgaagaagtttctttttcaccctggggacactgtgccttccacagccaggattggttatgagcagctggctctaggggtgactcagatattgctgggggttgtgagttgtgttcttggagtgtgtctcagcttggggccctggactgtgctgcgtgcctcaggctgtgccttctgggcggggtctgtggtgatcgcagcaggagctggggccattgtccatgagaagcacccgggcaaacttgctggctatatatccagcctgctcaccctggcaggctttgctacagctatggctgctgttgtcctctgcgtgaatagcttcatctggcaaactgaaccctttttatacatcgacactgtgtgtgatcgctcagaccctgtcttccctaccactgggtacagatggatgcggcgaagtcaagagaaccaatggcagaaggaggagtgtagagcttacatgcagatgctgaggaagttgttcacagcaatccgtgccctgttcctggctgtctgtgtcttgaaggtcattgtgtccttggtttccttgggagtaggtcttcgaaacttgtgtggccagagctcccagcccctgaatgaggaaggatcagagaagaggctactgggggagaattcagtgcccccttcgccctctagggagcagacctccactgccattgtcctgtgagccgccaaagaccccacggggtgcccgcatgtccctgtctagggcagcccagggcccccactcctggctcctcacacttgcctcccctatggccgctctccagaccctcctcctttcttctccccacatccgcacctgctgttcccactctggggttctcaagtccatgaacagatattgttgcattttccacaatgctgattaaacataataaacaatccagaaaagcagtttt

SEQ ID NO: 365047 - DNA, 1224 bp, Homo sapiens
gaagacaagccctgcaggaaggcacgcatgtggtcattctgtctgtagcctcccattcctccctgctttccccagctgcatctacctggatcctgaatttgaaccaagtggtccaaacggcccggtcacctgagcaacccctctgcaggaaccgcagatttgtacaaaaacaaaaaagcacaaaaactggaagcagtctggagtctgtcaacaggagaatggatgaataagggaactatctgattgtggcctatttgatggaatattactctgcaatcaaaaggaacagactgagactgatacacgcagcatggatgagtcttcaggacattgtgtcaagtaagagaagtcagattcaaaagatgaagtcctttcctgagcacttactacatgccagacaccataccagggctggctacatactctgttgggaagaaggctcaaaaatgaatcctctcaagcagacccgctttggtttccacccctctattctgagaacccaagctcaacccatgtgttctgccttcaggtagaaaatgtcagaatcatagggaagactaagctgaaaaaagaatttggagttccaaaggaattctgtgccacctgccgtccggcaattccctttgccaggcaggatgacgcaaaacacggtgattgtgaatggagttgctatggcctctaggccatcccagcccacccacgtcaacgtccacatccaccaggagtcagctttgacacaactgctgaaagctggaggttctctgaagaagtttctttttcaccctggggacactgtgccttccacagccaggattggttatgagcagctggctctaggggactcagatattgcgtggggtaggaggtacctcctaccccacggcctcccgaagtgctgggattacaggcacaagccaccacacccggcccaacacacagctttaaaaccttcaatagtttgcaactgttcttaagagacaaaacatgggatgcaactattatgccgtccatagtagcctttacctgtttctctaacctgtaactctgctagtcctttctctttccacttgatcctgataactttctcagtcactggtgatcagatgtaaaggtatgttcttctctccctttctttgactagtctgctactcctcatccttcaaatcttgctcaattacccctttcagataagtctcccttgcgtgaggtaggagggggtaccga

SEQ ID NO: 365048 - DNA, 1414 bp, Homo sapiens
aggagaaggagaaagaagaagaggcaggaggaggagaaaagagaagggaaaggaaggagaggagagccggcccatcctgagtttgggccctggcgtctgggtcaagcagcgccccacacctcgacccctcaccccctcctcccgggctcttcctgcggcctcccctccacagtccgcaggctctgggacaggaccgagtccttggctgcctgtggagctcctgtgccagcagctgcgccccggctgcgctccggatacccccatccccgccaccgccgacctcccgctccaccgactgctgctcacgcccgacgggttcacgccgcccctgccccgtgaaggaccgcgctgcggtgcggaggcaggatgacgcaaaacacggtgattgtgaatggagttgctatggcctctaggccatcccagcccacccacgtcaacgtccacatccaccaggagtcagctttgacacaactgctgaaagctggaggttctctgaagaagtttctttttcaccctggggacactgtgccttccacagccaggattggttatgagcagctggctctaggggtgactcagatattgctgggggttgtgagttgtgttcttggagtgtgtctcagcttggggccctggactgtgctgcgtgcctcaggctgtgccttctgggcggggtctgtggtgatcgcagcaggagctggggccattgtccatgagaagcacccgggcaaacttgctggctatatatccagcctgctcaccctggcaggctttgctacagctatggctgctgttgtcctctgcgtgaatagcttcatctggcaaactgaaccctttttatacatcgacactgtgtgtgatcgctcagaccctgtcttccctaccactgggtacagatggatgcggcgaagtcaagagaaccaatggcagaaggaggagtgtagagcttacatgcagatgctgaggaagttgttcacagcaatccgtgccctgttcctggctgtctgtgtcttgaaggtcattgtgtccttggtttccttgggagtaggtcttcgaaacttgtgtggccagagctcccagcccctgaatgaggaaggatcagagaagaggctactgggggagaattcagtgcccccttcgccctctagggagcagacctccactgccattgtcctgtgagccgccaaagaccccacggggtgcccgcatgtccctgtctagggcagcccagggcccccactcctggctcctcacacttgcctcccctatggccgctctccagaccctcctcctttcttctccccacatccgcacctgctgttcccactctggggttctcaagtccatgaacagatattgttgcattttccacaatgctgattaaacataataaacaatccagaaaagcagtttt

SEQ ID NO: 365049 - DNA, 1210 bp, Homo sapiens
gcctacattcctaggggaacttcatttctgctcaggagagaattttaaatcactgagaaaaagaggatgtattttccgcaaatggaacgtatctttcagaagttaaacatctgaatgacagcaacagaacttggatccgtgtctcccaacggcgaaggcaggatgacgcaaaacacggtgattgtgaatggagttgctatggcctctaggccatcccagcccacccacgtcaacgtccacatccaccaggagtcagctttgacacaactgctgaaagctggaggttctctgaagaagtttctttttcaccctggggacactgtgccttccacagccaggattggttatgagcagctggctctaggggtgactcagatattgctgggggttgtgagttgtgttcttggagtgtgtctcagcttggggccctggactgtgctgcgtgcctcaggctgtgccttctgggcggggtctgtggtgatcgcagcaggagctggggccattgtccatgagaagcacccgggcaaacttgctggctatatatccagcctgctcaccctggcaggctttgctacagctatggctgctgttgtcctctgcgtgaatagcttcatctggcaaactgaaccctttttatacatcgacactgtgtgtgatcgctcagaccctgtcttccctaccactgggtacagatggatgcggcgaagtcaagagaaccaatggcagaaggaggagtgtagagcttacatgcagatgctgaggaagttgttcacagcaatccgtgccctgttcctggctgtctgtgtcttgaaggtcattgtgtccttggtttccttgggagtaggtcttcgaaacttgtgtggccagagctcccagcccctgaatgaggaaggatcagagaagaggctactgggggagaattcagtgcccccttcgccctctagggagcagacctccactgccattgtcctgtgagccgccaaagaccccacggggtgcccgcatgtccctgtctagggcagcccagggcccccactcctggctcctcacacttgcctcccctatggccgctctccagaccctcctcctttcttctccccacatccgcacctgctgttcccactctggggttctcaagtccatgaacagatattgttgcattttccacaatgctgattaaacataataaacaatccagaaaagcagtttt

SEQ ID NO: 365050 - DNA, 1426 bp, Homo sapiens
gcgggggtggggctgaacttcagcccctcgggttcatgacaggctgcagggcctggggtccgtctggggttctcctgctgcgcgagggtcactgggctctggggagctgggagggtccgcgggcggacggccctgggaaagcccgtggggtcgttctcgcctccagccccgcccggccagggccggcgtgcaagtgtgcgcgagtgggagcgcagggggcgcgcgggggctcggtcttctcccgcccggtccgctcctccgggcggaaccccctttgccgggcccccgggccgcagctggtttcgggaaaccgcgcagcctgggcggggccgcagcccccacccgtgcatctgccgtctccgccctcccgtcgctcccctgctcggggtcagctagtgtccgctctgctcggccgcgggctcccggaggactgcagccacccacgtcaacgtccacatccaccaggagtcagctttgacacaactgctgaaagctggaggttctctgaagaagtttctttttcaccctggggacactgtgccttccacagccaggattggttatgagcagctggctctaggggtgactcagatattgctgggggttgtgagttgtgttcttggagtgtgtctcagcttggggccctggactgtgctgcgtgcctcaggctgtgccttctgggcggggtctgtggtgatcgcagcaggagctggggccattgtccatgagaagcacccgggcaaacttgctggctatatatccagcctgctcaccctggcaggctttgctacagctatggctgctgttgtcctctgcgtgaatagcttcatctggcaaactgaaccctttttatacatcgacactgtgtgtgatcgctcagaccctgtcttccctaccactgggtacagatggatgcggcgaagtcaagagaaccaatggcagaaggaggagtgtagagcttacatgcagatgctgaggaagttgttcacagcaatccgtgccctgttcctggctgtctgtgtcttgaaggtcattgtgtccttggtttccttgggagtaggtcttcgaaacttgtgtggccagagctcccagcccctgaatgaggaaggatcagagaagaggctactgggggagaattcagtgcccccttcgccctctagggagcagacctccactgccattgtcctgtgagccgccaaagaccccacggggtgcccgcatgtccctgtctagggcagcccagggcccccactcctggctcctcacacttgcctcccctatggccgctctccagaccctcctcctttcttctccccacatccgcacctgctgttcccactctggggttctcaagtccatgaacagatattgttgcattttccacaatgctgattaaacataataaacaatccagaaaagcagtttt

SEQ ID NO: 365051 - DNA, 1644 bp, Homo sapiens
gcgggggtggggctgaacttcagcccctcgggttcatgacaggctgcagggcctggggtccgtctggggttctcctgctgcgcgagggtcactgggctctggggagctgggagggtccgcgggcggacggccctgggaaagcccgtggggtcgttctcgcctccagccccgcccggccagggccggcgtgcaagtgtgcgcgagtgggagcgcagggggcgcgcgggggctcggtcttctcccgcccggtccgctcctccgggcggaaccccctttgccgggcccccgggccgcagctggtttcgggaaaccgcgcagcctgggcggggccgcagcccccacccgtgcatctgccgtctccgccctcccgtcgctcccctgctcggggtcagctagtgtccgctctgctcggccgcgggctcccggaggactgcaggcaggatgacgcaaaacacggtgattgtgaatggagttgctatggcctctaggccatcccagcccacccacgtcaacgtccacatccaccaggagtcagctttgacacaactgctgaaagctggaggttctctgaagaagtttctttttcaccctggggacactgtgccttccacagccaggattggttatgagcagctggctctaggggtgactcagatattgctgggggttgtgagttgtgttcttggagtgtgtctcagcttggggccctggactgtgctgcgtgcctcaggctgtgccttctgggcggggtctgtggtgatcgcagcaggagctggggccattgtccatgagaagcacccgggcaaacttgctggctatatatccagcctgctcaccctggcaggctttgctacagctatggctgctgttgtcctctgcgtgaatagcttcatctggcaaactgaaccctttttatacatcgacactgtgtgtgatcgctcagaccctgtcttccctaccactgggtacagatggatgcggcgaagtcaagagaaccaatggcagaaggaggagtgtagagcttacatgcagatgctgaggaagttgttcacagcaatccgtgccctgttcctggctgtctgtgtcttgaaggtcattgtgtccttggtttccttgggagtaggtcttcgaaacttgtgtggccagagctcccagcccctgaatgaggaaggatcagagaagaggctactgggggagaattcagtgcccccttcgccctctagggagcagacctccactgccattgtcctgtgagccgccaaagaccccacggggtgcccgcatgtccctgtctagggcagcccagggcccccactcctggctcctcacacttgcctcccctatggccgctctccagaccctcctcctttcttctccccacatccgcacctgctgttcccactctggggttctcaagtccatgaacagatattgttgcattttccacaatgctgattaaacataataaacaatccagaaaagcagttttagcaaagtagactaattatttaaacttaaaatgccacatatttaattaatcggccggaatttaggctcactgggacaattcgcccctatgtgaagtcgttaaccattcactggcccgacgttttacaaccttgggacttgggaaaccctggcgtt

SEQ ID NO: 365052 - DNA, 868 bp, Homo sapiens
tgcttttctggattgtttattatgtttaatcagcattgtggaaaatgcaacaattgtgttcttggagtgtgtctcagcttggggccctggactgtgctgcgtgcctcaggctgtgccttctgggcggggtctgtggtgatcgcagcaggagctggggccattgtccatgagaagcacccgggcaaacttgctggctatatatccagcctgctcaccctggcaggctttgctacagctatggctgctgttgtcctctgcgtgaatagcttcatctggcaaactgaaccctttttatacatcgacactgtgtgtgatcgctcagaccctgtcttccctaccactgggtacagatggatgcggcgaagtcaagagaaccaatggcagaaggaggagtgtagagcttacatgcagatgctgaggaagttgttcacagcaatccgtgccctgttcctggctgtctgtgtcttgaaggtcattgtgtccttggtttccttgggagtaggtcttcgaaacttgtgtggccagagctcccagcccctgaatgaggaaggatcagagaagaggctactgggggagaattcagtgcccccttcgccctctagggagcagacctccactgccattgtcctgtgagccgccaaagaccccacggggtgcccgcatgtccctgtctagggcagcccagggcccccactcctggctcctcacacttgcctcccctatggccgctctccagaccctcctcctttcttctccccacatccgcacctgctgttcccactctggggttctcaagtccatgaacagatattgttgcattttccacaatgctgattaaacataataaacaatccagaaaagcagtttt

SEQ ID NO: 365053 - DNA, 1362 bp, Homo sapiens
gcgggggtggggctgaacttcagcccctcgggttcatgacaggctgcagggcctggggtccgtctggggttctcctgctgcgcgagggtcactgggctctggggagctgggagggtccgcgggcggacggccctgggaaagcccgtggggtcgttctcgcctccagccccgcccggccagggccggcgtgcaagtgtgcgcgagtgggagcgcagggggcgcgcgggggctcggtcttctcccgcccggtccgctcctccgggcggaaccccctttgccgggcccccgggccgcagctggtttcgggaaaccgcgcagcctgggcggggccgcagcccccacccgtgcatctgccgtctccgccctcccgtcgctcccctgctcggggtcagctagtgtccgctctgctcggccgcgggctcccggaggactgcaggcaggatgacgcaaaacacggtgattgtgaatggagttgctatggcctctaggccatcccagcccacccacgtcaacgtccacatccaccaggagtcagctttgacacaactgctgaaagctggaggttctctgaagaagtttctttttcaccctggggacactgtgccttccacagccaggattggttatgagcagctggctctaggggtgactcagatattgctgggggttgtgagttgtgttcttggagtgtgtctcagcttggggccctggactgtgctgcgtgcctcaggctgtgccttctgggcggggtctgtggtgatcgcagcaggagctggggccattgtccatgagaagcacccgggcaaacttgctggctatatatccagcctgctcaccctggcaggctttgctacagctatggctgctgttgtcctctgcgtgaatagcttcatctggcaaactgaaccctttttatacatcgacactgtgtgtgatcgctcagaccctgtcttccctaccactgggtacagatggatgcggcgaagtcaagagaaccaatggcagaaggaggagtgtagagcttacatgcagatgctgaggaagttgttcacagcaatccgtgccctgttcctggctgtctgtgtcttgaaggtcattgtgtccttggtttccttgggagtaggtcttcgaaacttgtgtggccagagctcccagcccctgaatgaggaaggatcagagaagaggctactgggggagaattcagtgcccccttcgccctctagggagcagaccctcctcctttcttctccccacatccgcacctgctgttcccactctggggttctcaagtccatgaacagatattgttgcattttccacaatgctgattaaacataataaacaatccagaaaagcagtttt

SEQ ID NO: 365054 - DNA, 1098 bp, Homo sapiens
gcgggggtggggctgaacttcagcccctcgggttcatgacaggctgcagggcctggggtccgtctggggttctcctgctgcgcgagggtcactgggctctggggagctgggagggtccgcgggcggacggccctgggaaagcccgtggggtcgttctcgcctccagccccgcccggccagggccggcgtgcaagtgtgcgcgagtgggagcgcagggggcgcgcgggggctcggtcttctcccgcccggtccgctcctccgggcggaaccccctttgccgggcccccgggccgcagctggtttcgggaaaccgcgcagcctgggcggggccgcagcccccacccgtgcatctgccgtctccgccctcccgtcgctcccctgctcggggtcagctagtgtccgctctgctcggccgcgggctcccggaggactgcaggcaggatgacgcaaaacacggtgattgtgaatggagttgctatggcctctaggccatcccagcccacccacgtcaacgtccacatccaccaggagtcagctttgacacaactgctgaaagctggaggttctctgaagaagtttctttttcaccctggggacactgtgccttccacagccaggattggttatgagcagctggctctaggggtgactcagatattgctgggggttgtgagttgtgttcttggagtgtgtctcagcttggggccctggactgtgctgcgtgcctcaggctgtgccttctgggcggggtctgtggtgatcgcagcaggagctggggccattgtccatgagaagcacccgggcaaacttgctggctatatatccagcctgctcaccctggcaggctttgctacagctatggctgctgttgtcctctgcgtgaatagcttcatctggcaaactgaaccctttttatacatcgacactgtgtgtgatcgctcagaccctgtcttccctaccactgggtacagatggatgcggcgaagtcaagagaaccaatggcagaaggaggagtgtagagcttacatgcagatgctgaggaagttttacagcaaggcgttaacagattctggccgtgggggttttaaagtttctcct

SEQ ID NO: 365055 - DNA, 582 bp, Homo sapiens
aattgtaaaaaggctttctctatatgtaaattatgctgttatctttttctatacacaaagtatatagacctataaatattatacatatatattatatatataaagactaattcttgtacagaccaacgcggaccgatggtccatattcttttctccatgtttgtttgtgtcgactgttgcagagtgagttgatgtaagaaggtggtttcatgttttcttttggggggccacttctttcttttcctttccgtttctatctctgtctgtctccgtctctgtctctctctttctcacttgttgccaatgtcttgttgctgagaaggaacactctattcagatgccatccaggaaagaaaggccagatggatggagggtccactgtgtatatttgtacagaatcatttataaagttttctacacttctaaaaaaagtatttctaacttgggctgttggacagtttgtgtgcctctgagccggcaagcctgttgtttcttgtgtttagtgcaatgtttagtgagaaaccaatgtctgaattatttatgccaataaaaaatttgagaattactgcattgcactactgc

SEQ ID NO: 365056 - DNA, 356 bp, Homo sapiens
taattagtcaaacatttacaaggtgtttcacatcatgcaaaccaccgagttctgccaaggagttcacagtgtggtaaaggagacagacaagcaaaggcacaattagaacatgatataaggctgggcacggtggttcacgcctgtaatcccagcactttgagaagccaaggcaggaggatcacttgagcttaggagtttgagaccaacctgggcaacatagaaagaccttagttttcaaagtagctgaacatggtggcgcacttctgtggtttcagctgctcagtaagctgagttgggaggatcacttgagcccgggaagttgaggctgcagtgagccacgatcataccactgcact

SEQ ID NO: 365057 - DNA, 736 bp, Homo sapiens
ggaagatcagggtcttactgccttatggcctcttatcctgcagtggtaagtgaggttaactgaaatggaagaggtgacgacctcatagatttgaatagagtgctaaagacttctaaaagccactgtgtgcagtggaagatgttgttgacccaaaacattcattaagaatccaggccaggtggctcatacctgtgatactagcgctttgggaggctgagacaggaggatcgtttgaggccaacagtttgagaccagtctgggcaacatagtgagaccctgtctctacaaaaaaataaatcaataaaatttttaaaaagctgggtgtggtagtgtatgcctgtagtcccagctactcaggaggctgaagtagcaggatcgcttgaggcccaggaggtcgaggctgcagtgagccaagattacactactgcacttcagcctgggttgacagagcaagactttcttaaaaaaaaaaaaaaaaaaaacccagagcagaaatgaaaaacctgtgaattagcagtgacaaatagtgaacagtaatattaattttttgttgataatttagtagcttggatacaggaactgatagagcagatggttggattaatccaaggttaggattttgctgatggaataagaggataaaaaggttgaagatgttaacaaatagtgatttaagtgatagaagttgtagctagagtaaaatattaaaatctaagatttcaaatagagcaagtcc

SEQ ID NO: 365058 - DNA, 467 bp, Homo sapiens
gctcccaagtagcagggactgcagatgcatgccaccatgccaagctaattttatttatttatttttttgagatgaggttttgccatgttgcccaggctggtctcgaacccctgggctcaagcaatctgaccaccttggcctcccaatgtactgagactacaggcgtgaaccactgtgcccagctttgttagatatattcattaaaagagtaattctatggctgggcacagtgactcacacctgtaataccaacactttgggaggctgaggcaggcggatctcgaggtcaggagttcaagaccagtctggccaacatggtgaaaccctgtctctactaaagatacaaaaaattagccgagcatggtggcatgttcctgttaatcccagctacttgggaggctgaggcaggagaattgcttgaacccaggaggtggaggttgcagtgagccaagatcacgctatggcac

SEQ ID NO: 365059 - DNA, 444 bp, Homo sapiens
cctctgtcggccttttaatgaccgttctgtgtcccatgtatgtctctgaccatccacagccgcccctcctccataccccagggataatttttccttcaaaccttccctttccaagggacactgggtttgcagacagcaaggctatgtggcagagaagaaaaagtccagcagactcaggactcctgggctgcaggcccccctctgccctgatcccatgaagtgaccttgggcactccctttccctccctgggcctcagtttccccatctcccaaatgggaggaggagccggattgggttatttcttagggattctctttgtgtgccttgctggcttccagacctgccgtggaccttggcttcctctgaagacttgcaggcaataatctccgccctcccagttgtacctcctccccacctgcttatttaaaatcaagtttattgta

SEQ ID NO: 365060 - DNA, 899 bp, Homo sapiens
  misc_feature (28)..(28): n is a, c, g, or t
  misc_feature (823)..(824): n is a, c, g, or t
  misc_feature (830)..(830): n is a, c, g, or t
  misc_feature (833)..(833): n is a, c, g, or t
  misc_feature (843)..(843): n is a, c, g, or t
  misc_feature (846)..(847): n is a, c, g, or t
  misc_feature (849)..(849): n is a, c, g, or t
  misc_feature (856)..(856): n is a, c, g, or t
aggctaggagaggccgggtttaatcggncgaggatccgcatcggcgagctgcgtctcccgggtgtcggccccggcggctccccgaccgtgcccggctgtggcgaggcggctccagcccagcctgtggcagccgcgacccccggggcgctccggagcccactgcgcggcgcgcgtgccggctgcctgcatggacgcggcactgaagcggagccgctcggaggagccagccgaaatcctgccgcctgcccgggacgaggaggaggaggaggaagaggggatggagcaggggctggaggaggaagaagaggtggatccccggatccagggagaactggagaagttaaatcagtccacggatgatatcaacagacgggagactgaacttgaggatgctcgtcagaagttccgctctgttctggttgaagcaacggtgaaactggatgaactggtgaagaaaattggcaaagctgtggaagactccaagccctactgggaggcacggagggtggcgaggcaggctcagctggaagctcagaaagccacgcaggacttccagagggccacagaggtgctccgtgccgccaaggagaccatctccctggccgagcagcggctgctggaggatgacaagcggcagttcgactccgcctggcaggagatgctgaatcacgccactcagagggtcatggaggcggagcagaccaagaccaggagcgagctggtgcataaggagacggcagccaggtacaatgccgccatgggccgcatgcgacagctggagaagaaactcaagagagccatcaacaagtccaagccttatttnnactcanggnacgtactatntgnngncgagcantgaaagaattgtgttacttaggcaaatgcccttgaaagcggtc

SEQ ID NO: 365061 - DNA, 830 bp, Homo sapiens
  misc_feature (30)..(30): n is a, c, g, or t
cggatcggcagtactatacggtttatggtncgaggcctggtgatccgcatcggcgagctgcgtctcccgggtgtcggccccggcggctccccgaccgtgcccggctgtggcgaggcggctccagcccagcctgtggcagccgcgacccccggggcgctccggagcccactgcgcggcgcgcgtgccggctgcctgcatggacgcggcactgaagcggagccgctcggaggagccagccgaaatcctgccgcctgcccgggacgaggaggaggaggaggaagaggggatggagcaggggctggaggaggaagaagaggtggatccccggatccagggagaactggagaagttaaatcagtccacggatgatatcaacagacgggagactgaacttgaggatgctcgtcagaagttccgctctgttctggttgaagcaacggtgaaactggatgaactggtgaagaaaattggcaaagctgtggaagactccaagccctactgggaggcacggagggtggcgaggcaggctcagctggaagctcagaaagccacgcaggacttccagagggccacagaggtgctccgtgccgccaaggagaccatctccctggccgagcagcggctgctggaggatgacaagcggcagttcgactccgcctggcaggagatgctgaatcacgccactcagaggtcatggaggcggagcaacaagaccaggacgacctgtgctaggagacgggccagtaaaatccgctggcgatacagctgggaagaacagagctcagagcaactattaagacgggagatattcctcaccataaccatgacgg

SEQ ID NO: 365062 - DNA, 2882 bp, Homo sapiens
agcgggcgcccatttcctctgctccgccgcggccggaggtatccgcatcggcgagctgcgtctcccgggtgtcggccccggcggctccccgaccgtgcccggctgtggcgaggcggctccagcccagcctgtggcagccgcgacccccggggcgctccggagcccactgcgcggcgcgcgtgccggctgcctgcatggacgcggcactgaagcggagccgctcggaggagccagccgaaatcctgccgcctgcccgggacgaggaggaggaggaggaagaggggatggagcaggggctggaggaggaagaagaggtggatccccggatccagggagaactggagaagttaaatcagtccacggatgatatcaacagacgggagactgaacttgaggatgctcgtcagaagttccgctctgttctggttgaagcaacggtgaaactggatgaactggtgaagaaaattggcaaagctgtggaagactccaagccctactgggaggcacggagggtggcgaggcaggctcagctggaagctcagaaagccacgcaggacttccagagggccacagaggtgctccgtgccgccaaggagaccatctccctggccgagcagcggctgctggaggatgacaagcggcagttcgactccgcctggcaggagatgctgaatcacgccactcagagggtcatggaggcggagcagaccaagaccaggagcgagctggtgcataaggagacggcagccaggtacaatgccgccatgggccgcatgcgacagctggagaagaaactcaagagagccatcaacaagtccaagccttattttgaactcaaggcaaagtactatgtgcagctcgagcaactgaaaaagactgtggatgacctgcaggccaaactgaccctggcaaaaggcgagtacaagatggccctgaagaacctggagatgatctcagatgagatccacgagcggcggcgctccagtgccatggggcctcggggatgcggtgttggtgctgagggcagcagcacatctgtggaggatctgccagggagcaaacctgagcctgatgccatttctgtggcctcggaggcctttgaagatgacagctgtagcaactttgtgtctgaagatgactcggaaacccagtccgtgtccagctttagttcaggaccaacaagcccgtctgagatgcctgaccagttccctgcggttgtgaggcctggcagcctggatctgcccagccctgtgtccctgtcagagtttgggatgatgttcccagtgttgggccctcgaagtgaatgcagcggggcctcctcccctgaatgtgaagtagaacgaggagacagggcagaaggggcagagaataaaacaagtgacaaagccaacaacaaccggggcctcagcagtagcagtggcagtggtggcagcagtaagagccaaagcagcacctcccctgagggccaggccttggagaaccggatgaagcagctctccctacagtgctcaaagggaagagatggaattattgctgacataaaaatggtgcagattggctgattcatcctgggccctggccgatgtgcatatcaacatttatacatggaactggagaacattgtgccaataatcatttaatatatgccaaatcttacacgtctactctaaactgctctaatgaagtttcagtgaccttgagggctaaagattgttcttctgggtaagagctcttgggctggtttttcagagcagagttcttgttgtgggtagactgtgactaggttcacagcctttgtggaacattccgtataacggcattgtggaagcaataactagttcctatgaaagaaccagagctgggaagatggctgggaagccaggccaaagtgggggcaacagcttgcttctctttctcttctcaccctcagtttgtatgggaaaatggagatgtcctctccactttatcccacgatatctaaatgaaaaagaaagaaaacccacacacaaagcaaaaactcaagtattaagagcacatatttttgacccagtggaggcttaaaaaaaaaaaaatccaagaacacaattcattttcaccacctctggtgttcagagggggcttttaaaaaagcgtgtatgctgggatacccattaaaaccattttctagaaggctaccatgagctgcactttttggggtgggaaaggtgaatgccagtggggatgcggggggatgagggtaggagggacttatagaaggggatttgtggctgtgggggagaaggttctacagcataagccttatcctgccagccaaggggatttattctaagagaagtgcatgtgaagaatggttgccactgttattagattgacaagatgttaatttctctgtaggttgtaactttaaaaataaatgaaattatttaagggttatgctgcactagtattccttagaggaaacagttctttaaagttaggaaagggagtaggcaggcatgtgttggcaaaggctgttaatagtagttaagtgttaagactgcttttctttaacgttttcatggtaatgcatatttagagcactgtatttttgtcttgttaagaaaatttagcatttctaaaagaaaaaagcaaccctctttcaaactgttaattctgtcacagcctgtatattttagtcatttgtaaatctcttcatacaatagtgacttcttttttgactgatacagtatcttaattacaaggttattttgtacttgtcttaatacactaagtgtaataaaaacggcttgagaaaaaaaaaaaacattaactggccgtcgtttacaaacgtcccaactggcatacccaggcagtaccaacttaattcctctgtatacaattcc

SEQ ID NO: 365063 - DNA, 2729 bp, Homo sapiens
agccaaactatatagagagggctggaggacaaactgttccagatgggagttggagaaagccttgctatggatgtgacatttgggctgagatgtggatgatgagaaggagtcaggcagccgtgccctggaggagatagcgatgcagacagcagaagccctgaggacagagccagctgacagcccatgtggtgccagaggggagaactggagaagttaaatcagtccacggatgatatcaacagacgggagactgaacttgaggtccagtaggtgtttgcagatcccttcttaagcctcaactgtgtttcctcggtttcccctggctgcaggatgctcgtcagaagttccgctctgttctggttgaagcaacggtgaaactggatgaactggtgaagaaaattggcaaagctgtggaagactccaagccctactgggaggcacggagggtggcgaggcaggctcagctggaagctcagaaagccacgcaggacttccagagggccacagaggtgctccgtgccgccaaggagaccatctccctggccgagcagcggctgctggaggatgacaagcggcagttcgactccgcctggcaggagatgctgaatcacgccactcagagggtcatggaggcggagcagaccaagaccaggagcgagctggtgcataaggagacggcagccaggtacaatgccgccatgggccgcatgcgacagctggagaagaaactcaagagagccatcaacaagtccaagccttattttgaactcaaggcaaagtactatgtgcagctcgagcaactgaaaaagactgtggatgacctgcaggccaaactgaccctggcaaaaggcgagtacaagatggccctgaagaacctggagatgatctcagatgagatccacgagcggcggcgctccagtgccatggggcctcggggatgcggtgttggtgctgagggcagcagcacatctgtggaggatctgccagggagcaaacctgagcctgatgccatttctgtggcctcggaggcctttgaagatgacagctgtagcaactttgtgtctgaagatgactcggaaacccagtccgtgtccagctttagttcaggaccaacaagcccgtctgagatgcctgaccagttccctgcggttgtgaggcctggcagcctggatctgcccagccctgtgtccctgtcagagtttgggatgatgttcccagtgttgggccctcgaagtgaatgcagcggggcctcctcccctgaatgtgaagtagaacgaggagacagggcagaaggggcagagaataaaacaagtgacaaagccaacaacaaccggggcctcagcagtagcagtggcagtggtggcagcagtaagagccaaagcagcacctcccctgagggccaggccttggagaaccggatgaagcagctctccctacagtgctcaaagggaagagatggaattattgctgacataaaaatggtgcagattggctgattcatcctgggccctggccgatgtgcatatcaacatttatacatggaactggagaacattgtgccaataatcatttaatatatgccaaatcttacacgtctactctaaactgctctaatgaagtttcagtgaccttgagggctaaagattgttcttctgggtaagagctcttgggctggtttttcagagcagagttcttgttgtgggtagactgtgactaggttcacagcctttgtggaacattccgtataacggcattgtggaagcaataactagttcctatgaaagaaccagagctgggaagatggctgggaagccaggccaaagtgggggcaacagcttgcttctctttctcttctcaccctcagtttgtatgggaaaatggagatgtcctctccactttatcccacgatatctaaatgaaaaagaaagaaaacccacacacaaagcaaaaactcaagtattaagagcacatatttttgacccagtggaggcttaaaaaaaaaaaaatccaagaacacaattcattttcaccacctctggtgttcagagggggcttttaaaaaagcgtgtatgctgggatacccattaaaaccattttctagaaggctaccatgagctgcactttttggggtgggaaaggtgaatgccagtggggatgcggggggatgagggtaggagggacttatagaaggggatttgtggctgtgggggagaaggttctacagcataagccttatcctgccagccaaggggatttattctaagagaagtgcatgtgaagaatggttgccactgttattagattgacaagatgttaatttctctgtaggttgtaactttaaaaataaatgaaattatttaagggttatgctgcactagtattccttagaggaaacagttctttaaagttaggaaagggagtaggcaggcatgtgttggcaaaggctgttaatagtagttaagtgttaagactgcttttctttaacgttttcatggtaatgcatatttagagcactgtatttttgtcttgttaagaaaatttagcatttctaaaagaaaaaagcaaccctctttcaaactgttaattctgtcacagcctgtatattttagtcatttgtaaatctcttcatacaatagtgacttcttttttgactgatacagtatcttaattacaaggttattttgtacttgtcttaatacactaagtgtaataaaaacggcttgagaaaa

SEQ ID NO: 365064 - DNA, 2737 bp, Homo sapiens
agcgggcgcccatttcctctgctccgccgcggccggaggtatccgcatcggcgagctgcgtctcccgggtgtcggccccggcggctccccgaccgtgcccggctgtggcgaggcggctccagcccagcctgtggcagccgcgacccccggggcgctccggagcccactgcgcggcgcgcgtgccggctgcctgcatggacgcggcactgaagcggagccgctcggaggagccagccgaaatcctgccgcctgcccgggacgaggaggaggaggaggaagaggggatggagcaggggctggaggaggaagaagaggtggatccccggatccagggagaactggagaagttaaatcagtccacggatgatatcaacagacgggagactgaacttgaggatgctcgtcagaagttccgctctgttctggttgaagcaacggtgaaactggatgaactggtgaagaaaattggcaaagctgtggaagactccaagccctactgggaggcacggagggtggcgaggcaggctcagctggaagctcagaaagccacgcaggacttccagagggccacagaggtgctccgtgccgccaaggagaccatctccctggccgagcagcggctgctggaggatgacaagcggcagttcgactccgcctggcaggagatgctgaatcacgccactcagagggtcatggaggcggagcagaccaagaccaggagcgagctggtgcataaggagacggcagccaggtacaatgccgccatgggccgcatgcgacagctggagaagaaactcaagagagccatcaacaagtccaagccttattttgaactcaaggcaaagtactatgtgcagctcgagcaactgaaaaagactgtggatgacctgcaggccaaactgaccctggcaaaaggcgagtacaagatggccctgaagaacctggagatgatctcagatgagatccacgagcggcggcgctccagtgccatggggcctcggggatgcggtgttggtgctgagggcagcagcacatctgtggaggatctgccagggagcaaacctgagcctgatgccatttctgtggcctcggaggcctttgaagatgacagctgtagcaactttgtgtctgaagatgactcggaaacccagtccgtgtccagctttagttcaggaccaacaagcccgtctgagatgcctgaccagttccctgcggttgtgaggcctggcagcctggatctgcccagccctgtgtccctgtcagagtttgggatgatgttcccagtgttgggccctcgaagtgaatgcagcggggcctcctcccctgaatgtgaagtagaacgaggagacagggcagaaggggcagagaataaaacaagtgacaaagccaacaacaaccggggcctcagcagtagcagtggcagtggtggcagcagtaagagccaaagcagcacctcccctgagggccaggccttggagaaccggatgaagcagctctccctacagtgctcaaagggaagagatggaattattgctgacataaaaatggtgcagattggctgattcatcctgggccctggccgatgtgcatatcaacatttatacatggaactggagaacattgtgccaataatcatttaatatatgccaaatcttacacgtctactctaaactgctctaatgaagtttcagtgaccttgagggctaaagattgttcttctgggtaagagctcttgggctggtttttcagagcagagttcttgttgtgggtagactgtgactaggttcacagcctttgtggaacattccgtataacggcattgtggaagcaataactagttcctatgaaagaaccagagctgggaagatggctgggaagccaggccaaagtgggggcaacagcttgcttctctttctcttctcaccctcagtttgtatgggaaaatggagatgtcctctccactttatcccacgatatctaaatgaaaaagaaagaaaacccacacacaaagcaaaaactcaagtattaagagcacatatttttgacccagtggaggcttaaaaataaaaaagcgtgtatgctgggatacccattaaaaccattttctagaaggctaccatgagctgcactttttggggtgggaaaggtgaatgccagtggggatgcggggggatgagggtaggagggacttatagaaggggatttgtggctgtgggggagaaggttctacagcataagccttatcctgccagccaaggggatttattctaagagaagtgcatgtgaagaatggttgccactgttattagattgacaagatgttaatttctctgtaggttgtaactttaaaaataaatgaaattatttaagggttatgctgcactagtattccttagaggaaacagttctttaaagttaggaaagggagtaggcaggcatgtgttggcaaaggctgttaatagtagttaagtgttaagactgcttttctttaacgttttcatggtaatgcatatttagagcactgtatttttgtcttgttaagaaaatttagcatttctaaaagaaaaaagcaaccctctttcaaactgttaattctgtcacagcctgtatattttagtcatttgtaaatctcttcatacaatagtgacttcttttttgactgatacagtatcttaattacaaggttattttgtacttgtcttaatacactaagtgtaataaaaacggcttgagaaaa

SEQ ID NO: 365065 - DNA, 2661 bp, Homo sapiens
agccaaactatatagagagggctggaggacaaactgttccagatgggagttggagaaagccttgctatggatgtgacatttgggctgagatgtggatgatgagaaggagtcaggcagccgtgccctggaggagatagcgatgcagacagcagaagccctgaggacagagccagctgacagcccatgtggtgccagaggggagaactggagaagttaaatcagtccacggatgatatcaacagacgggagactgaacttgaggatgctcgtcagaagttccgctctgttctggttgaagcaacggtgaaactggatgaactggtgaagaaaattggcaaagctgtggaagactccaagccctactgggaggcacggagggtggcgaggcaggctcagctggaagctcagaaagccacgcaggacttccagagggccacagaggtgctccgtgccgccaaggagaccatctccctggccgagcagcggctgctggaggatgacaagcggcagttcgactccgcctggcaggagatgctgaatcacgccactcagagggtcatggaggcggagcagaccaagaccaggagcgagctggtgcataaggagacggcagccaggtacaatgccgccatgggccgcatgcgacagctggagaagaaactcaagagagccatcaacaagtccaagccttattttgaactcaaggcaaagtactatgtgcagctcgagcaactgaaaaagactgtggatgacctgcaggccaaactgaccctggcaaaaggcgagtacaagatggccctgaagaacctggagatgatctcagatgagatccacgagcggcggcgctccagtgccatggggcctcggggatgcggtgttggtgctgagggcagcagcacatctgtggaggatctgccagggagcaaacctgagcctgatgccatttctgtggcctcggaggcctttgaagatgacagctgtagcaactttgtgtctgaagatgactcggaaacccagtccgtgtccagctttagttcaggaccaacaagcccgtctgagatgcctgaccagttccctgcggttgtgaggcctggcagcctggatctgcccagccctgtgtccctgtcagagtttgggatgatgttcccagtgttgggccctcgaagtgaatgcagcggggcctcctcccctgaatgtgaagtagaacgaggagacagggcagaaggggcagagaataaaacaagtgacaaagccaacaacaaccggggcctcagcagtagcagtggcagtggtggcagcagtaagagccaaagcagcacctcccctgagggccaggccttggagaaccggatgaagcagctctccctacagtgctcaaagggaagagatggaattattgctgacataaaaatggtgcagattggctgattcatcctgggccctggccgatgtgcatatcaacatttatacatggaactggagaacattgtgccaataatcatttaatatatgccaaatcttacacgtctactctaaactgctctaatgaagtttcagtgaccttgagggctaaagattgttcttctgggtaagagctcttgggctggtttttcagagcagagttcttgttgtgggtagactgtgactaggttcacagcctttgtggaacattccgtataacggcattgtggaagcaataactagttcctatgaaagaaccagagctgggaagatggctgggaagccaggccaaagtgggggcaacagcttgcttctctttctcttctcaccctcagtttgtatgggaaaatggagatgtcctctccactttatcccacgatatctaaatgaaaaagaaagaaaacccacacacaaagcaaaaactcaagtattaagagcacatatttttgacccagtggaggcttaaaaaaaaaaaaatccaagaacacaattcattttcaccacctctggtgttcagagggggcttttaaaaaagcgtgtatgctgggatacccattaaaaccattttctagaaggctaccatgagctgcactttttggggtgggaaaggtgaatgccagtggggatgcggggggatgagggtaggagggacttatagaaggggatttgtggctgtgggggagaaggttctacagcataagccttatcctgccagccaaggggatttattctaagagaagtgcatgtgaagaatggttgccactgttattagattgacaagatgttaatttctctgtaggttgtaactttaaaaataaatgaaattatttaagggttatgctgcactagtattccttagaggaaacagttctttaaagttaggaaagggagtaggcaggcatgtgttggcaaaggctgttaatagtagttaagtgttaagactgcttttctttaacgttttcatggtaatgcatatttagagcactgtatttttgtcttgttaagaaaatttagcatttctaaaagaaaaaagcaaccctctttcaaactgttaattctgtcacagcctgtatattttagtcatttgtaaatctcttcatacaatagtgacttcttttttgactgatacagtatcttaattacaaggttattttgtacttgtcttaatacactaagtgtaataaaaacggcttgagaaaa

SEQ ID NO: 365066 - DNA, 2516 bp, Homo sapiens
gtggcgaattcggcaccgaggggaggaggaagaagaggtgatccccggatccaggagaactggagaagttaaatcagtccacggatgatatcaacagacgggagactgaacttgaggatgctcgtcagaagttccgctctgttctggttgaagcaacggtgaaactggatgaactggtgaagaaaattggcaaagctgtggaagactccaagccctactgggaggcacggagggtggcgaggcaggctcagctggaagctcagaaagccacgcaggacttccagagggccacagaggtgctccgtgccgccaaggagaccatctccctggccgagcagcggctgctggaggatgacaagcggcagttcgactccgcctggcaggagatgctgaatcacgccactcagagggtcatggaggcggagcagaccaagaccaggagcgagctggtgcataaggagacggcagccaggtacaatgccgccatgggccgcatgcgacagctggagaagaaactcaagagagccatcaacaagtccaagccttattttgaactcaaggcaaagtactatgtgcagctcgagcaactgaaaaagactgtggatgacctgcaggccaaactgaccctggcaaaaggcgagtacaagatggccctgaagaacctggagatgatctcagatgagatccacgagcggcggcgctccagtgccatggggcctcggggatgcggtgttggtgctgagggcagcagcacatctgtggaggatctgccagggagcaaacctgagcctgatgccatttctgtggcctcggaggcctttgaagatgacagctgtagcaactttgtgtctgaagatgactcggaaacccagtccgtgtccagctttagttcaggaccaacaagcccgtctgagatgcctgaccagttccctgcggttgtgaggcctggcagcctggatctgcccagccctgtgtccctgtcagagtttgggatgatgttcccagtgttgggccctcgaagtgaatgcagcggggcctcctcccctgaatgtgaagtagaacgaggagacagggcagaaggggcagagaataaaacaagtgacaaagccaacaacaaccggggcctcagcagtagcagtggcagtggtggcagcagtaagagccaaagcagcacctcccctgagggccaggccttggagaaccggatgaagcagctctccctacagtgctcaaagggaagagatggaattattgctgacataaaaatggtgcagattggctgattcatcctgggccctggccgatgtgcatatcaacatttatacatggaactggagaacattgtgccaataatcatttaatatatgccaaatcttacacgtctactctaaactgctctaatgaagtttcagtgaccttgagggctaaagattgttcttctgggtaagagctcttgggctggtttttcagagcagagttcttgttgtgggtagactgtgactaggttcacagcctttgtggaacattccgtataacggcattgtggaagcaataactagttcctatgaaagaaccagagctgggaagatggctgggaagccaggccaaagtgggggcaacagcttgcttctctttctcttctcaccctcagtttgtatgggaaaatggagatgtcctctccactttatcccacgatatctaaatgaaaaagaaagaaaacccacacacaaagcaaaaactcaagtattaagagcacatatttttgacccagtggaggcttaaaaaaaaaaaaatccaagaacacaattcattttcaccacctctggtgttcagagggggcttttaaaaaagcgtgtatgctgggatacccattaaaaccattttctagaaggctaccatgagctgcactttttggggtgggaaaggtgaatgccagtggggatgcggggggatgagggtaggagggacttatagaaggggatttgtggctgtgggggagaaggttctacagcataagccttatcctgccagccaaggggatttattctaagagaagtgcatgtgaagaatggttgccactgttattagattgacaagatgttaatttctctgtaggttgtaactttaaaaataaatgaaattatttaagggttatgctgcactagtattccttagaggaaacagttctttaaagttaggaaagggagtaggcaggcatgtgttggcaaaggctgttaatagtagttaagtgttaagactgcttttctttaacgttttcatggtaatgcatatttagagcactgtatttttgtcttgttaagaaaatttagcatttctaaaagaaaaaagcaaccctctttcaaactgttaattctgtcacagcctgtatattttagtcatttgtaaatctcttcatacaatagtgacttcttttttgactgatacagtatcttaattacaaggttattttgtacttgtcttaatacactaagtgtaataaaaacggcttgagaaaa

SEQ ID NO: 365067 - DNA, 2827 bp, Homo sapiens
agcgggcgcccatttcctctgctccgccgcggccggaggtatccgcatcggcgagctgcgtctcccgggtgtcggccccggcggctccccgaccgtgcccggctgtggcgaggcggctccagcccagcctgtggcagccgcgacccccggggcgctccggagcccactgcgcggcgcgcgtgccggctgcctgcatggacgcggcactgaagcggagccgctcggaggagccagccgaaatcctgccgcctgcccgggacgaggaggaggaggaggaagaggggatggagcaggggctggaggaggaagaagaggtggatccccggatccagggagaactggagaagttaaatcagtccacggatgatatcaacagacgggagactgaacttgaggatgctcgtcagaagttccgctctgttctggttgaagcaacggtgaaactggatgaactggtgaagaaaattggcaaagctgtggaagactccaagccctactgggaggcacggagggtggcgaggcaggctcagctggaagctcagaaagccacgcaggacttccagagggccacagaggtgctccgtgccgccaaggagaccatctccctggccgagcagcggctgctggaggatgacaagcggcagttcgactccgcctggcaggagatgctgaatcacgccactcagagggtcatggaggcggagcagaccaagaccaggagcgagctggtgcataaggagacggcagccaggtacaatgccgccatgggccgcatgcgacagctggagaagaaactcaagagagccatcaacaagtccaagccttattttgaactcaaggcaaagtactatgtgcagctcgagcaactgaaaaagactgtggatgacctgcaggccaaactgaccctggcaaaaggcgagtacaagatggccctgaagaacctggagatgatctcagatgagatccacgagcggcggcgctccagtgccatggggcctcggggatgcggtgttggtgctgagggcagcagcacatctgtggaggatctgccagggagcaaacctgagcctgatgccatttctgtggcctcggaggcctttgaagatgacagctgtagcaactttgtgtctgaagatgactcggaaacccagtccgtgtccagctttagttcaggaccaacaagcccgtctgagatgcctgaccagttccctgcggttgtgaggcctggcagcctggatctgcccagccctgtgtccctgtcagagtttgggatgatgttcccagtgttgggccctcgaagtgaatgcagcggggcctcctcccctgaatgtgaagtagaacgaggagacagggcagaaggggcagagaataaaacaagtgacaaagccaacaacaaccggggcctcagcagtagcagtggcagtggtggcagcagtaagagccaaagcagcacctcccctgagggccaggccttggagaaccggatgaagcagctctccctacagtgctcaaagggaagagatggaattattgctgacataaaaatggtgcagattggctgattcatcctgggccctggccgatgtgcatatcaacatttatacatggaactggagaacattgtgccaataatcatttaatatatgccaaatcttacacgtctactctaaactgctctaatgaagtttcagtgaccttgagggctaaagattgttcttctgggtaagagctcttgggctggtttttcagagcagagttcttgttgtgggtagactgtgactaggttcacagcctttgtggaacattccgtataacggcattgtggaagcaataactagttcctatgaaagaaccagagctgggaagatggctgggaagccaggccaaagtgggggcaacagcttgcttctctttctcttctcaccctcagtttgtatgggaaaatggagatgtcctctccactttatcccacgatatctaaatgaaaaagaaagaaaacccacacacaaagcaaaaactcaagtattaagagcacatatttttgacccagtggaggcttaaaaaaaaaaaaatccaagaacacaattcattttcaccacctctggtgttcagagggggcttttaaaaaagcgtgtatgctgggatacccattaaaaccattttctagaaggctaccatgagctgcactttttggggtgggaaaggtgaatgccagtggggatgcggggggatgagggtaggagggacttatagaaggggatttgtggctgtgggggagaaggttctacagcataagccttatcctgccagccaaggggatttattctaagagaagtgcatgtgaagaatggttgccactgttattagattgacaagatgttaatttctctgtaggttgtaactttaaaaataaatgaaattatttaagggttatgctgcactagtattccttagaggaaacagttctttaaagttaggaaagggagtaggcaggcatgtgttggcaaaggctgttaatagtagttaagtgttaagactgcttttctttaacgttttcatggtaatgcatatttagagcactgtatttttgtcttgttaagaaaatttagcatttctaaaatcatttgtaaatctcttcatacaatagtgacttcttttttgactgatacagtatcttaattacaaggttattttgtacttgtcttaatacactaagtgtaataaaaacggcttgagaaaaaaaaaaaacattaactggccgtcgtttacaaacgtcccaactggcatacccaggcagtaccaacttaattcctctgtatacaattcc

SEQ ID NO: 365068 - DNA, 3088 bp, Homo sapiens
agcgggcgcccatttcctctgctccgccgcggccggaggtatccgcatcggcgagctgcgtctcccgggtgtcggccccggcggctccccgaccgtgcccggctgtggcgaggcggctccagcccagcctgtggcagccgcgacccccggggcgctccggagcccactgcgcggcgcgcgtgccggctgcctgcatggacgcggcactgaagcggagccgctcggaggagccagccgaaatcctgccgcctgcccgggacgaggaggaggaggaggaagaggggatggagcaggggctggaggaggaagaagaggtggatccccggatccagggagaactggagaagttaaatcagtccacggatgatatcaacagacgggagactgaacttgaggatgctcgtcagaagttccgctctgttctggttgaagcaacggtgaaactggatgaactggtgaagaaaattggcaaagctgtggaagactccaagccctactgggaggcacggagggtggcgaggcaggctcagctggaagctcagaaagccacgcaggacttccagagggccacagaggtgctccgtgccgccaaggagaccatctccctggccgagcagcggctgctggaggatgacaagcggcagttcgactccgcctggcaggagatgctgaatcacgccactcagagggtcatggaggcggagcagaccaagaccaggagcgagctggtgcataaggagacggcagccaggtacaatgccgccatgggccgcatgcgacagctggagaagaaactcaagagagccatcaacaagtccaagccttattttgaactcaaggcaaagtactatgtgcagctcgagcaactgaaaaagactgtggatgacctgcaggccaaactgaccctggcaaaaggcgagtacaagatggccctgaagaacctggagatgatctcagatgagatccacgagcggcggcgctccagtgccatggggcctcggggatgcggtgttggtgctgagggcagcagcacatctgtggaggatctgccagggagcaaacctgagcctgatgccatttctgtggcctcggaggcctttgaagatgacagctgtagcaactttgtgtctgaagatgactcggaaacccagtccgtgtccagctttagttcaggaccaacaagcccgtctgagatgcctgaccagttccctgcggttgtgaggcctggcagcctggatctgcccagccctgtgtccctgtcagagtttgggatgatgttcccagtgttgggccctcgaagtgaatgcagcggggcctcctcccctgaatgtgaagtagaacgaggagacagggcagaaggggcagagaataaaacaagtgacaaagccaacaacaaccggggcctcagcagtagcagtggcagtggtggcagcagtaagagccaaagcagcacctcccctgagggccaggccttggagaaccggatgaagcagctctccctacagtgctcaaagggaagagatggaattattgctgacataaaaatggtgcagattggctgattcatcctgggccctggccgatgtgcatatcaacatttatacatggaactggagaacattgtgccaataatcatttaatatatgccaaatcttacacgtctactctaaactgctctaatgaagtttcagtgaccttgagggctaaagattgttcttctgggtaagagctcttgggctggtttttcagagcagagttcttgttgtgggtagactgtgactaggttcacagcctttgtggaacattccgtataacggcattgtggaagcaataactagttcctatgaaagaaccagagctgggaagatggctgggaagccaggccaaagtgggggcaacagcttgcttctctttctcttctcaccctcagtttgtatgggaaaatggagatgtcctctccactttatcccacgatatctaaatgaaaaagaaagaaaacccacacacaaagcaaaaactcaagtattaagagcacatatttttgacccagtggaggcttaaaaaaaaaaaaatccaagaacacaattcattttcaccacctctggtgttcagagggggcttttaaaaaagcgtgtatgctgggatacccattaaaaccattttctagaaggctaccatgagctgcactttttggggtgggaaaggtgaatgccagtggggatgcggggggatgagggtaggagggacttatagaaggggatttgtggctgtgggggagaaggttctacagcataagccttatcctgccagccaaggggatttattctaagagaagtgcatgtgaagaatggttgccactgttattagattgacaagatgttaatttctctgtaggttgtaactttaaaaataaatgaaattatttaagggttatgctgcactagtattccttagaggaaacagttctttaaagttaggaaagggagtaggcaggcatgtgttggcaaaggctgttaatagtagttaagtgttaagactgccagccaaggggatttattctaagacgacagctgcctgtgacgaatggttgccactgctattagatggaccagactgtcaatttctctgtaggtggtaactttaaaaactaacatgaccattatttacagggttatgcttgcactagtattccttagaggcacacaggtcctttaaagttaggacaggggacttagccaggcatgttgttggcacaggcggtcaatagtcagtaagcggttcacgaccgtggtttcttaaagcggtgtccgggcaatggcctatctggagcccggtgtttgggcctggctagaacatctcgctttctaacggaaaaaggggcccctttttaaggggtgaatctgttaaagacgtgattttaagagactatgtgaaaattctcctacaaaaaggagagcttttggaggagaagacatctcattacaggagagatataataggtgttcgaaccacagtgcgataaaagcatggtggtcaacaatacacaatcaatcgaagaatcacgaacgtagggggcgatactagtcag

SEQ ID NO: 365069 - DNA, 2731 bp, Homo sapiens
agcgggcgcccatttcctctgctccgccgcggccggaggtatccgcatcggcgagctgcgtctcccgggtgtcggccccggcggctccccgaccgtgcccggctgtggcgaggcggctccagcccagcctgtggcagccgcgacccccggggcgctccggagcccactgcgcggcgcgcgtgccggctgcctgcatggacgcggcactgaagcggagccgctcggaggagccagccgaaatcctgccgcctgcccgggacgaggaggaggaggaggaagaggggatggagcaggggctggaggaggaagaagaggtggatccccggatccagggagaactggagaagttaaatcagtccacggatgatatcaacagacgggagactgaacttgaggatgctcgtcagaagttccgctctgttctggttgaagcaacggtgaaactggatgaactggtgaagaaaattggcaaagctgtggaagactccaagccctactgggaggcacggagggtggcgaggcaggctcagctggaagctcagaaagccacgcaggacttccagagggccacagaggtgctccgtgccgccaaggagaccatctccctggccgagcagcggctgctggaggatgacaagcggcagttcgactccgcctggcaggagatgctgaatcacgccactcagagggtcatggaggcggagcagaccaagaccaggagcgagctggtgcataaggagacggcagccaggtacaatgccgccatgggccgcatgcgacagctggagaagaaactcaagagagccatcaacaagtccaagccttattttgaactcaaggcaaagtactatgtgcagctcgagcaactgaaaaagactgtggatgacctgcaggccaaactgaccctggcaaaaggcgagtacaagatggccctgaagaacctggagatgatctcagatgagatccacgagcggcggcgctccagtgccatggggcctcggggatgcggtgttggtgctgagggcagcagcacatctgtggaggatctgccagggagcaaacctgagcctgatgccatttctgtggcctcggaggcctttgaagatgacagctgtagcaactttgtgtctgaagatgactcggaaacccagtccgtgtccagctttagttcaggaccaacaagcccgtctgagatgcctgaccagttccctgcggttgtgaggcctggcagcctggatctgcccagccctgtgtccctgtcagagtttgggatgatgttcccagtgttgggccctcgaagtgaatgcagcggggcctcctcccctgaatgtgaagtagaacgaggagacagggcagaaggggcagagaataaaacaagtgacaaagccaacaacaaccggggcctcagcagtagcagtggcagtggtggcagcagtaagagccaaagcagcacctcccctgagggccaggccttggagaaccggatgaagcagctctccctacagtgctcaaagggaagagatggaattattgctgacataaaaatggtgcagattggctgattcatcctgggccctggccgatgtgcatatcaacatttatacatggaactggagaacattgtgccaataatcatttaatatatgccaaatcttacacgtctactctaaactgctctaatgaagtttcagtgaccttgagggctaaagattgttcttctgggtaagagctcttgggctggtttttcagagcagagttcttgttgtgggtagactgtgactaggttcacagcctttgtggaacattccgtataacggcattgtggaagcaataactagttcctatgaaagaaccagagctgggaagatggctgggaagccaggccaaagtgggggcaacagcttgcttctctttctcttctcaccctcagtttgtatgggaaaatggagatgtcctctccactttatcccacgatatctaaatgaaaaagaaagaaaacccacacacaaagcaaaaactcaagtattaagagcacatatttttgacccagtggaggcttaaaaaaaaaaaaatccaagaacacaattcattttcaccacctctggtgttcagagggggcttttaaaaaagcgtgtatgctgggatacccattaaaaccattttctagaaggctaccatgagctgcactttttggggtgggaaaggtgaatgccagtggggatgcggggggatgagggtaggagggacttatagaaggggatttgtggctgtggggtatataggttttcggatattcagtatctctgcagtctaggtgttttttctatcgctgtcgtattactttaaactcatgatacctttaaggtcttctcgtctagtgctcctttaggtctcccttttagtcatgacttggagttgttgtcaagagtgtcacttagtggtatgtttactccttttcggtgctctcatacgcctttctatcgattttgctgtattattttctctcgcgggatctttctctcttcgtctatgttctcttttgaaccgcagccttctcttcttactttgtctcggatagctattccttactgttttctgatgatctctcttattccgggtttcattgtcttttttacatctcatcttgattgtaatagtgatttcgtctttctcatatcccacttctctcttttcctcatctttttacatttgctcttatttcctcccttcc

SEQ ID NO: 365070 - DNA, 2605 bp, Homo sapiens
agccaaactatatagagagggctggaggacaaactgttccagatgggagttggagaaagccttgctatggatgtgacatttgggctgagatgtggatgatgagaaggagtcaggcagccgtgccctggaggagatagcgatgcagacagcagaagccctgaggacagagccagctgacagcccatgtggtgccagaggggagaactggagaagttaaatcagtccacggatgatatcaacagacgggagactgaacttgaggatgctcgtcagaagttccgctctgttctggttgaagcaacggtgaaactggatgaactggtgaagaaaattggcaaagctgtggaagactccaagccctactgggaggcacggagggtggcgaggcaggctcagctggaagctcagaaagccacgcaggacttccagagggccacagaggtgctccgtgccgccaaggagaccatctccctggccgagcagcggctgctggaggatgacaagcggcagttcgactccgcctggcaggagatgctgaatcacgccactcagagggtcatggaggcggagcagaccaagaccaggagcgagctggtgcataaggagacggcagccaggtacaatgccgccatgggccgcatgcgacagctggagaagaaactcaagagagccatcaacaagtccaagccttattttgaactcaaggcaaagtactatgtgcagctcgagcaactgaaaaagactgtggatgacctgcaggccaaactgaccctggcaaaaggcgagtacaagatggccctgaagaactcggggatgcggtgttggtgctgagggcagcagcacatctgtggaggatctgccagggagcaaacctgagcctgatgccatttctgtggcctcggaggcctttgaagatgacagctgtagcaactttgtgtctgaagatgactcggaaacccagtccgtgtccagctttagttcaggaccaacaagcccgtctgagatgcctgaccagttccctgcggttgtgaggcctggcagcctggatctgcccagccctgtgtccctgtcagagtttgggatgatgttcccagtgttgggccctcgaagtgaatgcagcggggcctcctcccctgaatgtgaagtagaacgaggagacagggcagaaggggcagagaataaaacaagtgacaaagccaacaacaaccggggcctcagcagtagcagtggcagtggtggcagcagtaagagccaaagcagcacctcccctgagggccaggccttggagaaccggatgaagcagctctccctacagtgctcaaagggaagagatggaattattgctgacataaaaatggtgcagattggctgattcatcctgggccctggccgatgtgcatatcaacatttatacatggaactggagaacattgtgccaataatcatttaatatatgccaaatcttacacgtctactctaaactgctctaatgaagtttcagtgaccttgagggctaaagattgttcttctgggtaagagctcttgggctggtttttcagagcagagttcttgttgtgggtagactgtgactaggttcacagcctttgtggaacattccgtataacggcattgtggaagcaataactagttcctatgaaagaaccagagctgggaagatggctgggaagccaggccaaagtgggggcaacagcttgcttctctttctcttctcaccctcagtttgtatgggaaaatggagatgtcctctccactttatcccacgatatctaaatgaaaaagaaagaaaacccacacacaaagcaaaaactcaagtattaagagcacatatttttgacccagtggaggcttaaaaaaaaaaaaatccaagaacacaattcattttcaccacctctggtgttcagagggggcttttaaaaaagcgtgtatgctgggatacccattaaaaccattttctagaaggctaccatgagctgcactttttggggtgggaaaggtgaatgccagtggggatgcggggggatgagggtaggagggacttatagaaggggatttgtggctgtgggggagaaggttctacagcataagccttatcctgccagccaaggggatttattctaagagaagtgcatgtgaagaatggttgccactgttattagattgacaagatgttaatttctctgtaggttgtaactttaaaaataaatgaaattatttaagggttatgctgcactagtattccttagaggaaacagttctttaaagttaggaaagggagtaggcaggcatgtgttggcaaaggctgttaatagtagttaagtgttaagactgcttttctttaacgttttcatggtaatgcatatttagagcactgtatttttgtcttgttaagaaaatttagcatttctaaaagaaaaaagcaaccctctttcaaactgttaattctgtcacagcctgtatattttagtcatttgtaaatctcttcatacaatagtgacttcttttttgactgatacagtatcttaattacaaggttattttgtacttgtcttaatacactaagtgtaataaaaacggcttgagaaaa

SEQ ID NO: 365071 - DNA, 2751 bp, Homo sapiens
agcgggcgcccatttcctctgctccgccgcggccggaggtatccgcatcggcgagctgcgtctcccgggtgtcggccccggcggctccccgaccgtgcccggctgtggcgaggcggctccagcccagcctgtggcagccgcgacccccggggcgctccggagcccactgcgcggcgcgcgtgccggctgcctgcatggacgcggcactgaagcggagccgctcggaggagccagccgaaatcctgccgcctgcccgggacgaggaggaggaggaggaagaggggatggagcaggggctggaggaggaagaagaggtggatccccggatccagggagaactggagaagttaaatcagtccacggatgatatcaacagacgggagactgaacttgaggatgctcgtcagaagttccgctctgttctggttgaagcaacggtgaaactggatgaactggtgaagaaaattggcaaagctgtggaagactccaagccctactgggaggcacggagggtggcgaggcaggctcagctggaagctcagaaagccacgcaggacttccagagggccacagaggtgctccgtgccgccaaggagaccatctccctggccgagcagcggctgctggaggatgacaagcggcagttcgactccgcctggcaggagatgctgaatcacgccactcagagggtcatggaggcggagcagaccaagaccaggagcgagctggtgcataaggagacggcagccaggtacaatgccgccatgggccgcatgcgacagctggagaagaaactcaagagagccatcaacaagtccaagccttattttgaactcaaggcaaagtactatgtgcagctcgagcaactgaaaaagactgtggatgacctgcaggccaaactgaccctggcaaaaggcgagtacaagatggccctgaagaacctggagatgatctcagatgagatccacgagcggcggcgctccagtgccatggggcctcggggatgcggtgttggtgctgagggcagcagcacatctgtggaggatctgccagggagcaaacctgagcctgatgccatttctgtggcctcggaggcctttgaagatgacagctgtagcaactttgtgtctgaagatgactcggaaacccagtccgtgtccagctttagttcaggaccaacaagcccgtctgagatgcctgaccagttccctgcggttgtgaggcctggcagcctggatctgcccagccctgtgtccctgtcagagtttgggatgatgttcccagtgttgggccctcgaagtgaatgcagcggggcctcctcccctgaatgtgaagtagaacgaggagacagggcagaaggggcagagaataaaacaagtgacaaagccaacaacaaccggggcctcagcagtagcagtggcagtggtggcagcagtaagagccaaacagctctccctacagtgctcaaagggaagagatggaattattgctgacataaaaatggtgcagattggctgattcatcctgggccctggccgatgtgcatatcaacatttatacatggaactggagaacattgtgccaataatcatttaatatatgccaaatcttacacgtctactctaaactgctctaatgaagtttcagtgaccttgagggctaaagattgttcttctgggtaagagctcttgggctggtttttcagagcagagttcttgttgtgggtagactgtgactaggttcacagcctttgtggaacattccgtataacggcattgtggaagcaataactagttcctatgaaagaaccagagctgggaagatggctgggaagccaggccaaagtgggggcaacagcttgcttctctttctcttctcaccctcagtttgtatgggaaaatggagatgtcctctccactttatcccacgatatctaaatgaaaaagaaagaaaacccacacacaaagcaaaaactcaagtattaagagcacatatttttgacccagtggaggcttaaaaaaaaaaaaatccaagaacacaattcattttcaccacctctggtgttcagagggggcttttaaaaaagcgtgtatgctgggatacccattaaaaccattttctagaaggctaccatgagctgcactttttggggtgggaaaggtgaatgccagtggggatgcggggggatgagggtaggagggacttatagaaggggatttgtggctgtgggggagaaggttctacagcataagccttatcctgccagccaaggggatttattctaagagaagtgcatgtgaagaatggttgccactgttattagattgacaagatgttaatttctctgtaggttgtaactttaaaaataaatgaaattatttaagggttatgctgcactagtattccttagaggaaacagttctttaaagttaggaaagggagtaggcaggcatgtgttggcaaaggctgttaatagtagttaagtgttaagactgcttttctttaacgttttcatggtaatgcatatttagagcactgtatttttgtcttgttaagaaaatttagcatttctaaaagaaaaaagcaaccctctttcaaactgttaattctgtcacagcctgtatattttagtcatttgtaaatctcttcatacaatagtgacttcttttttgactgatacagtatcttaattacaaggttattttgtacttgtcttaatacactaagtgtaataaaaacggcttgagaaaa

SEQ ID NO: 365072 - DNA, 2067 bp, Homo sapiens
agcgggcgcccatttcctctgctccgccgcggccggaggtatccgcatcggcgagctgcgtctcccgggtgtcggccccggcggctccccgaccgtgcccggctgtggcgaggcggctccagcccagcctgtggcagccgcgacccccggggcgctccggagcccactgcgcggcgcgcgtgccggctgcctgcatggacgcggcactgaagcggagccgctcggaggagccagccgaaatcctgccgcctgcccgggacgaggaggaggaggaggaagaggggatggagcaggggctggaggaggaagaagaggtggatccccggatccagggagaactggagaagttaaatcagtccacggatgatatcaacagacgggagactgaacttgaggatgctcgtcagaagttccgctctgttctggttgaagcaacggtgaaactggatgaactggtgaagaaaattggcaaagctgtggaagactccaagccctactgggaggcacggagggtggcgaggcaggctcagctggaagctcagaaagccacgcaggacttccagagggccacagaggtgctccgtgccgccaaggagaccatctccctggccgagcagcggctgctggaggatgacaagcggcagttcgactccgcctggcaggagatgctgaatcacgccactcagagggtcatggaggcggagcagaccaagaccaggagcgagctggtgcataaggagacggcagccaggtacaatgccgccatgggccgcatgcgacagctggagaagaaactcaagagagccatcaacaagtccaagccttattttgaactcaaggcaaagtactatgtgcagctcgagcaactgaaaaagactgtggatgacctgcaggccaaactgaccctggcaaaaggcgagtacaagatggccctgaagaacctggagatgatctcagatgagatccacgagcggcggcgctccagtgccatggggcctcggggatgcggtgttggtgctgagggcagcagcacatctgtggaggatctgccagggagcaaacctgagcctgatgccatttctggagacagggcagaaggggcagagaataaaacaagtgacaaagccaacaacaaccggggcctcagcagtagcagtggcatgggggcaacagcttgcttctctttctcttctcaccctcagtttgtatgggaaaatggagatgtcctctccactttatcccacgatatctaaatgaaaaagaaagaaaacccacacacaaagcaaaaactcaagtattaagagcacatatttttgacccagtggaggcttaaaaaaaaaaaaatccaagaacacaattcattttcaccacctctggtgttcagagggggcttttaaaaaagcgtgtatgctgggatacccattaaaaccattttctagaaggctaccatgagctgcactttttggggtgggaaaggtgaatgccagtggggatgcggggggatgagggtaggagggacttatagaaggggatttgtggctgtgggggagaaggttctacagcataagccttatcctgccagccaaggggatttattctaagagaagtgcatgtgaagaatggttgccactgttattagattgacaagatgttaatttctctgtaggttgtaactttaaaaataaatgaaattatttaagggttatgctgcactagtattccttagaggaaacagttctttaaagttaggaaagggagtaggcaggcatgtgttggcaaaggctgttaatagtagttaagtgttaagactgcttttctttaacgttttcatggtaatgcatatttagagcactgtatttttgtcttgttaagaaaatttagcatttctaaaagaaaaaagcaaccctctttcaaactgttaattctgtcacagcctgtatattttagtcatttgtaaatctcttcatacaatagtgacttcttttttgactgatacagtatcttaattacaaggttattttgtacttgtcttaatacactaagtgtaataaaaacggcttgagaaaa

SEQ ID NO: 365073 - DNA, 985 bp, Homo sapiens
aataataactaggtaggatgcccggtgtaattcaggacgcggcaagaactctagtattaagagcacatattggcttgtgtgtgggttttctttctttttcatttagatatcgtgggataaagtggagaggacatctccattttcccatacaaactgagggtgagaagagaaagagaagcaagctgttgcccacacacaaagcaaaaactcaagtattaagagcacatatttttgacccagtggaggcttaaaaaaaaaaaaatccaagaacacaattcattttcaccacctctggtgttcagagggggcttttaaaaaagcgtgtatgctgggatacccattaaaaccattttctagaaggctaccatgagctgcactttttggggtgggaaaggtgaatgccagtggggatgcggggggatgagggtaggagggacttatagaaggggatttgtggctgtgggggagaaggttctacagcataagccttatcctgccagccaaggggatttattctaagagaagtgcatgtgaagaatggttgccactgttattagattgacaagatgttaatttctctgtaggttgtaactttaaaaataaatgaaattatttaagggttatgctgcactagtattccttagaggaaacagttctttaaagttaggaaagggagtaggcaggcatgtgttggcaaaggctgttaatagtagttaagtgttaagactgcttttctttaacgttttcatggtaatgcatatttagagcactgtatttttgtcttgttaagaaaatttagcatttctaaaagaaaaaagcaaccctctttcaaactgttaattctgtcacagcctgtatattttagtcatttgtaaatctcttcatacaatagtgacttcttttttgactgatacagtatcttaattacaaggttattttgtacttgtcttaatacactaagtgtaataaaaacggcttgagaaaa

SEQ ID NO: 365074 - DNA, 1455 bp, Homo sapiens
agcgggcgcccatttcctctgctccgccgcggccggaggtatccgcatcggcgagctgcgtctcccgggtgtcggccccggcggctccccgaccgtgcccggctgtggcgaggcggctccagcccagcctgtggcagccgcgacccccggggcgctccggagcccactgcgcggcgcgcgtgccggctgcctgcatggacgcggcactgaagcggagccgctcggaggagccagccgaaatcctgccgcctgcccgggacgaggaggaggaggaggaagaggggatggagcaggggctggaggaggaagaagaggtggatccccggatccagggagaactggagaagttaaatcagtccacggatgatatcaacagacgggagactgaacttgaggatgctcgtcagaagttccgctctgttctggttgaagcaacggtgaaactggatgaactggtgaagaaaattggcaaagctgtggaagactccaagccctactgggaggcacggagggtggcgaggcaggctcagctggaagctcagaaagccacgcaggacttccagagggccacagaggtgctccgtgccgccaaggagaccatctccctggccgagcagcggctgctggaggatgacaagcggcagttcgactccgcctggcaggagatgctgaatcacgccactcagagggtcatggaggcggagcagaccaagaccaggagcgagctggtgcataaggagacggcagccaggtacaatgccgccatgggccgcatgcgacagctggagaagaaactcaagagagccatcaacaagtccaagccttattttgaactcaaggcaaagtactatgtgcagctcgagcaactgaaaaagactgtggatgacctgcaggccaaactgaccctggcaaaaggcgagtacaagatggccctgaagaacctggagatgatctcagatgagatccacgagcggcggcgctccagtgccatggggcctcggggatgcggtgttggtgctgagggcagcagcacatctgtggaggatctgccagggagcaaacctgagcctgatgccatttctgtggcctcggaggcctttgaagatgacagctgtagcaactttgtgtctgaagatgactcggaaacccagtccgtgtccagctttagttcaggaccaacaagcccgtctgagatgcctgaccagttccctgcggttgtgaggcctggcagcctggatctgcccagccctgtgtccctgtcagagtttgggatgatgttcccagtgttgggccctcgaagtgaatgcagcggggcctcctcccctgaatgtgaagtagaacgaggagacagggcagaaggggcagagaataaaacaagtgacaaagccacggtcaacccacaagccacggtcaacccacaagccacggtcaacccacaagccacggtcaacccac

SEQ ID NO: 365075 - DNA, 490 bp, Homo sapiens
aagggttatgctgcactagtattccttagaggaaacagttctttaaagttaggaaagggagtaggcaggcatgtgttggcaaaggctgttaatagtagttaagtgttaagactgcttttctttaacgttttcatggtaatgcatatttagagcactgtatttttgtcttgttaagaaaatttagcatttctaaaagaaaaaagcaaccctctttcaaactgttaattctgtcacagcctgtatattttagtcatttgtaaatctcttcatacaatagtgacttcttttttgactgatacagtatcttaattacaaggttattttgtacttgtcttaatacactaagtgtaataaaaacggcttgagaaaaagtttctcctttctgtgacttcaaataagaactcccagtattgcctaaatcttctaggcaaccctttttccataaggaagagcatggagtgctgtggtcaccagtaatcattttcaatta

SEQ ID NO: 365076 - DNA, 450 bp, Homo sapiens
tgtgccaataatcatttaatatatgccaaatcttacacgtctactctaaactgctctaatgaagtttcagtgaccttgagggctaaagattgttcttctgggtaagagctcttgggctggtttttcagagcagagttcttgttgtgggtagactgtgactaggttcacagcctttgtggaacattccgtataacggcattgtggaagcaataactagttcctatgaaagaaccagagctgggaagatggctgggaagccaggccaaagtgggggcaacagcttgcttctctttctcttctcaccctcagtttgtatgggaaaatggagatgtcctctccactttatcccacgatatctaaatgaaaaagaaagaaaacccacacacaaagcaaaaactcaagtattaagagcacatatttttgacccagtggaggcttaaaaaaaaaaaa

SEQ ID NO: 365077 - DNA, 2795 bp, Homo sapiens
agcgggcgcccatttcctctgctccgccgcggccggaggtatccgcatcggcgagctgcgtctcccgggtgtcggccccggcggctccccgaccgtgcccggctgtggcgaggcggctccagcccagcctgtggcagccgcgacccccggggcgctccggagcccactgcgcggcgcgcgtgccggctgcctgcatggacgcggcactgaagcggagccgctcggaggagccagccgaaatcctgccgcctgcccgggacgaggaggaggaggaggaagaggggatggagcaggggctggaggaggaagaagaggtggatccccggatccagggagaactggagaagttaaatcagtccacggatgatatcaacagacgggagactgaacttgaggatgctcgtcagaagttccgctctgttctggttgaagcaacggtgaaactggatgaactggtgaagaaaattggcaaagctgtggaagactccaagccctactgggaggcacggagggtggcgaggcaggctcagctggaagctcagaaagccacgcaggacttccagagggccacagaggtgctccgtgccgccaaggagaccatctccctggccgagcagcggctgctggaggatgacaagcggcagttcgactccgcctggcaggagatgctgaatcacgccactcagagggtcatggaggcggagcagaccaagaccaggagcgagctggtgcataaggagacggcagccaggtacaatgccgccatgggccgcatgcgacagctggagaagaaactcaagagagccatcaacaagtccaagccttattttgaactcaaggcaaagtactatgtgcagctcgagcaactgaaaaagactgtggatgacctgcaggccaaactgaccctggcaaaaggcgagtacaagatggccctgaagaacctggagatgatctcagatgagatccacgagcggcggcgctccagtgccatggggcctcggggatgcggtgttggtgctgagggcagcagcacatctgtggaggatctgccagggagcaaacctgagcctgatgccatttctgtggcctcggaggcctttgaagatgacagctgtagcaactttgtgtctgaagatgactcggaaacccagtccgtgtccagctttagttcaggaccaacaagcccgtctgagatgcctgaccagttccctgcggttgtgaggcctggcagcctggatctgcccagccctgtgtccctgtcagagtttgggatgatgttcccagtgttgggccctcgaagtgaatgcagcggggcctcctcccctgaatgtgaagtagaacgaggagacagggcagaaggggcagagaataaaacaagtgacaaagccaacaacaaccggggcctcagcagtagcagtggcagtggtggcagcagtaagagccaaagcagcacctcccctgagggccaggccttggagaaccggatgaagcagctctccctacagtgctcaaagggaagagatggaattattgctgacataaaaatggtgcagattggctgattcatcctgggccctggccgatgtgcatatcaacatttatacatggaactggagaacattgtgccaataatcatttaatatatgccaaatcttacacgtctactctaaactgctctaatgaagtttcagtgaccttgagggctaaagattgttcttctgggtaagagctcttgggctggtttttcagagcagagttcttgttgtgggtagactgtgactaggttcacagcctttgtggaacattccgtataacggcattgtggaagcaataactagttcctatgaaagaaccagagctgggaagatggctgggaagccaggccaaagtgggggcaacagcttgcttctctttctcttctcaccctcagtttgtatgggaaaatggagatgtcctctccactttatcccacgatatctaaatgaaaaagaaagaaaacccacacacaaagcaaaaactcaagtattaagagcacatatttttgacccagtggaggcttaaaaaaaaaaaaatccaagaacacaattcattttcaccacctctggtgttcagagggggcttttaaaaaagcgtgtatgctgggatacccattaaaaccattttctagaaggctaccatgagctgcactttttggggtgggaaaggtgaatgccagtggggatgcggggggatgagggtaggagggacttatagaaggggatttgtggctgtgggggagaaggttctacagcataagccttatcctgccagccaaggggatttattctaagagaagtgcatgtgaagaatggttgccactgttattagattgacaagatgttaatttctctgtaggttgtaactttaaaaataaatgaaattatttaagggttatgctgcactagtattccttagaggaaacagttctttaaagttaggaaagggagtaggcaggcatgtgttggcaaaggctgttaatagtagttaagtgttaagactgcttttctttaacgttttcatggtaatgcatatttagagcactgtatttttgtcttgttaagaaaatttagcatttctaaaagaaaaaagcaaccctctttcaaactgttaattctgtcacagcctgtatattttagtcatttgtaaatctcttcatacaatagtgacttcttttttgactgatacagtatcttaattacaaggttattttgtacttgtcttaatacactaagtgtaataaaaacggcttgagaaaa

SEQ ID NO: 365078 - DNA, 625 bp, Homo sapiens
gtggcgaattcggcaccgaggggaggaggaagaagaggtgatccccggatccaggagaactggagaagttaaatcagtccacggatgatatcaacagacgggagactgaacttgaggatgctcgtcagaagttccgctctgttctggttgaagcaacggtgaaactggatgaactggtgaagaaaattggcaaagctgtggaagactccaagccctactgggaggcacggagggtggcgaggcaggctcagctggaagctcagaaagccacgcaggacttccagagggccacagaggtgctccgtgccgccaaggagaccatctccctggccgagcagcggctgctggaggatgacaagcggcagttcgactccgcctggcaggagatgctgaatcacgccactcagagggtcatggaggcggagcagaccaagaccaggagcgagctggtgcataaggagacggcagccaggtacaatgccgccatgggccgcatgcgacagctggagaagaaactcaagagagccatcaacaagtccaagccttatttgactcaggcaaagactatgtgcgtcgagcaatgaaaagacggggtgaccgagcaactgaccggaaaggatacaag

SEQ ID NO: 365079 - DNA, 2797 bp, Homo sapiens
  misc_feature (30)..(30): n is a, c, g, or t
cggatcggcagtactatacggtttatggtncgaggcctggtgatccgcatcggcgagctgcgtctcccgggtgtcggccccggcggctccccgaccgtgcccggctgtggcgaggcggctccagcccagcctgtggcagccgcgacccccggggcgctccggagcccactgcgcggcgcgcgtgccggctgcctgcatggacgcggcactgaagcggagccgctcggaggagccagccgaaatcctgccgcctgcccgggacgaggaggaggaggaggaagaggggatggagcaggggctggaggaggaagaagaggtggatccccggatccagggagaactggagaagttaaatcagtccacggatgatatcaacagacgggagactgaacttgaggatgctcgtcagaagttccgctctgttctggttgaagcaacggtgaaactggatgaactggtgaagaaaattggcaaagctgtggaagactccaagccctactgggaggcacggagggtggcgaggcaggctcagctggaagctcagaaagccacgcaggacttccagagggccacagaggtgctccgtgccgccaaggagaccatctccctggccgagcagcggctgctggaggatgacaagcggcagttcgactccgcctggcaggagatgctgaatcacgccactcagagggtcatggaggcggagcagaccaagaccaggagcgagctggtgcataaggagacggcagccaggtacaatgccgccatgggccgcatgcgacagctggagaagaaactcaagagagccatcaacaagtccaagccttattttgaactcaaggcaaagtactatgtgcagctcgagcaactgaaaaagactgtggatgacctgcaggccaaactgaccctggcaaaaggcgagtacaagatggccctgaagaacctggagatgatctcagatgagatccacgagcggcggcgctccagtgccatggggcctcggggatgcggtgttggtgctgagggcagcagcacatctgtggaggatctgccagggagcaaacctgagcctgatgccatttctgtggcctcggaggcctttgaagatgacagctgtagcaactttgtgtctgaagatgactcggaaacccagtccgtgtccagctttagttcaggaccaacaagcccgtctgagatgcctgaccagttccctgcggttgtgaggcctggcagcctggatctgcccagccctgtgtccctgtcagagtttgggatgatgttcccagtgttgggccctcgaagtgaatgcagcggggcctcctcccctgaatgtgaagtagaacgaggagacagggcagaaggggcagagaataaaacaagtgacaaagccaacaacaaccggggcctcagcagtagcagtggcagtggtggcagcagtaagagccaaagcagcacctcccctgagggccaggccttggagaaccggatgaagcagctctccctacagtgctcaaagggaagagatggaattattgctgacataaaaatggtgcagattggctgattcatcctgggccctggccgatgtgcatatcaacatttatacatggaactggagaacattgtgccaataatcatttaatatatgccaaatcttacacgtctactctaaactgctctaatgaagtttcagtgaccttgagggctaaagattgttcttctgggtaagagctcttgggctggtttttcagagcagagttcttgttgtgggtagactgtgactaggttcacagcctttgtggaacattccgtataacggcattgtggaagcaataactagttcctatgaaagaaccagagctgggaagatggctgggaagccaggccaaagtgggggcaacagcttgcttctctttctcttctcaccctcagtttgtatgggaaaatggagatgtcctctccactttatcccacgatatctaaatgaaaaagaaagaaaacccacacacaaagcaaaaactcaagtattaagagcacatatttttgacccagtggaggcttaaaaaaaaaaaaatccaagaacacaattcattttcaccacctctggtgttcagagggggcttttaaaaaagcgtgtatgctgggatacccattaaaaccattttctagaaggctaccatgagctgcactttttggggtgggaaaggtgaatgccagtggggatgcggggggatgagggtaggagggacttatagaaggggatttgtggctgtgggggagaaggttctacagcataagccttatcctgccagccaaggggatttattctaagagaagtgcatgtgaagaatggttgccactgttattagattgacaagatgttaatttctctgtaggttgtaactttaaaaataaatgaaattatttaagggttatgctgcactagtattccttagaggaaacagttctttaaagttaggaaagggagtaggcaggcatgtgttggcaaaggctgttaatagtagttaagtgttaagactgcttttctttaacgttttcatggtaatgcatatttagagcactgtatttttgtcttgttaagaaaatttagcatttctaaaagaaaaaagcaaccctctttcaaactgttaattctgtcacagcctgtatattttagtcatttgtaaatctcttcatacaatagtgacttcttttttgactgatacagtatcttaattacaaggttattttgtacttgtcttaatacactaagtgtaataaaaacggcttgagaaaa

SEQ ID NO: 365080 - DNA, 3135 bp, Homo sapiens
agcgggcgcccatttcctctgctccgccgcggccggaggtatccgcatcggcgagctgcgtctcccgggtgtcggccccggcggctccccgaccgtgcccggctgtggcgaggcggctccagcccagcctgtggcagccgcgacccccggggcgctccggagcccactgcgcggcgcgcgtgccggctgcctgcatggacgcggcactgaagcggagccgctcggaggagccagccgaaatcctgccgcctgcccgggacgaggaggaggaggaggaagaggggatggagcaggggctggaggaggaagaagaggtggatccccggatccagggagaactggagaagttaaatcagtccacggatgatatcaacagacgggagactgaacttgaggatgctcgtcagaagttccgctctgttctggttgaagcaacggtgaaactggatgaactggtgaagaaaattggcaaagctgtggaagactccaagccctactgggaggcacggagggtggcgaggcaggctcagctggaagctcagaaagccacgcaggacttccagagggccacagaggtgctccgtgccgccaaggagaccatctccctggccgagcagcggctgctggaggatgacaagcggcagttcgactccgcctggcaggagatgctgaatcacgccactcagagggtcatggaggcggagcagaccaagaccaggagcgagctggtgcataaggagacggcagccaggtacaatgccgccatgggccgcatgcgacagctggagaagaaactcaagagagccatcaacaagtccaagccttattttgaactcaaggcaaagtactatgtgcagctcgagcaactgaaaaagactgtggatgacctgcaggccaaactgaccctggcaaaaggcgagtacaagatggccctgaagaacctggagatgatctcagatgagatccacgagcggcggcgctccagtgccatggggcctcggggatgcggtgttggtgctgagggcagcagcacatctgtggaggatctgccagggagcaaacctgagcctgatgccatttctgtggcctcggaggcctttgaagatgacagctgtagcaactttgtgtctgaagatgactcggaaacccagtccgtgtccagctttagttcaggaccaacaagcccgtctgagatgcctgaccagttccctgcggttgtgaggcctggcagcctggatctgcccagccctgtgtccctgtcagagtttgggatgatgttcccagtgttgggccctcgaagtgaatgcagcggggcctcctcccctgaatgtgaagtagaacgaggagacagggcagaaggggcagagaataaaacaagtgacaaagccaacaacaaccggggcctcagcagtagcagtggcagtggtggcagcagtaagagccaaagcagcacctcccctgagggccaggccttggagaaccggatgaagcagctctccctacagtgctcaaagggaagagatggaattattgctgacataaaaatggtgcagattggctgattcatcctgggccctggccgatgtgcatatcaacatttatacatggaactggagaacattgtgccaataatcatttaatatatgccaaatcttacacgtctactctaaactgctctaatgaagtttcagtgaccttgagggctaaagattgttcttctgggtaagagctcttgggctggtttttcagagcagagttcttgttgtgggtagactgtgactaggttcacagcctttgtggaacattccgtataacggcattgtggaagcaataactagttcctatgaaagaaccagagctgggaagatggctgggaagccaggccaaagtgggggcaacagcttgcttctctttctcttctcaccctcagtttgtatgggaaaatggagatgtcctctccactttatcccacgatatctaaatgaaaaagaaagaaaacccacacacaaagcaaaaactcaagtattaagagcacatatttttgacccagtggaggcttaaaaaaaaaaaaatccaagaacacaattcattttcaccacctctggtgttcagagggggcttttaaaaaagcgtgtatgctgggatacccattaaaaccattttctagaaggctaccatgagctgcactttttggggtgggaaaggtgaatgccagtggggatgcggggggatgagggtaggagggacttatagaaggggatttgtggctgtgggggagaaggttctacagcataagccttatcctgccagccaaggggatttattctaagagaagtgcatgtgaagaatggttgccactgttattagattgacaagatgttaatttctctgtaggttgtaactttaaaaataaatgaaattatttaagggttatgctgcactagtattccttagaggaaacagttctttaaagttaggaaagggagtaggcaggcatgtgttggcaaaggctgttaatagtagttaagtgttaagactgcttttctttaacgttttcatggtaatgcatatttagagcactgtatttttgtcttgttaagaaaatttagcatttctaaaagaaaaaagcaaccctctttcaaactgttaattctgtcacagcctgtatattttagtcatttgtaaatctcttcatacaatagtgacttcttttttgactgatacagtatcttaattacaaggttattttgtacttgtcttaatacactaagtgtaataaaaacggcttgagaaaaaaaaaaaaaaaaaaaaaaaaaaaaaaaaaaaaaaaaaggggggggggggaaaaaaatcccggggggggcaacaggttatggcggtacaccggctcttctgtgcaaaaggggggcccaaaaggaggaggcgatataaaaaagacaacgggacggggcgcgcgcgtaaaccaacagctgggcggtgggacaacccgtctcccggcgacctggggaaggcacccctcctctggcggcgcccacattggggaccaccactacaaaaattaacgcgaggaaaataacactcagggcatcggcggaacagcgaatgcgggggagaagttgcacggttatttgaatg

SEQ ID NO: 365081 - DNA, 2688 bp, Homo sapiens
agcgggcgcccatttcctctgctccgccgcggccggaggtatccgcatcggcgagctgcgtctcccgggtgtcggccccggcggctccccgaccgtgcccggctgtggcgaggcggctccagcccagccgaaatcctgccgcctgcccgggacgaggaggaggaggaggaagaggggatggagcaggggctggaggaggaagaagaggtggatccccggatccagggagaactggagaagttaaatcagtccacggatgatatcaacagacgggagactgaacttgaggatgctcgtcagaagttccgctctgttctggttgaagcaacggtgaaactggatgaactggtgaagaaaattggcaaagctgtggaagactccaagccctactgggaggcacggagggtggcgaggcaggctcagctggaagctcagaaagccacgcaggacttccagagggccacagaggtgctccgtgccgccaaggagaccatctccctggccgagcagcggctgctggaggatgacaagcggcagttcgactccgcctggcaggagatgctgaatcacgccactcagagggtcatggaggcggagcagaccaagaccaggagcgagctggtgcataaggagacggcagccaggtacaatgccgccatgggccgcatgcgacagctggagaagaaactcaagagagccatcaacaagtccaagccttattttgaactcaaggcaaagtactatgtgcagctcgagcaactgaaaaagactgtggatgacctgcaggccaaactgaccctggcaaaaggcgagtacaagatggccctgaagaacctggagatgatctcagatgagatccacgagcggcggcgctccagtgccatggggcctcggggatgcggtgttggtgctgagggcagcagcacatctgtggaggatctgccagggagcaaacctgagcctgatgccatttctgtggcctcggaggcctttgaagatgacagctgtagcaactttgtgtctgaagatgactcggaaacccagtccgtgtccagctttagttcaggaccaacaagcccgtctgagatgcctgaccagttccctgcggttgtgaggcctggcagcctggatctgcccagccctgtgtccctgtcagagtttgggatgatgttcccagtgttgggccctcgaagtgaatgcagcggggcctcctcccctgaatgtgaagtagaacgaggagacagggcagaaggggcagagaataaaacaagtgacaaagccaacaacaaccggggcctcagcagtagcagtggcagtggtggcagcagtaagagccaaagcagcacctcccctgagggccaggccttggagaaccggatgaagcagctctccctacagtgctcaaagggaagagatggaattattgctgacataaaaatggtgcagattggctgattcatcctgggccctggccgatgtgcatatcaacatttatacatggaactggagaacattgtgccaataatcatttaatatatgccaaatcttacacgtctactctaaactgctctaatgaagtttcagtgaccttgagggctaaagattgttcttctgggtaagagctcttgggctggtttttcagagcagagttcttgttgtgggtagactgtgactaggttcacagcctttgtggaacattccgtataacggcattgtggaagcaataactagttcctatgaaagaaccagagctgggaagatggctgggaagccaggccaaagtgggggcaacagcttgcttctctttctcttctcaccctcagtttgtatgggaaaatggagatgtcctctccactttatcccacgatatctaaatgaaaaagaaagaaaacccacacacaaagcaaaaactcaagtattaagagcacatatttttgacccagtggaggcttaaaaaaaaaaaaatccaagaacacaattcattttcaccacctctggtgttcagagggggcttttaaaaaagcgtgtatgctgggatacccattaaaaccattttctagaaggctaccatgagctgcactttttggggtgggaaaggtgaatgccagtggggatgcggggggatgagggtaggagggacttatagaaggggatttgtggctgtgggggagaaggttctacagcataagccttatcctgccagccaaggggatttattctaagagaagtgcatgtgaagaatggttgccactgttattagattgacaagatgttaatttctctgtaggttgtaactttaaaaataaatgaaattatttaagggttatgctgcactagtattccttagaggaaacagttctttaaagttaggaaagggagtaggcaggcatgtgttggcaaaggctgttaatagtagttaagtgttaagactgcttttctttaacgttttcatggtaatgcatatttagagcactgtatttttgtcttgttaagaaaatttagcatttctaaaagaaaaaagcaaccctctttcaaactgttaattctgtcacagcctgtatattttagtcatttgtaaatctcttcatacaatagtgacttcttttttgactgatacagtatcttaattacaaggttattttgtacttgtcttaatacactaagtgtaataaaaacggcttgagaaaa

SEQ ID NO: 365082 - DNA, 2739 bp, Homo sapiens
agcgggcgcccatttcctctgctccgccgcggccggaggtatccgcatcggcgagctgcgtctcccgggtgtcggccccggcggctccccgaccgtgcccggctgtggcgaggcggctccagcccagcctgtggcagccgcgacccccggggcgctccggagcccactgcgcggcgcgcgtgccggctgcctgcatggacgcggcactgaagcggagccgctcggaggagccagccgaaatcctgccgcctgcccgggacgaggaggaggaggaggaagaggggatggagcaggggctggaggaggaagaagaggtggatccccggatccagggagaactggagaagttaaatcagtccacggatgatatcaacagacgggagactgaacttgaggatgctcgtcagaagttccgctctgttctggttgaagcaacggtgaaactggatgaactggtgaagaaaattggcaaagctgtggaagactccaagccctactgggaggcacggagggtggcgaggcaggctcagctggaagctcagaaagccacgcaggacttccagagggccacagaggtgctccgtgccgccaaggagaccatctccctggccgagcagcggctgctggaggatgacaagcggcagttcgactccgcctggcaggagatgctgaatcacgccactcagagggtcatggaggcggagcagaccaagaccaggagcgagctggtgcataaggagacggcagccaggtacaatgccgccatgggccgcatgcgacagctggagaagaaactcaagagagccatcaacaagtccaagccttattttgaactcaaggcaaagtactatgtgcagctcgagcaactgaaaaagactgtggatgacctgcaggccaaactgaccctggcaaaaggcgagtacaagatggccctgaagaactcggggatgcggtgttggtgctgagggcagcagcacatctgtggaggatctgccagggagcaaacctgagcctgatgccatttctgtggcctcggaggcctttgaagatgacagctgtagcaactttgtgtctgaagatgactcggaaacccagtccgtgtccagctttagttcaggaccaacaagcccgtctgagatgcctgaccagttccctgcggttgtgaggcctggcagcctggatctgcccagccctgtgtccctgtcagagtttgggatgatgttcccagtgttgggccctcgaagtgaatgcagcggggcctcctcccctgaatgtgaagtagaacgaggagacagggcagaaggggcagagaataaaacaagtgacaaagccaacaacaaccggggcctcagcagtagcagtggcagtggtggcagcagtaagagccaaagcagcacctcccctgagggccaggccttggagaaccggatgaagcagctctccctacagtgctcaaagggaagagatggaattattgctgacataaaaatggtgcagattggctgattcatcctgggccctggccgatgtgcatatcaacatttatacatggaactggagaacattgtgccaataatcatttaatatatgccaaatcttacacgtctactctaaactgctctaatgaagtttcagtgaccttgagggctaaagattgttcttctgggtaagagctcttgggctggtttttcagagcagagttcttgttgtgggtagactgtgactaggttcacagcctttgtggaacattccgtataacggcattgtggaagcaataactagttcctatgaaagaaccagagctgggaagatggctgggaagccaggccaaagtgggggcaacagcttgcttctctttctcttctcaccctcagtttgtatgggaaaatggagatgtcctctccactttatcccacgatatctaaatgaaaaagaaagaaaacccacacacaaagcaaaaactcaagtattaagagcacatatttttgacccagtggaggcttaaaaaaaaaaaaatccaagaacacaattcattttcaccacctctggtgttcagagggggcttttaaaaaagcgtgtatgctgggatacccattaaaaccattttctagaaggctaccatgagctgcactttttggggtgggaaaggtgaatgccagtggggatgcggggggatgagggtaggagggacttatagaaggggatttgtggctgtgggggagaaggttctacagcataagccttatcctgccagccaaggggatttattctaagagaagtgcatgtgaagaatggttgccactgttattagattgacaagatgttaatttctctgtaggttgtaactttaaaaataaatgaaattatttaagggttatgctgcactagtattccttagaggaaacagttctttaaagttaggaaagggagtaggcaggcatgtgttggcaaaggctgttaatagtagttaagtgttaagactgcttttctttaacgttttcatggtaatgcatatttagagcactgtatttttgtcttgttaagaaaatttagcatttctaaaagaaaaaagcaaccctctttcaaactgttaattctgtcacagcctgtatattttagtcatttgtaaatctcttcatacaatagtgacttcttttttgactgatacagtatcttaattacaaggttattttgtacttgtcttaatacactaagtgtaataaaaacggcttgagaaaa

SEQ ID NO: 365083 - DNA, 2624 bp, Homo sapiens
tgagacagagtctcactttgttgcccaggctggagtgcagtggcacgatcttggcttgctgcaacctccacctcctggattcaagtgattctcctgcctcagcctcccgagtagctgggagtacaggctcccacaaccatgcccagctaatttttgtatttaggtagaggcggggtttcaccatgttggccaagctggtcttgaactcctggcctcaagtgatccacccgccttggccttccatagtgctgggattacaggtgtgttactgcgcccagcccataagctgccttttaaaattttctccatggagctcttcccatgaaagctgttagtgtctgtaagtcatgaaggctcagctggaagctcagaaagccacgcaggacttccagagggccacagaggtgctccgtgccgccaaggagaccatctccctggccgagcagcggctgctggaggatgacaagcggcagttcgactccgcctggcaggagatgctgaatcacgccactcagagggtcatggaggcggagcagaccaagaccaggagcgagctggtgcataaggagacggcagccaggtacaatgccgccatgggccgcatgcgacagctggagaagaaactcaagagagccatcaacaagtccaagccttattttgaactcaaggcaaagtactatgtgcagctcgagcaactgaaaaagactgtggatgacctgcaggccaaactgaccctggcaaaaggcgagtacaagatggccctgaagaacctggagatgatctcagatgagatccacgagcggcggcgctccagtgccatggggcctcggggatgcggtgttggtgctgagggcagcagcacatctgtggaggatctgccagggagcaaacctgagcctgatgccatttctgtggcctcggaggcctttgaagatgacagctgtagcaactttgtgtctgaagatgactcggaaacccagtccgtgtccagctttagttcaggaccaacaagcccgtctgagatgcctgaccagttccctgcggttgtgaggcctggcagcctggatctgcccagccctgtgtccctgtcagagtttgggatgatgttcccagtgttgggccctcgaagtgaatgcagcggggcctcctcccctgaatgtgaagtagaacgaggagacagggcagaaggggcagagaataaaacaagtgacaaagccaacaacaaccggggcctcagcagtagcagtggcagtggtggcagcagtaagagccaaagcagcacctcccctgagggccaggccttggagaaccggatgaagcagctctccctacagtgctcaaagggaagagatggaattattgctgacataaaaatggtgcagattggctgattcatcctgggccctggccgatgtgcatatcaacatttatacatggaactggagaacattgtgccaataatcatttaatatatgccaaatcttacacgtctactctaaactgctctaatgaagtttcagtgaccttgagggctaaagattgttcttctgggtaagagctcttgggctggtttttcagagcagagttcttgttgtgggtagactgtgactaggttcacagcctttgtggaacattccgtataacggcattgtggaagcaataactagttcctatgaaagaaccagagctgggaagatggctgggaagccaggccaaagtgggggcaacagcttgcttctctttctcttctcaccctcagtttgtatgggaaaatggagatgtcctctccactttatcccacgatatctaaatgaaaaagaaagaaaacccacacacaaagcaaaaactcaagtattaagagcacatatttttgacccagtggaggcttaaaaaaaaaaaaatccaagaacacaattcattttcaccacctctggtgttcagagggggcttttaaaaaagcgtgtatgctgggatacccattaaaaccattttctagaaggctaccatgagctgcactttttggggtgggaaaggtgaatgccagtggggatgcggggggatgagggtaggagggacttatagaaggggatttgtggctgtgggggagaaggttctacagcataagccttatcctgccagccaaggggatttattctaagagaagtgcatgtgaagaatggttgccactgttattagattgacaagatgttaatttctctgtaggttgtaactttaaaaataaatgaaattatttaagggttatgctgcactagtattccttagaggaaacagttctttaaagttaggaaagggagtaggcaggcatgtgttggcaaaggctgttaatagtagttaagtgttaagactgcttttctttaacgttttcatggtaatgcatatttagagcactgtatttttgtcttgttaagaaaatttagcatttctaaaagaaaaaagcaaccctctttcaaactgttaattctgtcacagcctgtatattttagtcatttgtaaatctcttcatacaatagtgacttcttttttgactgatacagtatcttaattacaaggttattttgtacttgtcttaatacactaagtgtaataaaaacggcttgagaaaa

SEQ ID NO: 365084 - DNA, 2741 bp, Homo sapiens
agcgggcgcccatttcctctgctccgccgcggccggaggtatccgcatcggcgagctgcgtctcccgggtgtcggccccggcggctccccgaccgtgcccggctgtggcgaggcggctccagcccagcctgtggcagccgcgacccccggggcgctccggagcccactgcgcggcgcgcgtgccggctgcctgcatggacgcggcactgaagcggagccgctcggaggagccagccgaaatcctgccgcctgcccgggacgaggaggaggaggaggaagaggggatggagcaggggctggaggaggaagaagaggtggatccccggatccagggagaactggagaagttaaatcagtccacggatgatatcaacagacgggagactgaacttgaggatgctcgtcagaagttccgctctgttctggttgaagcaacggtgaaactggatgaactggtgaagaaaattggcaaagctgtggaagactccaagccctactgggaggcacggagggtggcgaggcaggctcagctggaagctcagaaagccacgcaggacttccagagggccacagaggtgctccgtgccgccaaggagaccatctccctggccgagcagcggctgctggaggatgacaagcggcagttcgactccgcctggcaggagatgctgaatcacgccactcagagggtcatggaggcggagcagaccaagaccaggagcgagctggtgcataaggagacggcagccaggtacaatgccgccatgggccgcatgcgacagctggagaagaaactcaagagagccatcaacaagtccaagccttattttgaactcaaggcaaagtactatgtgcagctcgagcaactgaaaaagactgtggatgacctgcaggccaaactgaccctggcaaaaggcgagtacaagatggccctgaagaacctggagatgatctcagatgagatccacgagcggcggcgctccagtgccatggggcctcggggatgcggtgttggtgctgagggcagcagcacatctgtggaggatctgccagggagcaaacctgagcctgatgccatttctgtggcctcggaggcctttgaagatgacagctgtagcaactttgtgtctgaagatgactcggaaacccagtccgtgtccagctttagttcaggaccaacaagcccgtctgagatgcctgaccagttccctgcggttgtgaggcctggcagcctggatctgcccagccctgtgtccctgtcagagtttgggatgatgttcccagtgttgggccctcgaagtgaatgcagcggggcctcctcccctgaatgtgaagtagaacgaggagacagggcagaaggggcagagaataaaacaagtgacaaagccaacaacaaccggggcctcagcagtagcagtggcagtggtggcagcagtaagagccaaagcagcacctcccctgagggccaggccttggagaaccggatgaagcagctctccctacagtgctcaaagggaagagatggaattattgctgacataaaaatggtgcagattggctgattcatcctgggccctggccgatgtgcatatcaacatttatacatggaactggagaacattgtgccaataatcatttaatatatgccaaatcttacacgtctactctaaactgctctaatgaagtttcagtgaccttgagggctaaagattgttcttctgggtaagagctcttgggctggtttttcagagcagagttcttgttgtgggtagactgtgactaggttcacagcctttgtggaacattccgtataacggcattgtggaagcaataactagttcctatgaaagaaccagagctgggaagatggctgggaagccaggccaaagtgggggcaacagcttgcttctctttctcttctcaccctcagtttgtatgggaaaatggagatgtcctctccactttatcccacgatatctaaatgaaaaagaaagaaaacccacacacaaagcaaaaactcaagtattaagagcacatatttttgacccagtggaggcttaaaaaaaaaaaaatccaagaacacaattcattttcaccacctctggtgttcagagggggcttttaaaaaagcgtgtatgctgggatacccattaaaaccattttctagaaggctaccatgagctgcactttttggggtgggaaaggtgaatgccagtggggatgcggggggatgagggtaggagggacttatagaaggggatttgtggctgtgggggagaaggttctacagcataagccttatcctgccagccaaggggatttattctaagagaagtgcatgtgaagaatggttgccactgttattagattgacaagatgttaatttctctgtaggttgtaactttaaagttctttaaagttaggaaagggagtaggcaggcatgtgttggcaaaggctgttaatagtagttaagtgttaagactgcttttctttaacgttttcatggtaatgcatatttagagcactgtatttttgtcttgttaagaaaatttagcatttctaaaagaaaaaagcaaccctctttcaaactgttaattctgtcacagcctgtatattttagtcatttgtaaatctcttcatacaatagtgacttcttttttgactgatacagtatcttaattacaaggttattttgtacttgtcttaatacactaagtgtaataaaaacggcttgagaaaa

SEQ ID NO: 365085 - DNA, 2534 bp, Homo sapiens
agcgggcgcccatttcctctgctccgccgcggccggaggtatccgcatcggcgagctgcgtctcccgggtgtcggccccggcggctccccgaccgtgcccggctgtggcgaggcggctccagcccagcctgtggcagccgcgacccccggggcgctccggagcccactgcgcggcgcgcgtgccggctgcctgcatggacgcggcactgaagcggagccgctcggaggagccagccgaaatcctgccgcctgcccgggacgaggaggaggaggaggaagaggggatggagcaggggctggaggaggaagaagaggtggatccccggatccagggagaactggagaagttaaatcagtccacggatgatatcaacagacgggagactgaacttgaggatgctcgtcagaagttccgctctgttctggttgaagcaacggtgaaactggatgaactggtgaagaaaattggcaaagctgtggaagactccaagccctactgggaggcacggagggtggcgaggcaggctcagctggaagctcagaaagccacgcaggacttccagagggccacagaggtgctccgtgccgccaaggagaccatctccctggccgagcagcggctgctggaggatgacaagcggcagttcgactccgcctggcaggagatgctgaatcacgccactcagagggtcatggaggcggagcagaccaagaccaggagcgagctggtgcataaggagacggcagccaggtacaatgccgccatgggccgcatgcgacagctggagaagaaactcaagagagccatcaacaagtccaagccttattttgaactcaaggcaaagtactatgtgcagctcgagcaactgaaaaagactgtggatgacctgcaggccaaactgaccctggcaaaaggcgagtacaagatggccctgaagaacctggagatgatctcagatgagatccacgagcggcggcgctccagtgccatggggcctcggggatgcggtgttggtgctgagggcagcagcacatctgtggaggatctgccagggagcaaacctgagcctgatgccatttctggagacagggcagaaggggcagagaataaaacaagtgacaaagccaacaacaaccggggcctcagcagtagcagtggcagtggtggcagcagtaagagccaaagcagcacctcccctgagggccaggccttggagaaccggatgaagcagctctccctacagtgctcaaagggaagagatggaattattgctgacataaaaatggtgcagattggctgattcatcctgggccctggccgatgtgcatatcaacatttatacatggaactggagaacattgtgccaataatcatttaatatatgccaaatcttacacgtctactctaaactgctctaatgaagtttcagtgaccttgagggctaaagattgttcttctgggtaagagctcttgggctggtttttcagagcagagttcttgttgtgggtagactgtgactaggttcacagcctttgtggaacattccgtataacggcattgtggaagcaataactagttcctatgaaagaaccagagctgggaagatggctgggaagccaggccaaagtgggggcaacagcttgcttctctttctcttctcaccctcagtttgtatgggaaaatggagatgtcctctccactttatcccacgatatctaaatgaaaaagaaagaaaacccacacacaaagcaaaaactcaagtattaagagcacatatttttgacccagtggaggcttaaaaaaaaaaaaatccaagaacacaattcattttcaccacctctggtgttcagagggggcttttaaaaaagcgtgtatgctgggatacccattaaaaccattttctagaaggctaccatgagctgcactttttggggtgggaaaggtgaatgccagtggggatgcggggggatgagggtaggagggacttatagaaggggatttgtggctgtgggggagaaggttctacagcataagccttatcctgccagccaaggggatttattctaagagaagtgcatgtgaagaatggttgccactgttattagattgacaagatgttaatttctctgtaggttgtaactttaaaaataaatgaaattatttaagggttatgctgcactagtattccttagaggaaacagttctttaaagttaggaaagggagtaggcaggcatgtgttggcaaaggctgttaatagtagttaagtgttaagactgcttttctttaacgttttcatggtaatgcatatttagagcactgtatttttgtcttgttaagaaaatttagcatttctaaaagaaaaaagcaaccctctttcaaactgttaattctgtcacagcctgtatattttagtcatttgtaaatctcttcatacaatagtgacttcttttttgactgatacagtatcttaattacaaggttattttgtacttgtcttaatacactaagtgtaataaaaacggcttgagaaaa

SEQ ID NO: 365086 - DNA, 2740 bp, Homo sapiens
agcgggcgcccatttcctctgctccgccgcggccggaggtatccgcatcggcgagctgcgtctcccgggtgtcggccccggcggctccccgaccgtgcccggctgtggcgaggcggctccagcccagcctgtggcagccgcgacccccggggcgctccggagcccactgcgcggcgcgcgtgccggctgcctgcatggacgcggcactgaagcggagccgctcggaggagccagccgaaatcctgccgcctgcccgggacgaggaggaggaggaggaagaggggatggagcaggggctggaggaggaagaagaggtggatccccggatccagggagaactggagaagttaaatcagtccacggatgatatcaacagacgggagactgaacttgaggatgctcgtcagaagttccgctctgttctggttgaagcaacggtgaaactggatgaactggtgaagaaaattggcaaagctgtggaagactccaagccctactgggaggcacggagggtggcgaggcaggctcagctggaagctcagaaagccacgcaggacttccagagggccacagaggtgctccgtgccgccaaggagaccatctccctggccgagcagcggctgctggaggatgacaagcggcagttcgactccgcctggcaggagatgctgaatcacgccactcagagggtcatggaggcggagcagaccaagaccaggagcgagctggtgcataaggagacggcagccaggtacaatgccgccatgggccgcatgcgacagctggagaagaaactcaagagagccatcaacaagtccaagccttattttgaactcaaggcaaagtactatgtgcagctcgagcaactgaaaaagactgtggatgacctgcaggccaaactgaccctggcaaaaggcgagtacaagatggccctgaagaacctggagatgatctcagatgagatccacgagcggcggcgctccagtgccatggggcctcggggatgcggtgttggtgctgagggcagcagcacatctgtggaggatctgccagggagcaaacctgagcctgatgccatttctgtggcctcggaggcctttgaagatgacagctgtagcaactttgtgtctgaagatgactcggaaacccagtccgtgtccagctttagttcaggaccaacaagcccgtctgagatgcctgaccagttccctgcggttgtgaggcctggcagcctggatctgcccagccctgtgtccctgtcagagtttgggatgatgttcccagtgttgggccctcgaagtgaatgcagcggggcctcctcccctgaatgtgaagtagaacgaggagacagggcagaaggggcagagaataaaacaagtgacaaagccaacaacaaccggggcctcagcagtagcagtggcagtggtggcagcagtaagagccaaagcagcacctcccctgagggccaggccttggagaaccggatgaagcagctctccctacagtgctcaaagggaagagatggaattattgctgacataaaaatggtgcagattggctgattcatcctgggccctggccgatgtgcatatcaacatttatacatggaactggagaacattgtgccaataatcatttaatatatgccaaatcttacacgtctactctaaactgctctaatgaagtttcagtgaccttgagggcttgttgtgggtagactgtgactaggttcacagcctttgtggaacattccgtataacggcattgtggaagcaataactagttcctatgaaagaaccagagctgggaagatggctgggaagccaggccaaagtgggggcaacagcttgcttctctttctcttctcaccctcagtttgtatgggaaaatggagatgtcctctccactttatcccacgatatctaaatgaaaaagaaagaaaacccacacacaaagcaaaaactcaagtattaagagcacatatttttgacccagtggaggcttaaaaaaaaaaaaatccaagaacacaattcattttcaccacctctggtgttcagagggggcttttaaaaaagcgtgtatgctgggatacccattaaaaccattttctagaaggctaccatgagctgcactttttggggtgggaaaggtgaatgccagtggggatgcggggggatgagggtaggagggacttatagaaggggatttgtggctgtgggggagaaggttctacagcataagccttatcctgccagccaaggggatttattctaagagaagtgcatgtgaagaatggttgccactgttattagattgacaagatgttaatttctctgtaggttgtaactttaaaaataaatgaaattatttaagggttatgctgcactagtattccttagaggaaacagttctttaaagttaggaaagggagtaggcaggcatgtgttggcaaaggctgttaatagtagttaagtgttaagactgcttttctttaacgttttcatggtaatgcatatttagagcactgtatttttgtcttgttaagaaaatttagcatttctaaaagaaaaaagcaaccctctttcaaactgttaattctgtcacagcctgtatattttagtcatttgtaaatctcttcatacaatagtgacttcttttttgactgatacagtatcttaattacaaggttattttgtacttgtcttaatacactaagtgtaataaaaacggcttgagaaaa

SEQ ID NO: 365087 - DNA, 1780 bp, Homo sapiens
agcgggcgcccatttcctctgctccgccgcggccggaggtatccgcatcggcgagctgcgtctcccgggtgtcggccccggcggctccccgaccgtgcccggctgtggcgaggcggctccagcccagcctgtggcagccgcgacccccggggcgctccggagcccactgcgcggcgcgcgtgccggctgcctgcatggacgcggcactgaagcggagccgctcggaggagccagccgaaatcctgccgcctgcccgggacgaggaggaggaggaggaagaggggatggagcaggggctggaggaggaagaagaggtggatccccggatccagggagaactggagaagttaaatcagtccacggatgatatcaacagacgggagactgaacttgaggatgctcgtcagaagttccgctctgttctggttgaagcaacggtgaaactggatgaactggtgaagaaaattggcaaagctgtggaagactccaagccctactgggaggcacggagggtggcgaggcaggctcagctggaagctcagaaagccacgcaggacttccagagggccacagaggtgctccgtgccgccaaggagaccatctccctggccgagcagcggctgctggaggatgacaagcggcagttcgactccgcctggcaggagatgctgaatcacgccactcagagggtcatggaggcggagcagaccaagaccaggagcgagctggtgcataaggagacggcagccaggtacaatgccgccatgggccgcatgcgacagctggagaagaaactcaagagagccatcaacaagtccaagccttattttgaactcaaggcaaagtactatgtgcagctcgagcaactgaaaaagactgtggatgacctgcaggccaaactgaccctggcaaaaggcgagtacaagatggccctgaagaacctggagatgatctcagatgagatccacgagcggcggcgctccagtgccatggggcctcggggatgcggtgttggtgctgagggcagcagcacatctgtggaggatctgccagggagcaaacctgagcctgatgccatttctgtggcctcggaggcctttgaagatgacagctgtagcaactttgtgtctgaagatgactcggaaacccagtccgtgtccagctttagttcaggaccaacaagcccgtctgagatgcctgaccagttccctgcggttgtgaggcctggcagcctggatctgcccagccctgtgtccctgtcagagtttgggatgatgttcccagtgttgggccctcgaagtgaatgcagcggggcctcctcccctgaatgtgaagtagaacgaggagacagggcagaaggggcagagaataaaacaagtgacaaagccaacaacaaccggggcctcagcagtagcagtggcagtggtggcagcagtaagagccaaagcagcacctcccctgagggccaggccttggagaaccggatgaagcagctctccctacagtgctcaaagggaagagatggaattattgctgacataaaaatggtgcagattggctgattcatcctgggccctggccgatgtgcatatcaacatttatacatggaactggagaacattgtgccaataatcatttaatatatgccaaatcttacacgtctactctaaactgctctaatgaagtttcagtgaccttgagggctacgttgttgttggtacgacttagactagattcccaaccttttgtggacaattccgtttaccgtctttgtggaaca

SEQ ID NO: 365088 - DNA, 875 bp, Homo sapiens
agcgggcgcccatttcctctgctccgccgcggccggaggtatccgcatcggcgagctgcgtctcccgggtgtcggccccggcggctccccgaccgtgcccggctgtggcgaggcggctccagcccagcctgtggcagccgcgacccccggggcgctccggagcccactgcgcggcgcgcgtgccggctgcctgcatggacgcggcactgaagcggagccgctcggaggagccagccgaaatcctgccgcctgcccgggacgaggaggaggaggaggaagaggggatggagcaggggctggaggaggaagaagaggtggatccccggatccagggagaactggagaagttaaatcagtccacggatgatatcaacagacgggagactgaacttgaggatgctcgtcagaagttccgctctgttctggttgaagcaacggtgaaactggatgaactggtgaagaaaattggcaaagctgtggaagactccaagccctactgggaggcacggagggtggcgaggcaggctcagctggaagctcagaaagccacgcaggacttccagagggccacagaggtgctccgtgccgccaaggagaccatctccctggccgagcagcggctgctggaggatgacaagcggcagttcgactccgcctggcaggagatgctgaatcacgccactcagagggtcatggaggcggagcagaccaagaccaggagcgagctggtgcataaggagacggcagccaggtacaatgccgccatgggccgcatgcgacagctggagaagaaactcaagagagccatcaacaagtccaagtaagtctggacagggccttccctggggccgtgcggctgtcctagtctgcatctt

SEQ ID NO: 365089 - DNA, 1908 bp, Homo sapiens
gctttttttacagaaaagtacttgcaggagcatcctgaagaccaggagaaggttgagctgctaaagcgactaatagcattacagatgcccctgctaacagaagggatccgcatccatggggagaaactcacagagcagctgaagccgctgcatgagcggttgtcttcttgcttccgggaactcaaggagaaagtagaaaagcactatggggttataacactgccacccaacttgacggagaggaagcaaagccgcacggggtctattgtgctcccctacatcatgtcttccactctgcggaggttgtccatcacctcagtcacttcctctgtggtttccacctcttcaaactcgtctgacaatgctccttccagaccgggatctgatggctcaatcttggagccacttttggagcgcagggcctcgtcaggtgccagagttgaagatctgtcccttagagaggagaacagcgagaaccggatcagcaagtttaagagaaaagactggagtctgagcaagtcccaggtcattgcagagaaagcaccagaacccgatttgatgagcccaaccagaaaagcacaaaggccaaagagtctccagttgatggataatcggctatcaccatttcacggttcttcacctcctcagtcaacacccttgagcccacctccactcactcccaaagccaccaggaccctaagctccccatcgttgcagacagatggaatcgcggccactcctgtcccacctccacctccccccaaaagcaagccctatgaaggcagccagaggaactccactgagctcgctcccccactgcctgtccgaagagaagccaaagcaccaccccctccacctccaaaggctcggaagtctggcatccctacttccgagcctggatcccagtaaggatcttgccctccctgcaacaccgagtgccttagacagctgctgcctgagaactggcctccagccggtgtcctcattccatggggctccctgctgactgcatttcctgatctgggatgatgtttaccagcccaaaaccagtcatgttcttccaaaagcttctctttgatagaattttgaggccatgccacctcccttccagtccacatggaattccagaatcagtcacagcctctgattttttccaagaagagattgccttcaccattgttaaatgtcagcctgtacggcagagacatggtggtctgcacaagcctggacaagttcttccatattgatggtggagcaacccctgtaatctactccttggaaggattttttgctttgcttatgaaaagctgtgcttgagacttaggtacttttctcacgtggacacactgatcccatcccatattgcatctttgaagagatggatatcaagtacactttggtagctgaaataatcatatctttctgatgtctattgtatctcctttgaggaaaagaacacacatttttaatggagattggctgctttcaggtatgtgtgtctatcattgaaagagcatggactcaaacatcagccctgagttcttgagtccacccaactcccatcttcttgtggcacaggaaagctgccctctccctctcccaccacactcctgactaatggccttcactgcgtcgcagtcactccttccctacggacttctttgaagctcttccttttgcacatacggctttttttttttttttttttttgtcctattacctcctctgagcgcaaatcactggctacaagggacttaccagtctggattcagcagtttcttttctaaaacccatttgggtgactcagcagccgcatctgctacctgattttatcctggagaatacagtgcaatatttctctttgattatttattcctcttgattgtggaattaatttgattgcttgct

SEQ ID NO: 365090 - DNA, 2629 bp, Homo sapiens
cagttacagtttcctggagggagtggatattttcctaagcacttgggctatatcagagaacagaataataccatacattccagaaaatgttgtcatcttcagcttaatactaaaaccctgaacaaaaaaagttttggccaggcacggtagctcacgcctgtaatcccagcactttgggaggccgaggcaggtgaatcacgaggtcaggagatcgagatcatcctggctacagtgaaaccccatctgtactaaaaaatacaaaaaattagctgggcgtgatggtgggtgcctgtagtcccagctacctgggaggctgaggcaggagaatggcgtgaacccgggaggcggagcttgcagtgagctgagatcgcgccactgcactccaacctgggcaacagagcgagactccatctcaaaaaaacaaaaataaaaaaaataaagtttttgcttcagaacaccttgtggagctcttgaaacttctggcgagggcgtcacctgtgtgatgtggggtaagaagtcttcttcgttctatccgcagaaaccatagaatgtggctttcatcagttggttgaccaggttggcttaggtgttacagtgccagcaacatttccatgagcttccttgctcagtgcctctctctgccgcctgcactttctgtcatttctaggctccccatcgttgcagacagatggaatcgcggccactcctgtcccacctccacctccccccaaaagcaagccctatgaaggcagccagaggaactccactgagctcgctcccccactgcctgtccgaagagaagccaaagcaccaccccctccacctccaaaggctcggaagtctggcatccctacttccgagcctggatcccagtaaggatcttgccctccctgcaacaccgagtgccttagacagctgctgcctgagaactggcctccagccggtgtcctcattccatggggctccctgctgactgcatttcctgatctgggatgatgtttaccagcccaaaaccagtcatgttcttccaaaagcttctctttgatagaattttgaggccatgccacctcccttccagtccacatggaattccagaatcagtcacagcctctgattttttccaagaagagattgccttcaccattgttaaatgtcagcctgtacggcagagacatggtggtctgcacaagcctggacaagttcttccatattgatggtggagcaacccctgtaatctactccttggaaggattttttgctttgcttatgaaaagctgtgcttgagacttaggtacttttctcacgtggacacactgatcccatcccatattgcatctttgaagagatggatatcaagtacactttggtagctgaaataatcatatctttctgatgtctattgtatctcctttgaggaaaagaacacacatttttaatggagattggctgctttcaggtatgtgtgtctatcattgaaagagcatggactcaaacatcagccctgagttcttgagtccacccaactcccatcttcttgtggcacaggaaagctgccctctccctctcccaccacactcctgactaatggccttcactgcgtcgcagtcactccttccctacggacttctttgaagctcttccttttgcacatacggctttttttttttttttttttttgtcctattacctcctctgagcgcaaatcactggctacaagggacttaccagtctggattcagcagtttcttttctaaaacccatttgggtgactcagcagccgcatctgctacctgattttatcctggagaatacagtgcaatatttctctttgattatttattcctcttgattgtggaattaatttgattgcttgctaatggtactagtagtactcctttcagaagaaaaaatggagcgatttaggtgaccaaatattacatacataaatagccacatgaagttttagacgtttggacttgaagcctcaaagatcaaccaaccagtccccttatttagtaaataaggaaattgaggctacacacagaaaattgtgctacagattattactaataacccagcttgctaaattaggctatacctaggtaatctctagaagacaactctgacagactctttaatatttacccctggttggaacaatatttgaaatgtcccagatatttctatgctacttagatatttgtggcaaagcagaaagctttttgactgtgaaggcagaggtcagcactgggggaaacttgctggtggtctctcccacaaccttgcccagagtcctttccactaaggaggtgaagagaacagagaaagagatttccatttctgctgccagagctggtatttgcctgcctgattctctgtgtttcctgtttcaccgccaccctttcaggagagaactacaccagttcatcatgagggtcagggaagcaaaagctctcagatgtgtccagggcgttacttaagaaatgagtatgcagattctggaaggggtgtggaaaaggtgatcctttacccccacccaggaaaacctgcattgtgctagcatggaagaatcatgggctttggaattaaacccatttggtggaattaaacccatttggtttcaaatccc

SEQ ID NO: 365091 - DNA, 2976 bp, Homo sapiens
cagttacagtttcctggagggagtggatattttcctaagcacttgggctatatcagagaacagaataataccatacattccagaaaatgttgtcatcttcagcttaatactaaaaccctgaacaaaaaaagttttggccaggcacggtagctcacgcctgtaatcccagcactttgggaggccgaggcaggtgaatcacgaggtcaggagatcgagatcatcctggctacagtgaaaccccatctgtactaaaaaatacaaaaaattagctgggcgtgatggtgggtgcctgtagtcccagctacctgggaggctgaggcaggagaatggcgtgaacccgggaggcggagcttgcagtgagctgagatcgcgccactgcactccaacctgggcaacagagcgagactccatctcaaaaaaacaaaaataaaaaaaataaagtttttgcttcagaacaccttgtggagctcttgaaacttctggcgagggcgtcacctgtgtgatgtggggtaagaagtcttcttcgttctatccgcagaaaccatagaatgtggctttcatcagttggttgaccaggttggcttaggtgttacagtgccagcaacatttccatgagcttccttgctcagtgcctctctctgccgcctgcactttctgtcatttctaggctccccatcgttgcagacagatggaatcgcggccactcctgtcccacctccacctccccccaaaagcaagccctatgaaggcagccagaggaactccactgagctcgctcccccactgcctgtccgaagagaagccaaagcaccaccccctccacctccaaaggctcggaagtctggcatccctacttccgagcctggatcccagtaaggatcttgccctccctgcaacaccgagtgccttagacagctgctgcctgagaactggcctccagccggtgtcctcattccatggggctccctgctgactgcatttcctgatctgggatgatgtttaccagcccaaaaccagtcatgttcttccaaaagcttctctttgatagaattttgaggccatgccacctcccttccagtccacatggaattccagaatcagtcacagcctctgattttttccaagaagagattgccttcaccattgttaaatgtcagcctgtacggcagagacatggtggtctgcacaagcctggacaagttcttccatattgatggtggagcaacccctgtaatctactccttggaaggattttttgctttgcttatgaaaagctgtgcttgagacttaggtacttttctcacgtggacacactgatcccatcccatattgcatctttgaagagatggatatcaagtacactttggtagctgaaataatcatatctttctgatgtctattgtatctcctttgaggaaaagaacacacatttttaatggagattggctgctttcaggtatgtgtgtctatcattgaaagagcatggactcaaacatcagccctgagttcttgagtccacccaactcccatcttcttgtggcacaggaaagctgccctctccctctcccaccacactcctgactaatggccttcactgcgtcgcagtcactccttccctacggacttctttgaagctcttccttttgcacatacggctttttttttttttttttttttgtcctattacctcctctgagcgcaaatcactggctacaagggacttaccagtctggattcagcagtttcttttctaaaacccatttgggtgactcagcagccgcatctgctacctgattttatcctggagaatacagtgcaatatttctctttgattatttattcctcttgattgtggaattaatttgattgcttgctaatggtactagtagtactcctttcagaagaaaaaatggagcgatttaggtgaccaaatattacatacataaatagccacatgaagttttagacgtttggacttgaagcctcaaagatcaaccaaccagtccccttatttagtaaataaggaaattgaggctacacacagaaaattgtgctacagattattactaataacccagcttgctaaattaggctatacctaggtaatctctagaagacaactctgacagactctttaatatttacccctggttggaacaatatttgaaatgtcccagatatttctatgctacttagatatttgtggcaaagcagaaagctttttgactgtgaaggcagaggtcagcactgggggaaacttgctggtggtctctcccacaaccttgcccagagtcctttccactaaggaggtgaagagaacagagaaagagatttccatttctgctgccagagctggtatttgcctgcctgattctctgtgtttcctgtttcaccgccaccctttcaggagagaactacaccagttcatcatgagggtcagggaagcaaaagctctcagatgtgtccagggcgttacttaagaaatgagtatgcagattctggaaggggtgtggaaaaggtgatcctttacccccacccaggaaaacctgcattgtgctagcatggaagaatcatgggctttggaattaaacccatttggtggaattaaacccatttggtttcaaatcccagttatgacatctgttaactttgcaaactcacaaaaattatttgaaattatctgagttttcattttctcaccttccagaatggggataatgcctcctgcatcggttgttgtgaggtttcaatgagatgaaatatgggaaagaagaggtactcacctgatggtccctgctttcctctgctaggctctgagtaggaactggaactctctaagagcattactcatactttttttttcttccaaggtagtttggaatgtgagtgcaagttagttctgcacatacagcccttctccaaatggtggtttcctttgaggtcttttacatgattatttatgactagagacaaact

SEQ ID NO: 365092 - DNA, 1639 bp, Homo sapiens
gctttttttacagaaaagtacttgcaggagcatcctgaagaccaggagaaggttgagctgctaaagcgactaatagcattacagatgcccctgctaacagaagggatccgcatccatggggagaaactcacagagcagctgaagccgctgcatgagcggttgtcttcttgcttccgggaactcaaggagaaagtagaaaagcactatggggttataacactgccacccaacttgacggagaggaagcaaagccgcacggggtctattgtgctcccctacatcatgtcttccactctgcggaggttgtccatcacctcagtcacttcctctgtggtttccacctcttcaaactcgtctgacaatgctccttccagaccgggatctgatggctcaatcttggagccacttttggagcgcagggcctcgtcaggtgccagagttgaagatctgtcccttagagaggagaacagcgagaaccggatcagcaagtttaagagaaaagactggagtctgagcaagtcccaggtcattgcagagaaagcaccagaacccgatttgatgagcccaaccagaaaagcacaaaggccaaagagtctccagttgatggataatcggctatcaccatttcacggttcttcacctcctcagtcaacacccttgagcccacctccactcactcccaaagccaccaggaccctaagctccccatcgttgcagacagatggaatcgcggccactcctgtcccacctccacctccccccaaaagcaagccctatgaaggcagccagaggaactccactgagctcgctcccccactgcctgtccgaagagaagccaaagcaccaccccctccacctccaaaggctcggaagtctggcatccctacttccgagcctggatcccagtaaggatcttgccctccctgcaacaccgagtgccttagacagctgctgcctgagaactggcctccagccggtgtcctcattccatggggctccctgctgactgcatttcctgatctgggatgatgtttaccagcccaaaaccagtcatgttcttccaaaagcttctctttgatagaattttgaggccatgccacctcccttccagtccacatggaattccagaatcagtcacagcctctgattttttccaagaagagattgccttcaccattgttaaatgtcagcctgtacggcagagacatggtggtctgcacaagcctggacaagttcttccatattgatggtggagcaacccctgtaatctactccttggaaggattttttgctttgcttatgaaaagctgtgcttgagacttaggtacttttctcacgtggacacactgatcccatcccatattgcatctttgaagagatggatatcaagtacactttggtagctgaaataatcatatctttctgatgtctattgtatctcctttgaggaaaagaacacacatttttaatggagattggctgctttcaggttgtggatcacatcattgcctaattttattaaagacggagtgaagaaattatttgattccactttagagactcttccaatggaggtatttgggaaacctgtcattgtgcagtagcaaatatttgtattaaaaagaggcggttttccccc

SEQ ID NO: 365093 - DNA, 2091 bp, Homo sapiens
ggactagtgctggtggctttgggagtgagttgatggataatcggctatcaccatttcacggttcttcacctcctcagtcaacacccttgagcccacctccactcactcccaaagccaccaggaccctaagctccccatcgttgcagacagatggaatcgcggccactcctgtcccacctccacctccccccaaaagcaagccctatgaaggcagccagaggaactccactgagctcgctcccccactgcctgtccgaagagaagccaaagcaccaccccctccacctccaaaggctcggaagtctggcatccctacttccgagcctggatcccagtaaggatcttgccctccctgcaacaccgagtgccttagacagctgctgcctgagaactggcctccagccggtgtcctcattccatggggctccctgctgactgcatttcctgatctgggatgatgtttaccagcccaaaaccagtcatgttcttccaaaagcttctctttgatagaattttgaggccatgccacctcccttccagtccacatggaattccagaatcagtcacagcctctgattttttccaagaagagattgccttcaccattgttaaatgtcagcctgtacggcagagacatggtggtctgcacaagcctggacaagttcttccatattgatggtggagcaacccctgtaatctactccttggaaggattttttgctttgcttatgaaaagctgtgcttgagacttaggtacttttctcacgtggacacactgatcccatcccatattgcatctttgaagagatggatatcaagtacactttggtagctgaaataatcatatctttctgatgtctattgtatctcctttgaggaaaagaacacacatttttaatggagattggctgctttcaggtatgtgtgtctatcattgaaagagcatggactcaaacatcagccctgagttcttgagtccacccaactcccatcttcttgtggcacaggaaagctgccctctccctctcccaccacactcctgactaatggccttcactgcgtcgcagtcactccttccctacggacttctttgaagctcttccttttgcacatacggctttttttttttttttttttttgtcctattacctcctctgagcgcaaatcactggctacaagggacttaccagtctggattcagcagtttcttttctaaaacccatttgggtgactcagcagccgcatctgctacctgattttatcctggagaatacagtgcaatatttctctttgattatttattcctcttgattgtggaattaatttgattgcttgctaatggtactagtagtactcctttcagaagaaaaaatggagcgatttaggtgaccaaatattacatacataaatagccacatgaagttttagacgtttggacttgaagcctcaaagatcaaccaaccagtccccttatttagtaaataaggaaattgaggctacacacagaaaattgtgctacagattattactaataacccagcttgctaaattaggctatacctaggtaatctctagaagacaactctgacagactctttaatatttacccctggttggaacaatatttgaaatgtcccagatatttctatgctacttagatatttgtggcaaagcagaaagctttttgactgtgaaggcagaggtcagcactgggggaaacttgctggtggtctctcccacaaccttgcccagagtcctttccactaaggaggtgaagagaacagagaaagagatttccatttctgctgccagagctggtatttgcctgcctgattctctgtgtttcctgtttcaccgccaccctttcaggagagaactacaccagttcatcatgagggtcagggaagcaaaagctctcagatgtgtccagggcgttacttaagaaatgagtatgcagattctggaaggggtgtggaaaaggtgatcctttacccccacccaggaaaacctgcattgtgctagcatggaagaatcatgggctttggaattaaacccatttggtggaattaaacccatttggtttcaaatccc

SEQ ID NO: 365094 - DNA, 727 bp, Homo sapiens
cgcctgtctgtcgccttggcaacgggacgcataagcacgcgaggcgcgcggtggcggtttggatctggcccctggggaatcgcgttatgtcgcgaccgaagatgacatcattgtatccagagaaaactcaaaggatttacaaactaccagaactaatcattcagcaagggcatcaaatacaagaaccaaaattacaagggccatggattgtcaaagggaaaagagcgagagcagagagcatcgatccggttcaagaccaccctcatgaacacactcatggacgtccttcgccacaggccaggatgggtggaagtgaaggagacacaagaagctctgacgaccagaaagatgatattcccgtggagaactatgtggctcagcgttacattgaaaatccttacctgataggaggccgcaagtttgacctgcgtgtctatgtgctggtgatgtcgtacatcccgctgcgggcctggctctaccgggatggctttgcccgattctccaacacccgcttcacactgaacagcattgatgaccagtatgttcacctcaccaacgtggctgtgcaaaaaacatctcccgactaccacccaaagaagggctgcaagtggacgctgcagcgcttccggcagtacctggcgtccaaacacgggcccgaggcagtggagacactcttcagggacatcgacaacatctttgtcaaaagcctgcagagtgtgcagaaggt

SEQ ID NO: 365095 - DNA, 3090 bp, Homo sapiens
  misc_feature (2679)..(2679): n is a, c, g, or t
  misc_feature (2835)..(2835): n is a, c, g, or t
  misc_feature (2923)..(2923): n is a, c, g, or t
  misc_feature (2938)..(2938): n is a, c, g, or t
  misc_feature (2970)..(2970): n is a, c, g, or t
  misc_feature (2985)..(2985): n is a, c, g, or t
  misc_feature (2991)..(2991): n is a, c, g, or t
  misc_feature (2998)..(2998): n is a, c, g, or t
  misc_feature (3034)..(3034): n is a, c, g, or t
  misc_feature (3049)..(3049): n is a, c, g, or t
  misc_feature (3059)..(3059): n is a, c, g, or t
cgcctgtctgtcgccttggcaacgggacgcataagcacgcgaggcgcgcggtggcggtttggatctggcccctggggaatcgcgttatgtcgcgaccgaagaaccaaaattacaagggccatggattgtcaaagggaaaagagcgagagcagagagcatcgatccggttcaagaccaccctcatgaacacactcatggacgtccttcgccacaggccaggatgggtggaagtgaaggacgaaggggagtgggatttctactggtgtgacgtcagctggctccgggagaacttcgaccacacctacatggatgaacatgtgcggatcagtcacttccggaaccactatgagctgacccggaagaactacatggtgaagaacctgaagcggttccggaagcagctggagcgtgaggcaggaaagctggaggcagccaagtgtgacttcttccccaaaacctttgagatgccttgcgagtaccacctgtttgtagaggagtttcgcaaaaacccaggaatcacctggatcatgaagcctgacacaagaagctctgacgaccagaaagatgatattcccgtggagaactatgtggctcagcgttacattgaaaatccttacctgataggaggccgcaagtttgacctgcgtgtctatgtgctggtgatgtcgtacatcccgctgcgggcctggctctaccgggatggctttgcccgattctccaacacccgcttcacactgaacagcattgatgaccagtatgttcacctcaccaacgtggctgtgcaaaaaacatctcccgactaccacccaaagaaggtggctcctggaggtcaatgcgtccccatcactgacagccagcagccaggaagactatgagctcaagacctgcctcctggaagacaccctgcatgttgtggacatggaagcgagagaagtttgagggctgattctccttgctggtaactgggacacattcccattcctaaaccactcactgtgactctgcttgaccaggctcacgggaagggagaagcgagtcgggggctttgacctcatgtggaatgatggccctgttagcagagaggagggggctcctgacctgtcgggaatgggaaactttgtgaccaacacacatctcggtatgtagggccaggtggggagtgggcacaagggatggggtcatgggaggtaccaggtagtctaggaggcagcttgggatagtggttagattgtttgaattcaatctgcaacttaccagctgtgtgaccttgggcaagggacttaacctctgttcctcgtttttaaacttggtttctaaaaagtgaaaactttccctgattataaaaaagggattcacactcattgtagaatatttgaaaactagagaaagaaataaaaacatccagacataagcatctttaacaatctggtgtatttccttccagttcttaaaaaatgcatatattcatactttttcttttataaaattggcattgggctagagttttgaatccctcttttccccttggcatttttcattcaagcatattaagagcctccctcttgaatgcactttttggtccagtccggatgaaatcttttacatacattatctcattttatctttaaggagtttttattgtcattttacagatgaggaaatgatatccaggtgctatgtaacttgctgaatgaaggttttggccataagtggtgagccaggactcaaactcccatctgcctggctccaaaacttgagtgcttgtccgctagactctcctgcctcttggcagagtttaaaaaaattaccatatggctgcaaaatatttcagtttgtacatatgccaaaatttactaaaccaatttcttataattggacatttggcacaattgcattttattttttttttacttttataaattataccatgatgaacatcctttcacattaagctcggctgaaattctggccatttcctgaggacagattcctagaagcagaattattgggccaaagggatgggattattacaaccaaatttctttccagaaagattatacgaatttgtcagatttgaatttttagaaaaaagaaatctgtgccaactggtgaggtaaaacatactgactcgttgttttatgtgcattccattgattactggtgaggtttccgttttttaaatttgcatttcttcttttgtaagctgtccatactctttatccatttttctatgggttgtttagttttctaaatgtataaggcttcagatgactatataacactgtccaagcttaatttaatatgcatacaatcacctggaaatcttgttaaactatagattgtgactccataggtctagggtggggcctaagattgtatttctaacaagctcctgggtgatgctctattgattaaccattgctgtgtaacaagccctcccaaaacctagcagcttaaagcaactattttatttgctcatccttcctcaggtctctcctggggtcacttatagggctgcaggcacctggcagatttactggagacttgatggtgtacgacagcctcattcataggtgtgggggttgatactggctgtcagttgggcctctctttccatgtggccactcgtcttccaacagtctggccctggcttcttcacgtggtagactcggggttctnagagggtgagaaaacacactgcaaagccttttgcggcccggactcagaagtcccataaagtcattctgctacaatcaaagcatttgctggtgtagcccagtcactgggtaagaaaatagaccccacctcgccgggcgcggtggctcacgcctgtantcccaacactttgggaggccgaggcgggcggatcatgaggtcaggagagcgaaaccatcctggctaacacggtgaaacactgtctctnctaaaaaatacaaanaaattagccaggcgtgctggcgggcgcctgtngtcagctactcgggnggctgnggcaggngaatggcgtgaacccgggaggcggagcttgcagtgngccgagattgcgccnctgcactccngcctgggcgacagagcgagactgtctcacac

SEQ ID NO: 365096 - DNA, 1381 bp, Homo sapiens
tgggggcgggggccttaccccaccctggcaccggcaggcgcgggcggatggggggatgtcgcctagagccccccggccggcccacaaactcccgtcccccttccggctctgcctggacgtccctgcgggccccgggggaaagcacccaacttctcccgcctcggcttctagcagaaacgtgacggggctggactttgatcgccgagggctctctgctcttcagagtctgcttggaacgggataagtgggagggatggtgccatccagggaagctctgctgggaccaggcacaactgccattaggtgccccaagaaattacagatgacatcattgtatccagagaaaactcaaaggatttacaaactaccagaactaatcattcagcaagggcatcaaatacaagaaccaaaattacaagggccatggattgtcaaagggaaaagagcgagagcagagagcatcgatccggttcaagaccaccctcatgaacacactcatggacgtccttcgccacaggccaggatgggtggaagtgaaggacgaaggggagtgggatttctactggtgtgacgtcagctggctccgggagaacttcgaccacacctacatggatgaacatgtgcggatcagtcacttccggaaccactatgagctgacccggaagaactacatggtgaagaacctgaagcggttccggaagcagctggagcgtgaggcaggaaagctggaggcagccaagtgtgacttcttccccaaaacctttgagatgccttgcgagtaccacctgtttgtagaggagtttcgcaaaaacccaggaatcacctggatcatgaagcctgtagcccggtctcaagggaaaggcatcttcctcttccgtaggctgaaggacatcgtggactggaggaaggacacaagaagctctgacgaccagaaagatgatattcccgtggagaactatgtggctcagcgttacattgaaaatccttacctgataggaggtgagatggctgtgtctgctcctgctcttccattgcatggtcatcaaacagtcagtcaacaagctttgaccagcagcctgccaagggcccagcctgacaccaggcatgaagggatgcatggaaagagatgggttctgcagtctcccacctcctagccattgcctgtacagttccctctgcccggcatgtccattccactcccttcttggttcagaaaaattctcctcctttaaaaaccaacttattcatgcgtttatccaacaaatattataaagcacctacttggtggcagcactgccctgaatactggctgcccctcaccctgctctcctggagcttacacctgtgatgagcaggctgcaataaaccagaatacaaacca

SEQ ID NO: 365097 - DNA, 3315 bp, Homo sapiens
  misc_feature (2904)..(2904): n is a, c, g, or t
  misc_feature (3060)..(3060): n is a, c, g, or t
  misc_feature (3148)..(3148): n is a, c, g, or t
  misc_feature (3163)..(3163): n is a, c, g, or t
  misc_feature (3195)..(3195): n is a, c, g, or t
  misc_feature (3210)..(3210): n is a, c, g, or t
  misc_feature (3216)..(3216): n is a, c, g, or t
  misc_feature (3223)..(3223): n is a, c, g, or t
  misc_feature (3259)..(3259): n is a, c, g, or t
  misc_feature (3274)..(3274): n is a, c, g, or t
  misc_feature (3284)..(3284): n is a, c, g, or t
tgggggcgggggccttaccccaccctggcaccggcaggcgcgggcggatggggggatgtcgcctagagccccccggccggcccacaaactcccgtcccccttccggctctgcctggacgtccctgcgggccccgggggaaagcacccaacttctcccgcctcggcttctagcagaaacgtgacggggctggactttgatcgccgagggctctctgctcttcagagtctgcttggaacgggataagtgggagggatggtgccatccagggaagctctgctgggaccaggcacaactgccattaggtgccccaagaaattacagatgacatcattgtatccagagaaaactcaaaggatttacaaactaccagaactaatcattcagcaagggcatcaaatacaagaaccaaaattacaagggccatggattgtcaaagggaaaagagcgagagcagagagcatcgatccggttcaagaccaccctcatgaacacactcatggacgtccttcgccacaggccaggatgggtggaagtgaaggacgaaggggagtgggatttctactggtgtgacgtcagctggctccgggagaacttcgaccacacctacatggatgaacatgtgcggatcagtcacttccggaaccactatgagctgacccggaagaactacatggtgaagaacctgaagcggttccggaagcagctggagcgtgaggcaggaaagctggaggcagccaagtgtgacttcttccccaaaacctttgagatgccttgcgagtaccacctgtttgtagaggagtttcgcaaaaacccaggaatcacctggatcatgaagcctgtagcccggtctcaagggaaaggcatcttcctcttccgtaggctgaaggacatcgtggactggaggaaggacacaagaagctctgacgaccagaaagatgatattcccgtggagaactatgtggctcagcgttacattgaaaatccttacctgataggaggccgcaagtttgacctgcgtgtctatgtgctggtgatgtcggtggctcctggaggtcaatgcgtccccatcactgacagccagcagccaggaagactatgagctcaagacctgcctcctggaagacaccctgcatgttgtggacatggaagcgagagaagtttgagggctgattctccttgctggtaactgggacacattcccattcctaaaccactcactgtgactctgcttgaccaggctcacgggaagggagaagcgagtcgggggctttgacctcatgtggaatgatggccctgttagcagagaggagggggctcctgacctgtcgggaatgggaaactttgtgaccaacacacatctcggtatgtagggccaggtggggagtgggcacaagggatggggtcatgggaggtaccaggtagtctaggaggcagcttgggatagtggttagattgtttgaattcaatctgcaacttaccagctgtgtgaccttgggcaagggacttaacctctgttcctcgtttttaaacttggtttctaaaaagtgaaaactttccctgattataaaaaagggattcacactcattgtagaatatttgaaaactagagaaagaaataaaaacatccagacataagcatctttaacaatctggtgtatttccttccagttcttaaaaaatgcatatattcatactttttcttttataaaattggcattgggctagagttttgaatccctcttttccccttggcatttttcattcaagcatattaagagcctccctcttgaatgcactttttggtccagtccggatgaaatcttttacatacattatctcattttatctttaaggagtttttattgtcattttacagatgaggaaatgatatccaggtgctatgtaacttgctgaatgaaggttttggccataagtggtgagccaggactcaaactcccatctgcctggctccaaaacttgagtgcttgtccgctagactctcctgcctcttggcagagtttaaaaaaattaccatatggctgcaaaatatttcagtttgtacatatgccaaaatttactaaaccaatttcttataattggacatttggcacaattgcattttattttttttttacttttataaattataccatgatgaacatcctttcacattaagctcggctgaaattctggccatttcctgaggacagattcctagaagcagaattattgggccaaagggatgggattattacaaccaaatttctttccagaaagattatacgaatttgtcagatttgaatttttagaaaaaagaaatctgtgccaactggtgaggtaaaacatactgactcgttgttttatgtgcattccattgattactggtgaggtttccgttttttaaatttgcatttcttcttttgtaagctgtccatactctttatccatttttctatgggttgtttagttttctaaatgtataaggcttcagatgactatataacactgtccaagcttaatttaatatgcatacaatcacctggaaatcttgttaaactatagattgtgactccataggtctagggtggggcctaagattgtatttctaacaagctcctgggtgatgctctattgattaaccattgctgtgtaacaagccctcccaaaacctagcagcttaaagcaactattttatttgctcatccttcctcaggtctctcctggggtcacttatagggctgcaggcacctggcagatttactggagacttgatggtgtacgacagcctcattcataggtgtgggggttgatactggctgtcagttgggcctctctttccatgtggccactcgtcttccaacagtctggccctggcttcttcacgtggtagactcggggttctnagagggtgagaaaacacactgcaaagccttttgcggcccggactcagaagtcccataaagtcattctgctacaatcaaagcatttgctggtgtagcccagtcactgggtaagaaaatagaccccacctcgccgggcgcggtggctcacgcctgtantcccaacactttgggaggccgaggcgggcggatcatgaggtcaggagagcgaaaccatcctggctaacacggtgaaacactgtctctnctaaaaaatacaaanaaattagccaggcgtgctggcgggcgcctgtngtcagctactcgggnggctgnggcaggngaatggcgtgaacccgggaggcggagcttgcagtgngccgagattgcgccnctgcactccngcctgggcgacagagcgagactgtctcacac

SEQ ID NO: 365098 - DNA, 510 bp, Homo sapiens
cggttcaagaccaccctcatgaacacactcatggacgtccttcgccacaggccaggatgggtggaagtgaaggagtaagaccctccccccagccttgtccctccttccctttgtctcacaggtccttgtcttcctttgtttttctcccagttcccctgggtggccactgggacttgtcccaaagtggctgtgacatttatttagcacccacaatgtgccaggcacattatcactatcatctctgtcttatttaagccttccaactaaaccgtaagataagattatgttcagagttaggaaaccaattgcttaaggtcacacagcattgtaagcatcagagcaggattcaaacccaggcacgtttgtgtcctgtggttttcagtagaaactaggaatgtagctaccacagacctgtggcctggatcctccagtgacgggtccagatcaaggactgctcttccctggccacttgctagttctgtgactttggcctgtaagcctacctttctt

SEQ ID NO: 365099 - DNA, 704 bp, Homo sapiens
gagacagccaatcactgggactgggggaggtttaaccttgacaaactgacttggcagttaggcccaaagagaacaaatacagcaagttctgctacccccaggagatcatatctaataaatgagcacaggccctacttggagtcactgggcaccaggcctggttccggggatactgttggctgcagccaagtcctcctggctttgacacttggatacctcccaagtcagtgctgaaaaggtccttcaggagcaagagtttggaggctaaggaactcgtctttaagctgtgcttacacagcaagcagttattagattgtgtgtttattgggggcctggggaagtactgagccctaaacacatcctcttctccttgcatgtcaggggagcccatggggctccctgaccatcatctgaaaaccagtgggacagggcatccccatttctcagatggacaagacagaccagggaggcagagcttagtgagggtctctgcaaaggtgcatttatctaagtcagatgggtgacttaagtgcttctctaggccttgtgtttgagattgggagctgagccagaaaccggaaaaccctgggctcatgggcaggacagcttcgggagttgagtgtgagtaaaaatctgccttttcacatcttacattgctaagcttcctcttggtttaagaggggttgcaacaagactcggggctg

SEQ ID NO: 365100 - DNA, 3462 bp, Homo sapiens
  misc_feature (3051)..(3051): n is a, c, g, or t
  misc_feature (3207)..(3207): n is a, c, g, or t
  misc_feature (3295)..(3295): n is a, c, g, or t
  misc_feature (3310)..(3310): n is a, c, g, or t
  misc_feature (3342)..(3342): n is a, c, g, or t
  misc_feature (3357)..(3357): n is a, c, g, or t
  misc_feature (3363)..(3363): n is a, c, g, or t
  misc_feature (3370)..(3370): n is a, c, g, or t
  misc_feature (3406)..(3406): n is a, c, g, or t
  misc_feature (3421)..(3421): n is a, c, g, or t
  misc_feature (3431)..(3431): n is a, c, g, or t
tgggggcgggggccttaccccaccctggcaccggcaggcgcgggcggatggggggatgtcgcctagagccccccggccggcccacaaactcccgtcccccttccggctctgcctggacgtccctgcgggccccgggggaaagcacccaacttctcccgcctcggcttctagcagaaacgtgacggggctggactttgatcgccgagggctctctgctcttcagagtctgcttggaacgggataagtgggagggatggtgccatccagggaagctctgctgggaccaggcacaactgccattaggtgccccaagaaattacagatgacatcattgtatccagagaaaactcaaaggatttacaaactaccagaactaatcattcagcaagggcatcaaatacaagaaccaaaattacaagggccatggattgtcaaagggaaaagagcgagagcagagagcatcgatccggttcaagaccaccctcatgaacacactcatggacgtccttcgccacaggccaggatgggtggaagtgaaggacgaaggggagtgggatttctactggtgtgacgtcagctggctccgggagaacttcgaccacacctacatggatgaacatgtgcggatcagtcacttccggaaccactatgagctgacccggaagaactacatggtgaagaacctgaagcggttccggaagcagctggagcgtgaggcaggaaagctggaggcagccaagtgtgacttcttccccaaaacctttgagatgccttgcgagtaccacctgtttgtagaggagtttcgcaaaaacccaggaatcacctggatcatgaagcctgtagcccggtctcaagggaaaggcatcttcctcttccgtaggctgaaggacatcgtggactggaggaaggacacaagaagctctgacgaccagaaagatgatattcccgtggagaactatgtggctcagcgttacattgaaaatccttacctgataggaggccgcaagtttgacctgcgtgtctatgtgctggtgatgtcgtacatcccgctgcgggcctggctctaccgggatggctttgcccgattctccaacacccgcttcacactgaacagcattgatgaccagtatgttcacctcaccaacgtggctgtgcaaaaaacatctcccgactaccacccaaagaaggtggctcctggaggtcaatgcgtccccatcactgacagccagcagccaggaagactatgagctcaagacctgcctcctggaagacaccctgcatgttgtggacatggaagcgagagaagtttgagggctgattctccttgctggtaactgggacacattcccattcctaaaccactcactgtgactctgcttgaccaggctcacgggaagggagaagcgagtcgggggctttgacctcatgtggaatgatggccctgttagcagagaggagggggctcctgacctgtcgggaatgggaaactttgtgaccaacacacatctcggtatgtagggccaggtggggagtgggcacaagggatggggtcatgggaggtaccaggtagtctaggaggcagcttgggatagtggttagattgtttgaattcaatctgcaacttaccagctgtgtgaccttgggcaagggacttaacctctgttcctcgtttttaaacttggtttctaaaaagtgaaaactttccctgattataaaaaagggattcacactcattgtagaatatttgaaaactagagaaagaaataaaaacatccagacataagcatctttaacaatctggtgtatttccttccagttcttaaaaaatgcatatattcatactttttcttttataaaattggcattgggctagagttttgaatccctcttttccccttggcatttttcattcaagcatattaagagcctccctcttgaatgcactttttggtccagtccggatgaaatcttttacatacattatctcattttatctttaaggagtttttattgtcattttacagatgaggaaatgatatccaggtgctatgtaacttgctgaatgaaggttttggccataagtggtgagccaggactcaaactcccatctgcctggctccaaaacttgagtgcttgtccgctagactctcctgcctcttggcagagtttaaaaaaattaccatatggctgcaaaatatttcagtttgtacatatgccaaaatttactaaaccaatttcttataattggacatttggcacaattgcattttattttttttttacttttataaattataccatgatgaacatcctttcacattaagctcggctgaaattctggccatttcctgaggacagattcctagaagcagaattattgggccaaagggatgggattattacaaccaaatttctttccagaaagattatacgaatttgtcagatttgaatttttagaaaaaagaaatctgtgccaactggtgaggtaaaacatactgactcgttgttttatgtgcattccattgattactggtgaggtttccgttttttaaatttgcatttcttcttttgtaagctgtccatactctttatccatttttctatgggttgtttagttttctaaatgtataaggcttcagatgactatataacactgtccaagcttaatttaatatgcatacaatcacctggaaatcttgttaaactatagattgtgactccataggtctagggtggggcctaagattgtatttctaacaagctcctgggtgatgctctattgattaaccattgctgtgtaacaagccctcccaaaacctagcagcttaaagcaactattttatttgctcatccttcctcaggtctctcctggggtcacttatagggctgcaggcacctggcagatttactggagacttgatggtgtacgacagcctcattcataggtgtgggggttgatactggctgtcagttgggcctctctttccatgtggccactcgtcttccaacagtctggccctggcttcttcacgtggtagactcggggttctnagagggtgagaaaacacactgcaaagccttttgcggcccggactcagaagtcccataaagtcattctgctacaatcaaagcatttgctggtgtagcccagtcactgggtaagaaaatagaccccacctcgccgggcgcggtggctcacgcctgtantcccaacactttgggaggccgaggcgggcggatcatgaggtcaggagagcgaaaccatcctggctaacacggtgaaacactgtctctnctaaaaaatacaaanaaattagccaggcgtgctggcgggcgcctgtngtcagctactcgggnggctgnggcaggngaatggcgtgaacccgggaggcggagcttgcagtgngccgagattgcgccnctgcactccngcctgggcgacagagcgagactgtctcacac

SEQ ID NO: 365101 - DNA, 2285 bp, Homo sapiens
tgggggcgggggccttaccccaccctggcaccggcaggcgcgggcggatggggggatgtcgcctagagccccccggccggcccacaaactcccgtcccccttccggctctgcctggacgtccctgcgggccccgggggaaagcacccaacttctcccgcctcggcttctagcagaaacgtgacggggctggactttgatcgccgagggctctctgctcttcagagtctgcttggaacgggataagtgggagggatggtgccatccagggaagctctgctgggaccaggcacaactgccattaggtgccccaagaaattacagatgacatcattgtatccagagaaaactcaaaggatttacaaactaccagaactaatcattcagcaagggcatcaaatacaagaaccaaaattacaagggccatggattgtcaaagggaaaagagcgagagcagagagcatcgatccggttcaagaccaccctcatgaacacactcatggacgtccttcgccacaggccaggatgggtggaagtgaaggacgaaggggagtgggatttctactggtgtgacgtcagctggctccgggagaacttcgaccacacctacatggatgaacatgtgcggatcagtcacttccggaaccactatgagctgacccggaagaactacatggtgaagaacctgaagcggttccggaagcagctggagcgtgaggcaggaaagctggaggcagccaagtgtgacttcttccccaaaacctttgagatgccttgcgagtaccacctgtttgtagaggagtttcgcaaaaacccaggaatcacctggatcatgaagcctgtagcccggtctcaagggaaaggcatcttcctcttccgtaggctgaaggacatcgtggactggaggaaggacacaagaagctctgacgaccagaaagatgatattcccgtggagaactatgtggctcagcgttacattgaaaatccttacctgataggaggccgcaagtttgacctgcgtgtctatgtgctggtgatgtcggtggctcctggaggtcaatgcgtccccatcactgacagccagcagccaggaagactatgagctcaagacctgcctcctggaagacaccctgcatgttgtggacatggaagcgaggctgcgtcaacgatcggaagaaacaactgaggcagctcttctgctcccttcaagttcagaagaaagcttccagttgatccccagctgccaggaggaaatcagccttagcaggccttgtgtttgagattgggagctgagccagaaaccggaaaaccctgggctcatgggcaggacagcttcgggagttgagtgtcaagcccgaagggaagacttttggaaggaaaatactggcaaatccaagaagtgaaccagccgactttaggaaagccagaagccaggctactctagaccttctgccttcagagcatgaggacttctcccactcatccctgtacctgaggcacaccaacccagacaggtccaggcatggactccaggttccctatttccagaaggaatgcgattagctttttttggcccagcacccaccctgccagggaggaaggggcaattttccagtgatgaaattgtgaatcaggcagtcacactggacaacatctagcaaggtgaattctgcaactccctactttatttacattttaaaataagcaatatattcatacggtttaaaatccaaagtttacaaaagggtatagggtgacatctccttccctcccacctgtgcgccccaaccctgcaggtgctgttctgagggaatcacactgtgcttgcacaaaaattattagcttataagacaccagccttccccttgctttcctcacttgatgtatcttggagcttgttccttattcttgattatagttgtatggtattgcactatctggagctaacacctgtgacccacactcatgttttaaaagtttctgcattagtcaaaaatatttaaaaggagattcaacttcacaacccatatgtctagcttctcttgaaaacacgtaagaactggccatgacagcctgtgtttctatgtaactatgagccagagccaaggagcggggggaccaggagaggtgtgcccctgccatgctgccatttgttatcacccgcctgtcaaatcacaggtttatttcaaggcaagaaccatgttcataggttgtattctaaatggagcggcgtgcccttactgaaggactagatgaggcaaataaagactagttgctgctattcatt

SEQ ID NO: 365102 - DNA, 1568 bp, Homo sapiens
tgggggcgggggccttaccccaccctggcaccggcaggcgcgggcggatggggggatgtcgcctagagccccccggccggcccacaaactcccgtcccccttccggctctgcctggacgtccctgcgggccccgggggaaagcacccaacttctcccgcctcggcttctagcagaaacgtgacggggctggactttgatcgccgagggctctctgctcttcagagtctgcttggaacgggataagtgggagggatggtgccatccagggaagctctgctgggaccaggcacaactgccattaggtgccccaagaaattacagatgacatcattgtatccagagaaaactcaaaggatttacaaactaccagaactaatcattcagcaagggcatcaaatacaagaaccaaaattacaagggccatggattgtcaaagggaaaagagcgagagcagagagcatcgatccggttcaagaccaccctcatgaacacactcatggacgtccttcgccacaggccaggatgggtggaagtgaaggacgaaggggagtgggatttctactggtgtgacgtcagctggctccgggagaacttcgaccacacctacatggatgaacatgtgcggatcagtcacttccggaaccactatgagctgacccggaagaactacatggtgaagaacctgaagcggttccggaagcagctggagcgtgaggcaggaaagctggaggcagccaagtgtgacttcttccccaaaacctttgagatgccttgcgagtaccacctgtttgtagaggagtttcgcaaaaacccaggaatcacctggatcatgaagcctgtagcccggtctcaagggaaaggcatcttcctcttccgtaggctgaaggacatcgtggactggaggaaggacacaagaagctctgacgaccagaaagatgatattcccgtggagaactatgtggctcagcgttacattgaaaatccttacctgataggaggccgcaagtttgacctgcgtgtctatgtgctggtgatgtcggtggctcctggaggtcaatgcgtccccatcactgacagccagcagccaggaagactatgagctcaagacctgcctcctggaagacaccctgcatgttgtggacatggaagcgaggctgcgtcaacgatcggaagaaacaactgaggcagctcttctgctcccttcaagttcagaagaaagcttccagttgatccccagctgccaggaggaaatcagccttagcaggtgccacccaggcctcccccccactcccagatcccagcacagcacctcacagcattcgcctccccacctccagcctggcaccagctttgctggcttagcagctgcagcttactacctgaattgggccccttggatacctccagcccatccccaggcatctttgcaccaggagacagccaatcactgggactgggggaggtttaaccttgacaaactgacttggcagttaggcccaaagagaacaaatacagcaagttctgctacccccaggagatcatatctaataaatgagcacaggcccta

SEQ ID NO: 365103 - DNA, 1669 bp, Homo sapiens
ccacccacctccacctcccaaagtgctgggattacaggtgtgagccaccgcacccttaatctccttttttaaaagtccctatagagagatctggggagaaagaagttggggaagcgtggatggggatctgcctggggtttcagaaaggttcctgccccctccttgggctgctggtctgagttctgagtgtgggacaccctgtccacacctccctggctgaacccagactcctccgtgcagcccccggggccctcctcgcctcctcactcccagcataggattcttggacacaccaggctgggacccacagggggcctttgctctcgctggctcttactctgggacactgacccttacctggtctgaccccttgtccacttctggccaccctggccagcagttccccactctgcatgcgcttcccacctgctgtcctgctggtggtgggagccaccctgggaagcttccaggcagtgccccgcgcccacccacagcaggtgcacagggcacaaatgtccactgaatgggtagggatgtaattgacaggtgcctgtgcacaaccactgtcttcccgtggcctcactgcccccttgccctagggccccttccttggctctgtgccagcctcgggggacctcaggctcaccaactctgaggctgagagttccaaagccataggatagatcctggagcttccctgagcctgtttccttgcctgggagttagccatgccttgtggggctgccaagagggtaaagtagagagatgggtctagcttgatacagtataggcagctgctggatgtcagctgtggttatgatcacctccatcttgttatgatgaagaccctgaggtcagagtggaccccaccccaaagccccatctggcagctcacagctgctctctcctacagaaacaggcttgcatgctgatccgaaacctggtggcccacggccaggccttctcgaagcccatcctggacctgggggctgaggcactcatcatgcaggcccgatctgcccaccgtgactgtgaggacgtggccaaggccgccctgcgggacctgggttgtcatgtcgagctccgagagctgtggacaggccagaggggcaacctggcgccatgaccccaggcccagtctgggccgtgactctgggtgagtcgtgtgactcaggaatgggggtagatccatgtcctccactgtcccccattagttctgtccccttcacaatgagaagtgttttctggcaggccctaggtaaagggtcgggggaggggggagccttgtagggaggcctctacacagaagaaagcagcccccatgtcccagccacttctgggtcccagccagcagcacggatgttactgtcctgctccttcccccagccccacgccctaccagagggggcaaagggcacgtcccatcactcactgccctgtctgaaatgtggcagccactgtgggccaggctcagggcagggcaggcgattccagtggggttgggccccctggcgcctgctgcttactgcagtttcatgcaggcctctgctccttgtctttcttacctgtaaaatgggtctcagatgctccgccctgcttggccccagcttgtctgtctctgggtcctgggccagccaggatacctgataataaaagatcattgggtgaa

SEQ ID NO: 365104 - DNA, 2679 bp, Homo sapiens
ggatggccaaagtcttgttcccaagaaccacggagcgcaaatttccagtcctgagaacggaaatgccccaatttccggtggccaatgacctggtcccgagaatcagagtgagaaaattccagatcccggccacattctttgcgaaagtagctgtcatcactgatggaagggttgcttgatctgaaggaaggccctggaaatacgtcacttctcaggccttctcttccggcatctctagagtgagctacagatccactgagggagtatctgccatcgctgtggacgtcatcaaattgcttgatctgggcgccctaggatctagctaatgagattcgtcactcccatgcatcatggattcgttgcttctgtaacagctcaattcctggtatctctgcgcctgtatttgccttggttcgcggtcgtccttggttatcgtgagcgtccgcgagtctctgggaggccaagcctaggggcgccacagcgcctgcgcgcgtacggcggccggaaggggctagaggcggctccctgggtgacaaccgcgcgccccacctttccccacgtggccgcgaagaccgggtgagacgctgcggctgccgaggcctgtcccgcgcggagtggggagtgggggtgccgcagggtcgggctggcgcgaccctcggctcaggagcatctatcggctgcacgccaacatcaacacaggcgaagatggtctccaagcgcattgcccaggagacctttgatgcagctgtgcgcgagaacatcgaggagtttgcgatggggccagaggaggcagtgaaagaggccgtggagcagtttgaatcgcaaggggttgatctgagcaacattgtaaagacggcacctaaagtctctgcagacggatcccaggagcccacacatgacatcctgcagatgctcagtgacctccaggagtctgtggccagctctcgcccccaggaggtgtcagcatacctcacccgcttctgcgaccagtgcaaacaggacaaggcctgccgcttcctcgcggcccagaagggggcctaccccatcatcttcactgcctggaagctggccactgcaggtgaccagggccttctgctccagtccctcaatgccctgtcggtgctgactgatggacagccagacctcctggatgcccagggcctgcagctcctagtggccacgctgacccagaatgctgatgaggctgacctgacctgctctgggatccgctgtgtgcgtcacgcttgcctgaaacatgaacagaatcggcaagacctggtgaaagctggcgtgctgcctctgctgactggtgccatcacccatcatggccaccacactgacgtggtcagggaagcctgctgggccctgcgtgtcatgaccttcgatgacgacatccgtgtgccctttggccatgcccacaaccatgccaagatgattgtgcaggagaacaaaggcttgaaggtgctcatcgaagccaccaaagcgttcctggataaccctggcatcctgagcgagctctgtggaaccctgtcccgcctggccattcgcaacgagttctgccaggaggtcgtcgacctcgggggcctgagcattctggtgtccctgctagccgactgcaatgaccaccagatgagggaccagagcggcgttcaggagctcgtgaagcaagtgctgagcaccctgcgagccatcgcaggcaacgacgacgtgaaagatgctattgtccgtgctggtgggacggagtccatcgtggctgctatgacccagcatctgaccagcccccaggtgtgtgagcagagctgcgcggccctgtgcttcctggccctgcgtaagcccgacaacagccgcatcatcgtggagggtggcggggctgtggcagcactgcaggccatgaaggcacacccgcagaaggccggcgtgcagaaacaggcttgcatgctgatccgaaacctggtggcccacggccaggccttctcgaagcccatcctggacctgggggctgaggcactcatcatgcaggcccgatctgcccaccgtgactgtgaggacgtggccaaggccgccctgcgggacctgggttgtcatgtcgagctccgagagctgtggacaggccagaggggcaacctggcgccatgaccccaggcccagtctgggccgtgactctgggtgagtcgtgtgactcaggaatgggggtagatccatgtcctccactgtcccccattagttctgtccccttcacaatgagaagtgttttctggcaggccctaggtaaagggtcgggggaggggggagccttgtagggaggcctctacacagaagaaagcagcccccatgtcccagccacttctgggtcccagccagcagcacggatgttactgtcctgctccttcccccagccccacgccctaccagagggggcaaagggcacgtcccatcactcactgccctgtctgaaatgtggcagccactgtgggccaggctcagggcagggcaggcgattccagtggggttgggccccctggcgcctgctgcttactgcagtttcatgcaggcctctgctccttgtctttcttacctgtaaaatgggtctcagatgctccgccctgcttggccccagcttgtctgtctctgggtcctgggccagccaggatacctgataataaaagatcattgggtgaa

SEQ ID NO: 365105 - DNA, 2756 bp, Homo sapiens
  misc_feature (2685)..(2685): n is a, c, g, or t
  misc_feature (2691)..(2691): n is a, c, g, or t
ggatggccaaagtcttgttcccaagaaccacggagcgcaaatttccagtcctgagaacggaaatgccccaatttccggtggccaatgacctggtcccgagaatcagagtgagaaaattccagatcccggccacattctttgcgaaagtagctgtcatcactgatggaagggttgcttgatctgaaggaaggccctggaaatacgtcacttctcaggccttctcttccggcatctctagagtgagctacagatccactgagggagtatctgccatcgctgtggacgtcatcaaattgcttgatctgggcgccctaggatctagctaatgagattcgtcactcccatgcatcatggattcgttgcttctgtaacagctcaattcctggtatctctgcgcctgtatttgccttggttcgcggtcgtccttggttatcgtgagcgtccgcgagtctctgggaggccaagcctaggggcgccacagcgcctgcgcgcgtacggcggccggaaggggctagaggcggctccctgggtgacaaccgcgcgccccacctttccccacgtggccgcgaagaccgggtgagacgctgcggctgccgaggcctgtcccgcgcggagtggggagtgggggtgccgcagggtcgggctggcgcgaccctcggctcaggagcatctatcggctgcacgccaacatcaacacaggcgaagatggtctccaagcgcattgcccaggagacctttgatgcagctgtgcgcgagaacatcgaggagtttgcgatggggccagaggaggcagtgaaagaggccgtggagcagtttgaatcgcaaggggttgatctgagcaacattgtaaagacggcacctaaagtctctgcagacggatcccaggagcccacacatgacatcctgcagatgctcagtgacctccaggagtctgtggccagctctcgcccccaggaggtgtcagcatacctcacccgcttctgcgaccagtgcaaacaggacaaggcctgccgcttcctcgcggcccagaagggggcctaccccatcatcttcactgcctggaagctggccactgcaggtgaccagggccttctgctccagtccctcaatgccctgtcggtgctgactgatggacagccagacctcctggatgcccagggcctgcagctcctagtggccacgctgacccagaatgctgatgaggctgacctgacctgctctgggatccgctgtgtgcgtcacgcttgcctgaaacatgaacagaatcggcaagacctggtgaaagctggcgtgctgcctctgctgactggtgccatcacccatcatggccaccacactgacgtggtcagggaagcctgctgggccctgcgtgtcatgaccttcgatgacgacatccgtgtgccctttggccatgcccacaaccatgccaagatgattgtgcaggagaacaaaggcttgaaggtgctcatcgaagccaccaaagcgttcctggataaccctggcatcctgagcgagctctgtggaaccctgtcccgcctggccattcgcaacgagttctgccaggaggtcgtcgacctcgggggcctgagcattctggtgtccctgctagccgactgcaatgaccaccagatgagggaccagagcggcgttcaggagctcgtgaagcaagtgctgagcaccctgcgagccatcgcaggcaacgacgacgtgaaagatgctattgtccgtgctggtgggacggagtccatcgtggctgctatgacccagcatctgaccagcccccaggtgtgtgagcagagctgcgcggccctgtgcttcctggccctgcgtaagcccgacaacagccgcatcatcgtggagggtggcggggctgtggcagcactgcaggccatgaaggcacacccgcagaaggccggcgtgcagaaacaggcttgcatgctgatccgaaacctggtggcccacggccaggccttctcgaagcccatcctggacctgggggctgaggcactcatcatgcaggcccgatctgcccaccgtgactgtgaggacgtggccaaggccgccctgcgggacctgggttgtcatgtcgagctccgagagctgtggacaggccagaggggcaacctggcgccatgaccccaggcccagtctgggccgtgactctgggtgagtcgtgtgactcaggaatgggggtagatccatgtcctccactgtcccccattagttctgtccccttcacaatgagaagtgttttctggcaggccctaggtaaagggtcgggggaggggggagccttgtagggaggcctctacacagaagaaagcagcccccatgtcccagccacttctgggtcccagccagcagcacggatgttactgtcctgctccttcccccagccccacgccctaccagagggggcaaagggcacgtcccatcactcactgccctgtctgaaatgtggcagccactgtgggccaggctcagggcagggcaggcgattccagtggggttgggccccctggcgcctgctgcttactgcagtttcatgcaggcctctgctccttgtctttcttacctgtaaaatgggtctcagatgctccgccctgcttggccccagcttgtctgtctctgggtcctgggccagccaggatacctgataataaaagatcattgggtgaaaaaaanaccacnaacgaaagcacaaacacggggggacgcgaaaaaaagatcaccgagagggccacaaaaaaggccaa

SEQ ID NO: 365106 - DNA, 2528 bp, Homo sapiens
tggtgcgcaggcgcgggccgccgcggcccggctctctggcacgagggcgcgctgtccgcttcttctgggcggacgctctggaggcaaaacatttccctgctgggggcggcgaccaccgtgagcgtcccggaaggggcggcaaagacgcctccgtcgcgcacgaggtggcctcgttggctttaccttggttcgcggtcgtccttggttatcgtgagcgtccgcgagtctctgggaggccaagcctaggggcgccacagcgcctgcgcgcgtacggcggccggaaggggctagaggcggctccctgggtgacaaccgcgcgccccacctttccccacgtggccgcgaagaccggagatggagtttcgccacgtgtccaggctggtctcaaactcctggcctcatgtgatccttccgcctcggcctcccaaagtgcaggccaccatgcctggcctgaagtggaaacttgataattccagaacggaaacttgatattactgcaataagcaagctcaggagcatctatcggctgcacgccaacatcaacacaggcgaagatggtctccaagcgcattgcccaggagacctttgatgcagctgtgcgcgagaacatcgaggagtttgcgatggggccagaggaggcagtgaaagaggccgtggagcagtttgaatcgcaaggggttgatctgagcaacattgtaaagacggcacctaaagtctctgcagacggatcccaggagcccacacatgacatcctgcagatgctcagtgacctccaggagtctgtggccagctctcgcccccaggaggtgtcagcatacctcacccgcttctgcgaccagtgcaaacaggacaaggcctgccgcttcctcgcggcccagaagggggcctaccccatcatcttcactgcctggaagctggccactgcaggtgaccagggccttctgctccagtccctcaatgccctgtcggtgctgactgatggacagccagacctcctggatgcccagggcctgcagctcctagtggccacgctgacccagaatgctgatgaggctgacctgacctgctctgggatccgctgtgtgcgtcacgcttgcctgaaacatgaacagaatcggcaagacctggtgaaagctggcgtgctgcctctgctgactggtgccatcacccatcatggccaccacactgacgtggtcagggaagcctgctgggccctgcgtgtcatgaccttcgatgacgacatccgtgtgccctttggccatgcccacaaccatgccaagatgattgtgcaggagaacaaaggcttgaaggtgctcatcgaagccaccaaagcgttcctggataaccctggcatcctgagcgagctctgtggaaccctgtcccgcctggccattcgcaacgagttctgccaggaggtcgtcgacctcgggggcctgagcattctggtgtccctgctagccgactgcaatgaccaccagatgagggaccagagcggcgttcaggagctcgtgaagcaagtgctgagcaccctgcgagccatcgcaggcaacgacgacgtgaaagatgctattgtccgtgctggtgggacggagtccatcgtggctgctatgacccagcatctgaccagcccccaggtgtgtgagcagagctgcgcggccctgtgcttcctggccctgcgtaagcccgacaacagccgcatcatcgtggagggtggcggggctgtggcagcactgcaggccatgaaggcacacccgcagaaggccggcgtgcagaaacaggcttgcatgctgatccgaaacctggtggcccacggccaggccttctcgaagcccatcctggacctgggggctgaggcactcatcatgcaggcccgatctgcccaccgtgactgtgaggacgtggccaaggccgccctgcgggacctgggttgtcatgtcgagctccgagagctgtggacaggccagaggggcaacctggcgccatgaccccaggcccagtctgggccgtgactctgggtgagtcgtgtgactcaggaatgggggtagatccatgtcctccactgtcccccattagttctgtccccttcacaatgagaagtgttttctggcaggccctaggtaaagggtcgggggaggggggagccttgtagggaggcctctacacagaagaaagcagcccccatgtcccagccacttctgggtcccagccagcagcacggatgttactgtcctgctccttcccccagccccacgccctaccagagggggcaaagggcacgtcccatcactcactgccctgtctgaaatgtggcagccactgtgggccaggctcagggcagggcaggcgattccagtggggttgggccccctggcgcctgctgcttactgcagtttcatgcaggcctctgctccttgtctttcttacctgtaaaatgggtctcagatgctccgccctgcttggccccagcttgtctgtctctgggtcctgggccagccaggatacctgataataaaagatcattgggtgaa

SEQ ID NO: 365107 - DNA, 2728 bp, Homo sapiens
ggatggccaaagtcttgttcccaagaaccacggagcgcaaatttccagtcctgagaacggaaatgccccaatttccggtggccaatgacctggtcccgagaatcagagtgagaaaattccagatcccggccacattctttgcgaaagtagctgtcatcactgatggaagggttgcttgatctgaaggaaggccctggaaatacgtcacttctcaggccttctcttccggcatctctagagtgagctacagatccactgagggagtatctgccatcgctgtggacgtcatcaaattgcttgatctgggcgccctaggatctagctaatgagattcgtcactcccatgcatcatggattcgttgcttctgtaacagctcaattcctggtatctctgcgcctgtatttgccttggttcgcggtcgtccttggttatcgtgagcgtccgcgagtctctgggaggccaagcctaggggcgccacagcgcctgcgcgcgtacggcggccggaaggggctagaggcggctccctgggtgacaaccgcgcgccccacctttccccacgtggccgcgaagaccgggtgagacgctgcggctgccgaggcctgtcccgcgcggagtggggagtgggggtgccgcagggtcgggctggcgcgaccctcggctcaggagcatctatcggctgcacgccaacatcaacacaggcgaagatggtctccaagcgcattgcccaggagacctttgatgcagctgtgcgcgagaacatcgaggagtttgcgatggggccagaggaggcagtgaaagaggccgtggagcagtttgaatcgcaaggggttgatctgagcaacattgtaaagacggcacctaaagtctctgcagacggatcccaggagcccacacatgacatcctgcagatgctcagtgacctccaggagtctgtggccagctctcgcccccaggaggtgtcagcatacctcacccgcttctgcgaccagtgcaaacaggacaaggcctgccgcttcctcgcggcccagaagggggcctaccccatcatcttcactgcctggaagctggccactgcaggtgaccagggccttctgctccagtccctcaatgccctgtcggtgctgactgatggacagccagacctcctggatgcccagggcctgcagctcctagtggccacgctgacccagaatgctgatgaggctgacctgacctgctctgggatccgctgtgtgcgtcacgcttgcctgaaacatgaacagaatcggcaagacctggtgaaagctggcgtgctgcctctgctgactggtgccatcacccatcatggccaccacactgacgtggtcagggaagcctgctgggccctgcgtgtcatgaccttcgatgacgacatccgtgtgccctttggccatgcccacaaccatgccaagatgattgtgcaggagaacaaaggcttgaaggtgctcatcgaagccaccaaagcgttcctggataaccctggcatcctgagcgagctctgtggaaccctgtcccgcctggccattcgcaacgagttctgccaggaggtcgtcgacctcgggggcctgagcattctggtgtccctgctagccgactgcaatgaccaccagatgagggaccagagcggcgttcaggagctcgtgaagcaagtgctgagcaccctgcgagccatcgcaggcaacgacgacgtgaaagatgctattgtccgtgctggtgggacggagtccatcgtggctgctatgacccagcatctgaccagcccccaggtgtgtgagcagagctgcgcggccctgtgcttcctggccctgcgtaagcccgacaacagccgcatcatcgtggagggtggcggggctgtggcagcactgcaggccatgaaggcacacccgcagaaggccggcgtgcaggtgggcagggcaggggatgggggcaggcaggctggtgtgggatgtgcagaaacaggcttgcatgctgatccgaaacctggtggcccacggccaggccttctcgaagcccatcctggacctgggggctgaggcactcatcatgcaggcccgatctgcccaccgtgactgtgaggacgtggccaaggccgccctgcgggacctgggttgtcatgtcgagctccgagagctgtggacaggccagaggggcaacctggcgccatgaccccaggcccagtctgggccgtgactctgggtgagtcgtgtgactcaggaatgggggtagatccatgtcctccactgtcccccattagttctgtccccttcacaatgagaagtgttttctggcaggccctaggtaaagggtcgggggaggggggagccttgtagggaggcctctacacagaagaaagcagcccccatgtcccagccacttctgggtcccagccagcagcacggatgttactgtcctgctccttcccccagccccacgccctaccagagggggcaaagggcacgtcccatcactcactgccctgtctgaaatgtggcagccactgtgggccaggctcagggcagggcaggcgattccagtggggttgggccccctggcgcctgctgcttactgcagtttcatgcaggcctctgctccttgtctttcttacctgtaaaatgggtctcagatgctccgccctgcttggccccagcttgtctgtctctgggtcctgggccagccaggatacctgataataaaagatcattgggtgaa

SEQ ID NO: 365108 - DNA, 2450 bp, Homo sapiens
  misc_feature (2287)..(2287): n is a, c, g, or t
ggatggccaaagtcttgttcccaagaaccacggagcgcaaatttccagtcctgagaacggaaatgccccaatttccggtggccaatgacctggtcccgagaatcagagtgagaaaattccagatcccggccacattctttgcgaaagtagctgtcatcactgatggaagggttgcttgatctgaaggaaggccctggaaatacgtcacttctcaggccttctcttccggcatctctagagtgagctacagatccactgagggagtatctgccatcgctgtggacgtcatcaaattgcttgatctgggcgccctaggatctagctaatgagattcgtcactcccatgcatcatggattcgttgcttctgtaacagctcaattcctggtatctctgcgcctgtatttgccttggttcgcggtcgtccttggttatcgtgagcgtccgcgagtctctgggaggccaagcctaggggcgccacagcgcctgcgcgcgtacggcggccggaaggggctagaggcggctccctgggtgacaaccgcgcgccccacctttccccacgtggccgcgaagaccgggtgagacgctgcggctgccgaggcctgtcccgcgcggagtggggagtgggggtgccgcagggtcgggctggcgcgaccctcggctcaggagcatctatcggctgcacgccaacatcaacacaggcgaagatggtctccaagcgcattgcccaggagacctttgatgcagctgtgcgcgagaacatcgaggagtttgcgatggggccagaggaggcagtgaaagaggccgtggagcagtttgaatcgcaaggggttgatctgagcaacattgtaaagacggcacctaaagtctctgcagacggatcccaggagcccacacatgacatcctgcagatgctcagtgacctccaggagtctgtggccagctctcgcccccaggaggtgtcagcatacctcacccgcttctgcgaccagtgcaaacaggacaaggcctgccgcttcctcgcggcccagaagggggcctaccccatcatcttcactgcctggaagctggccactgcaggtgaccagggccttctgctccagtccctcaatgccctgtcggtgctgactgatggacagccagacctcctggatgcccagggcctgcagctcctagtggccacgctgacccagaatgctgatgaggctgacctgacctgctctgggatccgctgtgtgcgtcacgcttgcctgaaacatgaacagaatcggcaagacctggtgaaagctggcgtgctgcctctgctgactggtgccatcacccatcatggccaccacactgacgtggtcagggaagcctgctgggccctgcgtgtcatgaccttcgatgacgacatccgtgtgccctttggccatgcccacaaccatgccaagatgattgtgcaggagaacaaaggcttgaaggtgctcatcgaagccaccaaagcgttcctggataaccctggcatcctgagcgagctctgtggaaccctgtcccgcctggccattcgcaacgagttctgccaggaggtcgtcgacctcgggggcctgagcattctggtgtccctgctagccgactgcaatgaccaccagatgagggaccagagcggcgttcaggagctcgtgaagcaagtgctgagcaccctgcgagccatcgcaggcaacgacgacgtgaaagatgctattgtccgtgctggtgggacggagtccatcgtggctgctatgacccagcatctgaccagcccccaggtgtgtgagcagagctgcgcggccctgtgcttcctggccctgcgtaagcccgacaacagccgcatcatcgtggagggtggcggggctgtggcagcactgcaggccatgaaggcacacccgcagaaggccggcgtgcagaaacaggcttgcatgctgatccgaaacctggtggcccacggccaggccttctcgaagcccatcctggacctgggggctgaggcactcatcatgcaggcccgatctgcccaccgtgactgtgaggacgtggccaaggccgccctgcgggacctgggttgtcatgtcgagctccgagagctgtggacaggccagaggggcaacctggcgccatgaccccaggcccagtctgggccgtgactctgggtgagtcgtgtgactcaggaatgggggtagatccatgtcctccactgtcccccattagttctgtccccttcacaatgagaagtgttttctggcaggccctaggtaaagggtcgggggaggnatttttttttaaatattgctttacccatattataatccgttccccttgtggctggggttacttttttccaatactcgttaaattatataggccgggttgttgcccccctctgttttcattttgttcaaagggggggggtgtgaacgaatatacaggtttttgc

SEQ ID NO: 365109 - DNA, 893 bp, Homo sapiens
tggtgcgcaggcgcgggccgccgcggcccggctctctggcacgagggcgcgctgtccgcttcttctgggcggacgctctggaggcaaaacatttccctgctgggggcggcgaccaccgtgagcgtcccggaaggggcggcaaagacgcctccgtcgcgcacgaggtggcctcgttggctttaccttggttcgcggtcgtccttggttatcgtgagcgtccgcgagtctctgggaggccaagcctaggggcgccacagcgcctgcgcgcgtacggcggccggaaggggctagaggcggctccctgggtgacaaccgcgcgccccacctttccccacgtggccgcgaagaccggcacctgtgcactgagtgcctgctgcgtgtcgggccccgtcctaggcagtggggacaaggaggctacagggtacaaataaatgagtgaacgatgttgctctagatacagctcaggagcatctatcggctgcacgccaacatcaacacaggcgaagatggtctccaagcgcattgcccaggagacctttgatgcagctgtgcgcgagaacatcgaggagtttgcgatggggccagaggaggcagtgaaagaggccgtggagcagtttgaatcgcaaggggttgatctgagcaacattgtaaagacggcacctaaagtctctgcagacggatcccaggagcccacacatgacatcctgcagatgctcagtgacctccaggagtctgtggccagctctcgcccccaggaggtgtcagcatacctcacccgcttctgcgaccagtgcaaacaggacaaggcctgccgcttcctcgcggcccagaagggggcctaccccatcatcttcactgccaggatacctgataataaaagatcattgggtgaa

SEQ ID NO: 365110 - DNA, 318 bp, Homo sapiens
cactattatagttttctttttttaggtgagaccatgagttggtatggaatttatttggggcatgatggaaggaagcgggttggggggcacattcttaagtcttcccagcagccagcagggggcactgcaggcccaggtagcccctggtgttccctggggccttcctggtgcccgtggccactccaataggcagaagggctggactcttccagtggagcaggatctccaccaaaacagagggccctgcggctggttcttcccgcccccaccaccgtctccctttctccctgcagcgttcctggataaccctggcatcct

SEQ ID NO: 365111 - DNA, 3714 bp, Homo sapiens
tggtgcgcaggcgcgggccgccgcggcccggctctctggcacgagggcgcgctgtccgcttcttctgggcggacgctctggaggcaaaacatttccctgctgggggcggcgaccaccgtgagcgtcccggaaggggcggcaaagacgcctccgtcgcgcacgaggtggcctcgttggctttaccttggttcgcggtcgtccttggttatcgtgagcgtccgcgagtctctgggaggccaagcctaggggcgccacagcgcctgcgcgcgtacggcggccggaaggggctagaggcggctccctgggtgacaaccgcgcgccccacctttccccacgtggccgcgaagaccggcacctgtgcactgagtgcctgctgcgtgtcgggccccgtcctaggcagtggggacaaggaggctacagggtacaaataaatgagtgaacgatgttgctctagatacagctcaggagcatctatcggctgcacgccaacatcaacacaggcgaagatggtctccaagcgcattgcccaggagacctttgatgcagctgtgcgcgagaacatcgaggagtttgcgatggggccagaggaggcagtgaaagaggccgtggagcagtttgaatcgcaaggggttgatctgagcaacattgtaaagacggcacctaaagtctctgcagacggatcccaggagcccacacatgacatcctgcagatgctcagtgacctccaggagtctgtggccagctctcgcccccaggaggtgtcagcatacctcacccgcttctgcgaccagtgcaaacaggacaaggcctgccgcttcctcgcggcccagaagggggcctaccccatcatcttcactgcctggaagctggccactgcaggtgaccagggccttctgctccagtccctcaatgccctgtcggtgctgactgatggacagccagacctcctggatgcccagggcctgcagctcctagtggccacgctgacccagaatgctgatgaggctgacctgacctgctctgggatccgctgtgtgcgtcacgcttgcctgaaacatgaacagaatcggcaagacctggtgaaagctggcgtgctgcctctgctgactggtgccatcacccatcatggccaccacactgacgtggtcagggaagcctgctgggccctgcgtgtcatgaccttcgatgacgacatccgtgtgccctttggccatgcccacaaccatgccaagatgattgtgcaggagaacaaaggcttgaaggtgctcatcgaagccaccaaagcgttcctggataaccctggcatcctgagcgagctctgtggaaccctgtcccgcctggccattcgcaacgagttctgccaggaggtcgtcgacctcgggggcctgagcattctggtgtccctgctagccgactgcaatgaccaccagatgagggaccagagcggcgttcaggagctcgtgaagcaagtgctgagcaccctgcgagccatcgcaggcaacgacgacgtgaaagatgctattgtccgtgctggtgggacggagtccatcgtggctgctatgacccagcatctgaccagcccccaggtgtgtgagcagagctgcgcggccctgtgcttcctggccctgcgtaagcccgacaacagccgcatcatcgtggagggtggcggggctgtggcagcactgcaggccatgaaggcacacccgcagaaggccggcgtgcagaaacaggcttgcatgctgatccgaaacctggtggcccacggccaggccttctcgaagcccatcctggacctgggggctgaggcactcatcatgcaggcccgatctgcccaccgtgactgtgaggacgtggccaaggccgccctgcgggacctgggttgtcatgtcgagctccgagagctgtggacaggccagaggggcaacctggcgccatgaccccaggcccagtctgggccgtgactctgggtgagtcgtgtgactcaggaatgggggtagatccatgtcctccactgtcccccattagttctgtccccttcacaatgagaagtgttttctggcaggccctaggtaaagggtcgggggaggggggagccttgtagggaggcctctacacagaagaaagcagcccccatgtcccagccacttctgggtcccagccagcagcacggatgttactgtcctgctccttcccccagccccacgccctaccagagggggcaaagggcacgtcccatcactcactgccctgtctgaaatgtggcagccactgtgggccaggctcagggcagggcaggcgattccagtggggttgggccccctggcgcctgctgcttactgcagtttcatgcaggcctctgctccttgtctttcttacctgtaaaatgggtctcagatgctccgccctgcttggccccagcttgtctgtctctgggtcctgggccagccaggatacctgataataaaagatcattgggtgaaaaaaaaaaaaaaaaaaaaaaaaaaaaaaaaaaaactcgagactagttctctctctctcattttttcataatcaaaggtcatatgatactgtatagacaagctttgtagtgaagtatagtagcaataatttctgtacctgatcaagtttattgcagcctttcttttcctatttcttttttttaagggttagtattaacaaatggcaatgagtagaaaagttaacatgaagattttagaaggagagaacttacaggacacagatttgtgattctttgactgtgacactattggatgtgattctaaaagcttttattgagcattgtcaaatttgtaagcttcatagggatggacatcatatctataatgcccttctatatgtgctaccatagatgtgacatttttgaccttaatatcgtctttgaaaatgttaaattgagaaacctgttaacttacattttatgaattggcacattgtattacttactgcaagagatatttcattttcagcacagtgcaaaagttctttaaaatgcatatgtctttttttctaattccgttttgttttaaagcacattttaaatgtagttttctcatttagtaaaagttgtctaattgatatgaagcctgactgattttttttttccttacagtgagacatttaagcacacattttattcacatagatactatgtccttgacatattgaaatgattcttttctgaaagtattcatgatctgcatatgatgtattaggttaggtcacaaaggttttatctgaggtgatttaaataacttcctgattggagtgtgtaagctgagcgatttctaataaaattttagttgtacacttttagtagtcatagtgaagcaggtctagaaaataagcctttggcagggaaaaagggcaatgttgattaatctcagtattaaaccacattaatctgtatcccattgtctggcttttgtaaattcatccaggtcaagactaagtatgttggttaataggaatccttttttttttttttaaagactaaatgtgaaaaaataatcactacttaagctaattaatattggtcattaaatttaaaggatggaaatttatcatgtttaaaaattattcaagcactcttaaaaccccttaaacagcctccagtcataaaaatgtgttctttacaaatatttgcttggcaacacgacttgaaataaataaaactttgtttcttaggagaaaatg

SEQ ID NO: 365112 - DNA, 2372 bp, Homo sapiens
tggtgcgcaggcgcgggccgccgcggcccggctctctggcacgagggcgcgctgtccgcttcttctgggcggacgctctggaggcaaaacatttccctgctgggggcggcgaccaccgtgagcgtcccggaaggggcggcaaagacgcctccgtcgcgcacgaggtggcctcgttggctttaccttggttcgcggtcgtccttggttatcgtgagcgtccgcgagtctctgggaggccaagcctaggggcgccacagcgcctgcgcgcgtacggcggccggaaggggctagaggcggctccctgggtgacaaccgcgcgccccacctttccccacgtggccgcgaagaccggctcaggagcatctatcggctgcacgccaacatcaacacaggcgaagatggtctccaagcgcattgcccaggagacctttgatgcagctgtgcgcgagaacatcgaggagtttgcgatggggccagaggaggcagtgaaagaggccgtggagcagtttgaatcgcaaggggttgatctgagcaacattgtaaagacggcacctaaagtctctgcagacggatcccaggagcccacacatgacatcctgcagatgctcagtgacctccaggagtctgtggccagctctcgcccccaggaggtgtcagcatacctcacccgcttctgcgaccagtgcaaacaggacaaggcctgccgcttcctcgcggcccagaagggggcctaccccatcatcttcactgcctggaagctggccactgcaggtgaccagggccttctgctccagtccctcaatgccctgtcggtgctgactgatggacagccagacctcctggatgcccagggcctgcagctcctagtggccacgctgacccagaatgctgatgaggctgacctgacctgctctgggatccgctgtgtgcgtcacgcttgcctgaaacatgaacagaatcggcaagacctggtgaaagctggcgtgctgcctctgctgactggtgccatcacccatcatggccaccacactgacgtggtcagggaagcctgctgggccctgcgtgtcatgaccttcgatgacgacatccgtgtgccctttggccatgcccacaaccatgccaagatgattgtgcaggagaacaaaggcttgaaggtgctcatcgaagccaccaaagcgttcctggataaccctggcatcctgagcgagctctgtggaaccctgtcccgcctggccattcgcaacgagttctgccaggaggtcgtcgacctcgggggcctgagcattctggtgtccctgctagccgactgcaatgaccaccagatgagggaccagagcggcgttcaggagctcgtgaagcaagtgctgagcaccctgcgagccatcgcaggcaacgacgacgtgaaagatgctattgtccgtgctggtgggacggagtccatcgtggctgctatgacccagcatctgaccagcccccaggtgtgtgagcagagctgcgcggccctgtgcttcctggccctgcgtaagcccgacaacagccgcatcatcgtggagggtggcggggctgtggcagcactgcaggccatgaaggcacacccgcagaaggccggcgtgcagaaacaggcttgcatgctgatccgaaacctggtggcccacggccaggccttctcgaagcccatcctggacctgggggctgaggcactcatcatgcaggcccgatctgcccaccgtgactgtgaggacgtggccaaggccgccctgcgggacctgggttgtcatgtcgagctccgagagctgtggacaggccagaggggcaacctggcgccatgaccccaggcccagtctgggccgtgactctgggtgagtcgtgtgactcaggaatgggggtagatccatgtcctccactgtcccccattagttctgtccccttcacaatgagaagtgttttctggcaggccctaggtaaagggtcgggggaggggggagccttgtagggaggcctctacacagaagaaagcagcccccatgtcccagccacttctgggtcccagccagcagcacggatgttactgtcctgctccttcccccagccccacgccctaccagagggggcaaagggcacgtcccatcactcactgccctgtctgaaatgtggcagccactgtgggccaggctcagggcagggcaggcgattccagtggggttgggccccctggcgcctgctgcttactgcagtttcatgcaggcctctgctccttgtctttcttacctgtaaaatgggtctcagatgctccgccctgcttggccccagcttgtctgtctctgggtcctgggccagccaggatacctgataataaaagatcattgggtgaa

SEQ ID NO: 365113 - DNA, 1991 bp, Homo sapiens
gcaggctggtaccgcccgggggttatgggatccccacgtggccgcgaagaccggctcaggagcatctatcggctgcacgccaacatcaacacaggcgaagatggtctccaagcgcattgcccaggagacctttgatgcagctgtgcgcgagaacatcgaggagtttgcgatggggccagaggaggcagtgaaagaggccgtggagcagtttgaatcgcaagatgctcagtgacctccaggagtctgtggccagctctcgcccccaggaggtgtcagcatacctcacccgcttctgcgaccagtgcaaacaggacaaggcctgccgcttcctcgcggcccagaagggggcctaccccatcatcttcactgcctggaagctggccactgcaggtgaccagggccttctgctccagtccctcaatgccctgtcggtgctgactgatggacagccagacctcctggatgcccagggcctgcagctcctagtggccacgctgacccagaatgctgatgaggctgacctgacctgctctgggatccgctgtgtgcgtcacgcttgcctgaaacatgaacagaatcggcaagacctggtgaaagctggcgtgctgcctctgctgactggtgccatcacccatcatggccaccacactgacgtggtcagggaagcctgctgggccctgcgtgtcatgaccttcgatgacgacatccgtgtgccctttggccatgcccacaaccatgccaagatgattgtgcaggagaacaaaggcttgaaggtgctcatcgaagccaccaaagcgttcctggataaccctggcatcctgagcgagctctgtggaaccctgtcccgcctggccattcgcaacgagttctgccaggaggtcgtcgacctcgggggcctgagcattctggtgtccctgctagccgactgcaatgaccaccagatgagggaccagagcggcgttcaggagctcgtgaagcaagtgctgagcaccctgcgagccatcgcaggcaacgacgacgtgaaagatgctattgtccgtgctggtgggacggagtccatcgtggctgctatgacccagcatctgaccagcccccaggtgtgtgagcagagctgcgcggccctgtgcttcctggccctgcgtaagcccgacaacagccgcatcatcgtggagggtggcggggctgtggcagcactgcaggccatgaaggcacacccgcagaaggccggcgtgcagaaacaggcttgcatgctgatccgaaacctggtggcccacggccaggccttctcgaagcccatcctggacctgggggctgaggcactcatcatgcaggcccgatctgcccaccgtgactgtgaggacgtggccaaggccgccctgcgggacctgggttgtcatgtcgagctccgagagctgtggacaggccagaggggcaacctggcgccatgaccccaggcccagtctgggccgtgactctgggtgagtcgtgtgactcaggaatgggggtagatccatgtcctccactgtcccccattagttctgtccccttcacaatgagaagtgttttctggcaggccctaggtaaagggtcgggggaggggggagccttgtagggaggcctctacacagaagaaagcagcccccatgtcccagccacttctgggtcccagccagcagcacggatgttactgtcctgctccttcccccagccccacgccctaccagagggggcaaagggcacgtcccatcactcactgccctgtctgaaatgtggcagccactgtgggccaggctcagggcagggcaggcgattccagtggggttgggccccctggcgcctgctgcttactgcagtttcatgcaggcctctgctccttgtctttcttacctgtaaaatgggtctcagatgctccgccctgcttggccccagcttgtctgtctctgggtcctgggccagccaggatacctgataataaaagatcattgggtgaa

SEQ ID NO: 365114 - DNA, 2541 bp, Homo sapiens
ggatggccaaagtcttgttcccaagaaccacggagcgcaaatttccagtcctgagaacggaaatgccccaatttccggtggccaatgacctggtcccgagaatcagagtgagaaaattccagatcccggccacattctttgcgaaagtagctgtcatcactgatggaagggttgcttgatctgaaggaaggccctggaaatacgtcacttctcaggccttctcttccggcatctctagagtgagctacagatccactgagggagtatctgccatcgctgtggacgtcatcaaattgcttgatctgggcgccctaggatctagctaatgagattcgtcactcccatgcatcatggattcgttgcttctgtaacagctcaattcctggtatctctgcgcctgtatttgccttggttcgcggtcgtccttggttatcgtgagcgtccgcgagtctctgggaggccaagcctaggggcgccacagcgcctgcgcgcgtacggcggccggaaggggctagaggcggctccctgggtgacaaccgcgcgccccacctttccccacgtggccgcgaagaccgggtgagacgctgcggctgccgaggcctgtcccgcgcggagtggggagtgggggtgccgcagggtcgggctggcgcgaccctcggctcaggagcatctatcggctgcacgccaacatcaacacaggcgaagatggtctccaagcgcattgcccaggagacctttgatgcagctgtgcgcgagaacatcgaggagtttgcgatggggccagaggaggcagtgaaagaggccgtggagcagtttgaatcgcaaggggttgatctgagcaacattgtaaagacggcacctaaagtctctgcagacggatcccaggagcccacacatgacatcctgcagatgctcagtgacctccaggagtctgtggccagctctcgcccccaggaggtgtcagcatacctcacccgcttctgcgaccagtgcaaacaggacaaggcctgccgcttcctcgcggcccagaagggggcctaccccatcatcttcactgcctggaagctggccactgcaggtgaccagggccttctgctccagtccctcaatgccctgtcggtgctgactgatggacagccagacctcctggatgcccagggcctgcagctcctagtggccacgctgacccagaatgctgatgaggctgacctgacctgctctgggatccgctgtgtgcgtcacgcttgcctgaaacatgaacagaatcggcaagacctggtgaaagctggcgtgctgcctctgctgactggtgccatcacccatcatggccaccacactgacgtggtcagggaagcctgctgggccctgcgtgtcatgaccttcgatgacgacatccgtgtgccctttggccatgcccacaaccatgccaagatgattgtgcaggagaacaaaggcttgaaggtgctcatcgaagccaccaaagcgttcctggataaccctggcatcctgagcgagctctgtggaaccctgtcccgcctggccattcgcaacgagttctgccaggaggtcgtcgacctcgggggcctgagcattctggtgtccctgctagccgactgcaatgaccaccagatgagggaccagagcggcgttcaggagctcgtgaagcaagtgctgagcaccctgcgagccatcgcaggcaacgacgacgtgaaagatgctattgtccgtgctggtgggacggagtccatcgtggctgctatgacccagcatctgaccagcccccagaaacaggcttgcatgctgatccgaaacctggtggcccacggccaggccttctcgaagcccatcctggacctgggggctgaggcactcatcatgcaggcccgatctgcccaccgtgactgtgaggacgtggccaaggccgccctgcgggacctgggttgtcatgtcgagctccgagagctgtggacaggccagaggggcaacctggcgccatgaccccaggcccagtctgggccgtgactctgggtgagtcgtgtgactcaggaatgggggtagatccatgtcctccactgtcccccattagttctgtccccttcacaatgagaagtgttttctggcaggccctaggtaaagggtcgggggaggggggagccttgtagggaggcctctacacagaagaaagcagcccccatgtcccagccacttctgggtcccagccagcagcacggatgttactgtcctgctccttcccccagccccacgccctaccagagggggcaaagggcacgtcccatcactcactgccctgtctgaaatgtggcagccactgtgggccaggctcagggcagggcaggcgattccagtggggttgggccccctggcgcctgctgcttactgcagtttcatgcaggcctctgctccttgtctttcttacctgtaaaatgggtctcagatgctccgccctgcttggccccagcttgtctgtctctgggtcctgggccagccaggatacctgataataaaagatcattgggtgaa

SEQ ID NO: 365115 - DNA, 2655 bp, Homo sapiens
ggatggccaaagtcttgttcccaagaaccacggagcgcaaatttccagtcctgagaacggaaatgccccaatttccggtggccaatgacctggtcccgagaatcagagtgagaaaattccagatcccggccacattctttgcgaaagtagctgtcatcactgatggaagggttgcttgatctgaaggaaggccctggaaatacgtcacttctcaggccttctcttccggcatctctagagtgagctacagatccactgagggagtatctgccatcgctgtggacgtcatcaaattgcttgatctgggcgccctaggatctagctaatgagattcgtcactcccatgcatcatggattcgttgcttctgtaacagctcaattcctggtatctctgcgcctgtatttgccttggttcgcggtcgtccttggttatcgtgagcgtccgcgagtctctgggaggccaagcctaggggcgccacagcgcctgcgcgcgtacggcggccggaaggggctagaggcggctccctgggtgacaaccgcgcgccccacctttccccacgtggccgcgaagaccgggtgagacgctgcggctgccgaggcctgtcccgcgcggagtggggagtgggggtgccgcagggtcgggctggcgcgaccctcggctcaggagcatctatcggctgcacgccaacatcaacacaggcgaagatggtctccaagcgcattgcccaggagacctttgatgcagctgtgcgcgagaacatcgaggagtttgcgatggggccagaggaggcagtgaaagaggccgtggagcagtttgaatcgcaaggggttgatctgagcaacattgtaaagacggcacctaaagtctctgcagacggatcccaggagcccacacatgacatcctgcagatgctcagtgacctccaggagtctgtggccagctctcgcccccaggaggtgtcagcatacctcacccgcttctgcgaccagtgcaaacaggacaaggcctgccgcttcctcgcggcccagaagggggcctaccccatcatcttcactgcctggaagctggccactgcaggtgaccagggccttctgctccagtccctcaatgccctgtcggtgctgactgatggacagccagacctcctggatgcccagggcctgcagctcctagtggccacgctgacccagaatgctgatgaggctgacctgacctgctctgggatccgctgtgtgcgtcacgcttgcctgaaacatgaacagaatcggcaagacctggtgaaagctggcgtgctgcctctgctgactggtgccatcacccatcatggccaccacactgacgtggtcagggaagcctgctgggccctgcgtgtcatgaccttcgatgacgacatccgtgtgccctttggccatgcccacaaccatgccaagatgattgtgcaggagaacaaaggcttgaaggtgctcatcgaagccaccaaagcgttcctggataaccctggcatcctgagcgagctctgtggaaccctgtcccgcctggccattcgcaacgagttctgccaggaggtcgtcgacctcgggggcctgagcattctggtgtccctgctagccgactgcaatgaccaccagatgagggaccagagcggcgttcaggagctcgtgaagcaagtgctgagcaccctgcgagccatcgcaggcaacgacgacgtgaaagatgctattgtccgtgctggtgggacggagtccatcgtggctgctatgacccagcatctgaccagcccccaggtgtgtgagcagagctgcgcggccctgtgcttcctggccctgcgtaagcccgacaacagccgcatcatcgtggagggtggcggggctgtggcagcactgcaggccatgaaggcacacccgcagaaggccggcgtgcagaaacaggcttgcatgctgatccgaaacctggtggcccacggccaggccttctcgaagcccatcctggacctgggggctgaggcactcatcatgcaggcccgatctgcccaccgtgactgtgaggacgtggccaaggccgccctgcgggacctgggttgtcatgtcgagctccgagagctgtggacaggccagaggggcaacctggcgccatgaccccaggcccagtctgggccgtgactctgggcccccagcttccgtggaatccagccgatgcaaacagctgaggagcgtcaccctggctgcacctctccgtggtgtccccgtctcccctgcccccagcaggaaagggtgctctcagctcagcagggctggcccaaacctctgacccagtcaccccgccctatccctcctccctggagactcccaggatgtgggagaaagatctcgaatctgccccagactgccctgacttaacttctgggccagtgtgaccttgggcagttctcaagcatttcttcatctgtcatgtggcggggtaggtgctcctgagctatttcgaggacggcctgcagtgctggccctgtcattcctgctccagccttgctctcagtctgcccatggctcccctttgccttctacataaaaccaaacctgtctgtggtcccagcaacttgggctaaggcgggaagatcacttgagcccaggagtcaaggctgcagtgagttaggatgg

SEQ ID NO: 365116 - DNA, 4020 bp, Homo sapiens
  misc_feature (4)..(4): n is a, c, g, or t
  misc_feature (6)..(6): n is a, c, g, or t
  misc_feature (8)..(8): n is a, c, g, or t
ggcngngncccgagagtcggggtgggggggctttgtgcgcggcggcggcgggagaggcggcggcggcggccagcacggaggcggaggccgagggggctgtgcacaggtcgccgcggagaggcgtgcgaattccgagccgagcgccgaggaccgtgctacccaggccgggctgccagccgcaggctcctctctggcagcagcggcggcgcggcgacccccgtccctcggcctccccttcccatcccacctcccgagccttcctcttcccgcagcacgcccggcccggcccggccgtggccctcctcagtgccggccgccatggcagaggcgtccggcgcggggaaaatctagcccggggatttcatgcggcctagctcggttccgcctcctcctcgcgcggccccagcggctgcccgcaccccagccccactccgggcctccgtgtctctcctgtgatcgcactgacacggccggggggttagaatggaacaaactgaaggcccgatgagagaaagggaaagttaaggatgctggagcagaacaatggatttctctttctctttcatgcaagggatcatgggaaacacaattcagcaaccacctcaactcattgactccgccaacatccgtcaggaggatgcctttgataacaacagtgacattgctgaagatggtggccagacaccatatgaagctactttgcagcaaggctttcagtacccagctacaacagaagatcttcctccactcacaaatgggtatccatcatcaatcagtgtgtatgaaactcaaaccaaataccagtcatataatcagtatcctaatgggtcagccaatggctttggtgcagttagaaactttagccccactgactattatcattcagaaattccaaacacaagaccacatgaaattctggaaaaaccttcccctccacagccaccacctcctccttcggtaccacaaactgtgattccaaagaagactggctcacctgaaattaaactaaaaataaccaaaactatccagaatggcagggaattgtttgagtcttccctttgtggagaccttttaaatgaagtacaggcaagtgagcacacgaaatcaaagcatgaaagcagaaaagaaaagaggaaaaaaagcaacaagcatgactcatcaagatctgaagagcgcaagtcacacaaaatccccaaattagaaccagaggaacaaaatagaccaaatgagagggttgacactgtatcagaaaaaccaagggaagaaccagtactaaaagaggaagccccagttcagccaatactatcttctgttccaacaacggaagtgtccactggtgttaagtttcaggttggcgatcttgtgtggtccaaggtgggaacctatccttggtggccttgtatggtttcaagtgatccccagcttgaggttcatactaaaattaacacaagaggtgcccgagaatatcatgtccagttttttagcaaccagccagagagggcgtgggttcatgaaaaacgggtacgagagtataaaggtcataaacagtatgaagaattactggctgaggcaaccaaacaagccagcaatcactctgagaaacaaaagattcggaaaccccgacctcagagagaacgtgctcagtgggatattggcattgcccatgcagagaaagcattgaaaatgactcgagaagaaagaatagaacagtatacttttatttacattgataaacagcctgaagaggctttatcccaagcaaaaaagagtgttgcctccaaaaccgaagttaaaaaaacccgacgaccaagatctgtgctgaatactcagccagaacagaccaatgcaggggaggtggcctcctcactctcaagtactgaaattcggagacatagccagaggcggcacacaagtgcggaagaggaagagccaccgcctgttaaaatagcctggaaaactgcggcagcaaggaaatccttaccagcttccattacgatgcacaaagggagcctggatttgcagaagtgtaacatgtctccagttgtgaaaattgaacaagtgtttgctcttcagaatgctacaggggatgggaaatttatcgatcaatttgtttattcaacaaagggaattggtaacaaaacagaaataagtgtcagggggcaagacaggcttataatttctacaccaaaccagagaaatgaaaagccaacgcagagtgtatcatctcctgaagcaacatctggttctacaggctcagtagaaaagaagcaacagagaagatcaattagaactcgttctgaatcagagaaatccactgaggttgtgccaaagaagaagatcaaaaaggagcaggttgaaacagttcctcaggctacagtgaagactggattacagaaagggtcggcggaccggggagtgcagggctctgtcagattcagtgacagctccgtctccgcagcgattgaggaaactgtggactgagattcctgtacaatttcatcccagaaactccagacttgtagtctccatgcaagatttctttgtcggcggcttgataaacagtttctttgttttcgattttgatttcgccaatcatcattattggcattttcctgcctggtttcttcttcaagactctgaacaattgctttaacagtcaaatgatttttttttttcggtttgagctggatgggtacagcttaaatcatgggtccagcctaaaaaccaccatttaacttacactgatcaatttcaacatggactgtttttggttttttgtttttaaataaagcatcattaatgcacatctgcaggggtttgccaaacagcccaaactgtatacattacaatcattaaaagttcttattttttttaatattagtgccgttatcatggagaacagcatgacagctgtctttggcagtctgtcatttttctagcattttcagaaactcatcggaaatggcggtacctgtgtttcccttcgaaagcctctcagtacagcactcctgttcctctgttaaaactccttgttaatccagtgatcttttaggccaaggaaatattttgtgatggtgttctgggtccatacaccagcaatgaaggagatagatttgtgtacttgtgttttttaatcagcattaacatgggcaggcaccctcatttatagatgtcaggaaacattcagtgaaaaacttgtagaatgggatgtgataacgaggttccagtaatctgagcagtctaacgaggcccacctcctccaccacagaacgtggctatgttccaagtgctactctcactcagcctgttgcggatcttcatggcctcaggagacttgtttctccatgggctcttctggactgcacacttccaccatagcttgctgggttgatctagatgtctgtttgttgtatggaaattttgggggaaaaaatccaaaacacaaactgtgggttgaaatattaaccgtctccttggttccttggtattcaccgtgcctgatctgcacatttcatcgtggctgtttctgtatagcctatactgcattagcccaagagattgttgctttgtaactttttgcactattgttttggctggatttgtattacacacagttttaaaaaaaacaattccacactattctctgccttttttttcctatttatttcttcccgcacaaattccacatagaggccttcccatccagctctacgtgatttggctgcacttgaacactgattgtccatttacagccctcagcaatgtgccttctaaatggcatgacatatgtagatgtgctgcagcgcttgttaatggtcacaataaatgccacttcaccaaggaagtctcagatgaacaattatgaacatccaaattttattggggggcaataatcaactgaattgcaaaatttgggggaaaatggcactatccgtgtacgaatcgaatacaaatcaaagatttgtcacatccctaataaaaacaagatggagatgtctctgcaaccatatttgtaagcta

SEQ ID NO: 365117 - DNA, 5492 bp, Homo sapiens
  misc_feature (4)..(4): n is a, c, g, or t
  misc_feature (6)..(6): n is a, c, g, or t
  misc_feature (8)..(8): n is a, c, g, or t
ggcngngncccgagagtcggggtgggggggctttgtgcgcggcggcggcgggagaggcggcggcggcggccagcacggaggcggaggccgagggggctgtgcacaggtcgccgcggagaggcgtgcgaattccgagccgagcgccgaggaccgtgctacccaggccgggctgccagccgcaggctcctctctggcagcagcggcggcgcggcgacccccgtccctcggcctccccttcccatcccacctcccgagccttcctcttcccgcagcacgcccggcccggcccggccgtggccctcctcagtgccggccgccatggcagaggcgtccggcgcggggaaaatctagcccggggatttcatgcggcctagctcggttccgcctcctcctcgcgcggccccagcggctgcccgcaccccagccccactccgggcctccgtgtctctcctgtgatcgcactgacacggccggggggttagaatggaacaaactgaaggcccgatgagagaaagggaaagttaaggatgctggagcagaacaatggatttctctttctctttcatgcaagggatcatgggaaacacaattcagcaaccacctcaactcattgactccgccaacatccgtcaggaggatgcctttgataacaacagtgacattgctgaagatggtggccagacaccatatgaagctactttgcagcaaggctttcagtacccagctacaacagaagatcttcctccactcacaaatgggtatccatcatcaatcagtgtgtatgaaactcaaaccaaataccagtcatataatcagtatcctaatgggtcagccaatggctttggtgcagttagaaactttagccccactgactattatcattcagaaattccaaacacaagaccacatgaaattctggaaaaaccttcccctccacagccaccacctcctccttcggtaccacaaactgtgattccaaagaagactggctcacctgaaattaaactaaaaataaccaaaactatccagaatggcagggaattgtttgagtcttccctttgtggagaccttttaaatgaagtacaggcaagtgagcacacgaaatcaaagcatgaaagcagaaaagaaaagaggaaaaaaagcaacaagcatgactcatcaagatctgaagagcgcaagtcacacaaaatccccaaattagaaccagaggaacaaaatagaccaaatgagagggttgacactgtatcagaaaaaccaagggaagaaccagtactaaaagaggaagccccagttcagccaatactatcttctgttccaacaacggaagtgtccactggtgttaagtttcaggttggcgatcttgtgtggtccaaggtgggaacctatccttggtggccttgtatggtttcaagtgatccccagcttgaggttcatactaaaattaacacaagaggtgcccgagaatatcatgtccagttttttagcaaccagccagagagggcgtgggttcatgaaaaacgggtacgagagtataaaggtcataaacagtatgaagaattactggctgaggcaaccaaacaagccagcaatcactctgagaaacaaaagattcggaaaccccgacctcagagagaacgtgctcagtgggatattggcattgcccatgcagagaaagcattgaaaatgactcgagaagaaagaatagaacagtatacttttatttacattgataaacagcctgaagaggctttatcccaagcaaaaaagagtgttgcctccaaaaccgaagttaaaaaaacccgacgaccaagatctgtgctgaatactcagccagaacagaccaatgcaggggaggtggcctcctcactctcaagtactgaaattcggagacatagccagaggcggcacacaagtgcggaagaggaagagccaccgcctgttaaaatagcctggaaaactgcggcagcaaggaaatccttaccagcttccattacgatgcacaaagggagcctggatttgcagaagtgtaacatgtctccagttgtgaaaattgaacaagtgtttgctcttcagaatgctacaggggatgggaaatttatcgatcaatttgtttattcaacaaagggaattggtaacaaaacagaaataagtgtcagggggcaagacaggcttataatttctacaccaaaccagagaaatgaaaagccaacgcagagtgtatcatctcctgaagcaacatctggttctacaggctcagtagaaaagaagcaacagagaagatcaattagaactcgttctgaatcagagaaatccactgaggttgtgccaaagaagaagatcaaaaaggagcaggttgaaacagttcctcaggctacagtgaagactggattacagaaaggtgccagcgagatttcagattcctgtaaacctctaaagaaaaggagtcgcgcctcaactgatgtagaaatgactagttcagcatacagagacacatctgactccgattctagaggactgagtgacctgcaggtaggctttggaaagcaagtagatagcccttcagctactgcagatgcagacgtttctgatgtgcagtccatggattcaagtttgtcgagaagaggcactggaatgagtaagaaggacactgtatgtcagatttgtgaaagctctggtgactctctgattccttgtgagggagagtgctgcaaacactttcacctggagtgcctgggattggcatcacttcctgatagcaagttcatctgcatggaatgtaaaactgggcagcacccatgtttttcgtgtaaagtgtctggtaaagatgtgaagcgttgttctgttggtgcttgtgggaaattttatcatgaagcctgtgtccgcaaattccccactgccatctttgaatcaaaaggattccgctgtcctcagcactgctgctctgcctgctctatggagaaagatatccacaaagcaagtaaaggccgcatgatgagatgtttaagatgtccagttgcctatcactctggagatgcttgcattgcggccggaagcatgttagtatcctcctacattctcatctgtagtaatcattccaaacggagcagtaattcttctgctgtaaatgtaggcttttgtttcgtttgtgccagagggctgatagttcaggaccattcagaccccatgttcagttcatatgcctataagtcccactacctactgaatgaatcaaatcgtgctgagttgatgaaattacctatgattccttcttcgtcagcttccaaaaagaaatgtgagaaaggtggaagattgctctgctgtgaatcgtgcccagcttccttccacccggaatgcctaagcatagaaatgccagaaggctgctggaattgtaatgactgtaaagctggcaagaaactacattacaagcagattgtttgggtcaaattgggaaattacagatggtggccagcagagatctgcaaccccaggtctgtgccactgaacatccagggccttaaacatgacttgggggacttccctgtattcttctttggttctcatgactactactgggtacaccagggcagagtgttcccttatgttgaaggagacaaaagctttgctgaagggcagactagtattaacaagaccttcaaaaaggcactggaagaagctgcaaaacgtttccaggaattgaaagcacaaagagaaagtaaagaagccctagagattgaaaaaaactcaagaaaaccccctccctacaaacacatcaaagctaacaaagtaataggaaaggtgcagatccaggttgctgacctgtcagagattccccgctgtaactgcaagccagctgatgaaaacccttgtggcttggaatcggagtgcctgaacagaatgttgcagtatgaatgccacccgcaggtgtgcccagctggagatcgttgtcagaaccagtgctttacaaagagactataccctgatgcagagatcatcaaaacggagcggagaggctggggcctcaggaccaaaaggagcattaagaagggtgaatttgtaaatgaatacgtcggtgaattaattgatgaagaagaatgcagattgcgaatcaagcgagcccacgagaacagtgtaactaatttttatatgttaactgttaccaaggaccgtataattgatgccggcccaaaaggaaattattctcgcttcatgaaccacagttgtaatcccaactgtgaaacacaaaagtggacagtgaatggagatgttcgagtgggactatttgctctctgtgatattcctgcagggatggagttaacatttaattataacctagattgtctgggcaacggcagaacggagtgccactgtggagcagataactgcagtggttttctaggagtgcggccaaagtcggcatgtgcgtcaacaaatgaagagaaggcaaaaaatgctaagttaaaacagaagagacgaaagatcaaaacagaaccaaagcagatgcatgaagattactgttttcaatgtggagatggtggagagctggtcatgtgtgacaaaaaagactgtcccaaagcataccacctcctatgccttaacctgactcagccaccatatggaaagtgggagtgtccgtggcatcagtgcgatgagtgcagcagtgcagctgtttccttctgtgaattctgtccacattcattttgtaaagatcatgaaaagggggccctggttccctctgcactggaaggccgcctctgctgctcggaacatgaccccatggctcctgtgtcaccagaatactggagcaagataaaatgtaaatgggaatcacaagatcatggagaagaagtaaaagaataaatgtgtggtgtcccctcctttctatttaagtgaaaaaagcaaatagatcatgcatttaaaaagaagagactgctacagtgcatacagcctttgccatcggaactgccttattaaagcaaaaatgggaaaccagttcatgcaggcagaagcagttggtggtgtctggtttttgtttgatttggttggtttgggattcttttgtggagggttaaattcccttggtcttttcttgccttttattgtgcttcagtgccattgcagcttgaaaaagaaatgtttttgctgttaaaataagaacaaagagaaaagtaagttttgttaatgagataaatttaaagtctaagatgtgttccttggttgtataaagcaaaagtagccatcattcctttatttattttcatttttaggaatttcaagaagtgtagttcaatagtctaatcaagtgtgtgtgtgttttaagtaggaatctgagaaagccctctaggaaagggtatgataagctttatatacctctttactgagcagtaggtaggctcacttctctttcccttcaaaatgcttttcataggcttagagaagggctctatggaagtattaaatctggcctcttgaaaacaatgcctcggtggatttta

SEQ ID NO: 365118 - DNA, 1121 bp, Homo sapiens
  misc_feature (4)..(4): n is a, c, g, or t
  misc_feature (6)..(6): n is a, c, g, or t
  misc_feature (8)..(8): n is a, c, g, or t
ggcngngncccgagagtcggggtgggggggctttgtgcgcggcggcggcgggagaggcggcggcggcggccagcacggaggcggaggccgagggggctgtgcacaggtcgccgcggagaggcgtgcgaattccgagccgagcgccgaggaccgtgctacccaggccgggctgccagccgcaggctcctctctggcagcagcggcggcgcggcgacccccgtccctcggcctccccttcccatcccacctcccgagccttcctcttcccgcagcacgcccggcccggcccggccgtggccctcctcagtgccggccgccatggcagaggcgtccggcgcggggaaaatctagcccggggatttcatgcggcctagctcggttccgcctcctcctcgcgcggccccagcggctgcccgcaccccagccccactccgggcctccgtgtctctcctgtgatcgcactgacacggccggggggttagaatggaacaaactgaaggcccgatgagagaaagggaaagttaaggatgctggagcagaacaatggatttctctttctctttcatgcaagggatcatgggaaacacaattcagcaaccacctcaactcattgactccgccaacatccgtcaggaggatgcctttgataacaacagtgacattgctgaagatggtggccagacaccatatgaagctactttgcagcaaggctttcagtacccagctacaacagaagatcttcctccactcacaaatgggtatccatcatcaatcagtgtgtatgaaactcaaaccaaataccagtcatataatcagtatcctaatgggtcagccaatggctttggtgcagttagaaactttagccccactgactattatcattcagaaattccaaacacaagaccacatgaaattctggaaaaaccttcccctccacagccaccacctcctccttcggtaccacaaactgtgattccaaagaagactggctcacctgaaattaaactaaaaataaccaaaactatccagaatggcagggaattgtttgagtcttccctttgtggagaccttttaaatgaagtacaggcaagtgagcacacgaaatcaaagcatgaaagcag

SEQ ID NO: 365119 - DNA, 3636 bp, Homo sapiens
  misc_feature (4)..(4): n is a, c, g, or t
  misc_feature (6)..(6): n is a, c, g, or t
  misc_feature (8)..(8): n is a, c, g, or t
ggcngngncccgagagtcggggtgggggggctttgtgcgcggcggcggcgggagaggcggcggcggcggccagcacggaggcggaggccgggggttagaatggaacaaactgaaggcccgatgagagaaagggaaagttaaggatgctggagcagaacaatggatttctctttctctttcatgcaagggatcatgggaaacacaattcagcaaccacctcaactcattgactccgccaacatccgtcaggaggatgcctttgataacaacagtgacattgctgaagatggtggccagacaccatatgaagctactttgcagcaaggctttcagtacccagctacaacagaagatcttcctccactcacaaatgggtatccatcatcaatcagtgtgtatgaaactcaaaccaaataccagtcatataatcagtatcctaatgggtcagccaatggctttggtgcagttagaaactttagccccactgactattatcattcagaaattccaaacacaagaccacatgaaattctggaaaaaccttcccctccacagccaccacctcctccttcggtaccacaaactgtgattccaaagaagactggctcacctgaaattaaactaaaaataaccaaaactatccagaatggcagggaattgtttgagtcttccctttgtggagaccttttaaatgaagtacaggcaagtgagcacacgaaatcaaagcatgaaagcagaaaagaaaagaggaaaaaaagcaacaagcatgactcatcaagatctgaagagcgcaagtcacacaaaatccccaaattagaaccagaggaacaaaatagaccaaatgagagggttgacactgtatcagaaaaaccaagggaagaaccagtactaaaagaggaagccccagttcagccaatactatcttctgttccaacaacggaagtgtccactggtgttaagtttcaggttggcgatcttgtgtggtccaaggtgggaacctatccttggtggccttgtatggtttcaagtgatccccagcttgaggttcatactaaaattaacacaagaggtgcccgagaatatcatgtccagttttttagcaaccagccagagagggcgtgggttcatgaaaaacgggtacgagagtataaaggtcataaacagtatgaagaattactggctgaggcaaccaaacaagccagcaatcactctgagaaacaaaagattcggaaaccccgacctcagagagaacgtgctcagtgggatattggcattgcccatgcagagaaagcattgaaaatgactcgagaagaaagaatagaacagtatacttttatttacattgataaacagcctgaagaggctttatcccaagcaaaaaagagtgttgcctccaaaaccgaagttaaaaaaacccgacgaccaagatctgtgctgaatactcagccagaacagaccaatgcaggggaggtggcctcctcactctcaagtactgaaattcggagacatagccagaggcggcacacaagtgcggaagaggaagagccaccgcctgttaaaatagcctggaaaactgcggcagcaaggaaatccttaccagcttccattacgatgcacaaagggagcctggatttgcagaagtgtaacatgtctccagttgtgaaaattgaacaagtgtttgctcttcagaatgctacaggggatgggaaatttatcgatcaatttgtttattcaacaaagggaattggtaacaaaacagaaataagtgtcagggggcaagacaggcttataatttctacaccaaaccagagaaatgaaaagccaacgcagagtgtatcatctcctgaagcaacatctggttctacaggctcagtagaaaagaagcaacagagaagatcaattagaactcgttctgaatcagagaaatccactgaggttgtgccaaagaagaagatcaaaaaggagcaggttgaaacagttcctcaggctacagtgaagactggattacagaaagggtcggcggaccggggagtgcagggctctgtcagattcagtgacagctccgtctccgcagcgattgaggaaactgtggactgagattcctgtacaatttcatcccagaaactccagacttgtagtctccatgcaagatttctttgtcggcggcttgataaacagtttctttgttttcgattttgatttcgccaatcatcattattggcattttcctgcctggtttcttcttcaagactctgaacaattgctttaacagtcaaatgatttttttttttcggtttgagctggatgggtacagcttaaatcatgggtccagcctaaaaaccaccatttaacttacactgatcaatttcaacatggactgtttttggttttttgtttttaaataaagcatcattaatgcacatctgcaggggtttgccaaacagcccaaactgtatacattacaatcattaaaagttcttattttttttaatattagtgccgttatcatggagaacagcatgacagctgtctttggcagtctgtcatttttctagcattttcagaaactcatcggaaatggcggtacctgtgtttcccttcgaaagcctctcagtacagcactcctgttcctctgttaaaactccttgttaatccagtgatcttttaggccaaggaaatattttgtgatggtgttctgggtccatacaccagcaatgaaggagatagatttgtgtacttgtgttttttaatcagcattaacatgggcaggcaccctcatttatagatgtcaggaaacattcagtgaaaaacttgtagaatgggatgtgataacgaggttccagtaatctgagcagtctaacgaggcccacctcctccaccacagaacgtggctatgttccaagtgctactctcactcagcctgttgcggatcttcatggcctcaggagacttgtttctccatgggctcttctggactgcacacttccaccatagcttgctgggttgatctagatgtctgtttgttgtatggaaattttgggggaaaaaatccaaaacacaaactgtgggttgaaatattaaccgtctccttggttccttggtattcaccgtgcctgatctgcacatttcatcgtggctgtttctgtatagcctatactgcattagcccaagagattgttgctttgtaactttttgcactattgttttggctggatttgtattacacacagttttaaaaaaaacaattccacactattctctgccttttttttcctatttatttcttcccgcacaaattccacatagaggccttcccatccagctctacgtgatttggctgcacttgaacactgattgtccatttacagccctcagcaatgtgccttctaaatggcatgacatatgtagatgtgctgcagcgcttgttaatggtcacaataaatgccacttcaccaaggaagtctcagatgaacaattatgaacatccaaattttattggggggcaataatcaactgaattgcaaaatttgggggaaaatggcactatccgtgtacgaatcgaatacaaatcaaagatttgtcacatccctaataaaaacaagatggagatgtctctgcaaccatatttgtaagcta

SEQ ID NO: 365120 - DNA, 5345 bp, Homo sapiens
  misc_feature (4)..(4): n is a, c, g, or t
  misc_feature (6)..(6): n is a, c, g, or t
  misc_feature (8)..(8): n is a, c, g, or t
ggcngngncccgagagtcggggtgggggggctttgtgcgcggcggcggcgggagaggcggcggcggcggccagcacggaggcggaggccgagggggctgtgcacaggtcgccgcggagaggcgtgcgaattccgagccgagcgccgaggaccgtgctacccaggccgggctgccagccgcaggctcctctctggcagcagcggcggcgcggcgacccccgtccctcggcctccccttcccatcccacctcccgagccttcctcttcccgcagcacgcccggcccggcccggccgtggccctcctcagtgccggccgccatggcagaggcgtccggcgcggggaaaatctagcccggggatttcatgcggcctagctcggttccgcctcctcctcgcgcggccccagcggctgcccgcaccccagccccactccgggcctccgtgtctctcctgtgatcgcactgacacggccggggggttagaatggaacaaactgaaggcccgatgagagaaagggaaagttaaggatgctggagcagaacaatggatttctctttctctttcatgcaagggatcatgggaaacacaattcagcaaccacctcaactcattgactccgccaacatccgtcaggaggatgcctttgataacaacagtgacattgctgaagatggtggccagacaccatatgaagctactttgcagcaaggctttcagtacccagctacaacagaagatcttcctccactcacaaatgggtatccatcatcaatcagtgtgtatgaaactcaaaccaaataccagtcatataatcagtatcctaatgggtcagccaatggctttggtgcagttagaaactttagccccactgactattatcattcagaaattccaaacacaagaccacatgaaattctggaaaaaccttcccctccacagccaccacctcctccttcggtaccacaaactgtgattccaaagaagactggctcacctgaaattaaactaaaaataaccaaaactatccagaatggcagggaattgtttgagtcttccctttgtggagaccttttaaatgaagtacaggcaagtgagcacacgaaatcaaagcatgaaagcagaaaagaaaagaggaaaaaaagcaacaagcatgactcatcaagatctgaagagcgcaagtcacacaaaatccccaaattagaaccagaggaacaaaatagaccaaatgagagggttgacactgtatcagaaaaaccaagggaagaaccagtactaaaagaggaagccccagttcagccaatactatcttctgttccaacaacggaagtgtccactggtgttaagtttcaggttggcgatcttgtgtggtccaaggtgggaacctatccttggtggccttgtatggtttcaagtgatccccagcttgaggttcatactaaaattaacacaagaggtgcccgagaatatcatgtccagttttttagcaaccagccagagagggcgtgggttcatgaaaaacgggtacgagagtataaaggtcataaacagtatgaagaattactggctgaggcaaccaaacaagccagcaatcactctgagaaacaaaagattcggaaaccccgacctcagagagaacgtgctcagtgggatattggcattgcccatgcagagaaagcattgaaaatgactcgagaagaaagaatagaacagtatacttttatttacattgataaacagcctgaagaggctttatcccaagcaaaaaagagtgttgcctccaaaaccgaagttaaaaaaacccgacgaccaagatctgtgctgaatactcagccagaacagaccaatgcaggggaggtggcctcctcactctcaagtactgaaattcggagacatagccagaggcggcacacaagtgcggaagaggaagagccaccgcctgttaaaatagcctggaaaactgcggcagcaaggaaatccttaccagcttccattacgatgcacaaagggagcctggatttgcagaagtgtaacatgtctccagttgtgaaaattgaacaagtgtttgctcttcagaatgctacaggggatgggaaatttatcgatcaatttgtttattcaacaaagggaattggtaacaaaacagaaataagtgtcagggggcaagacaggcttataatttctacaccaaaccagagaaatgaaaagccaacgcagagtgtatcatctcctgaagcaacatctggttctacaggctcagtagaaaagaagcaacagagaagatcaattagaactcgttctgaatcagagaaatccactgaggttgtgccaaagaagaagatcaaaaaggagcaggttgaaacagttcctcaggctacagtgaagactggattacagaaaggtgccagcgagatttcagattcctgtaaacctctaaagaaaaggagtcgcgcctcaactgatgtagaaatgactagttcagcatacagagacacatctgactccgattctagaggactgagtgacctgcaggtaggctttggaaagcaagtagatagcccttcagctactgcagatgcagacgtttctgatgtgcagtccatggattcaagtttgtcgagaagaggcactggaatgagtaagaaggacactgtatgtcagatttgtgaaagctctggtgactctctgattccttgtgagggagagtgctgcaaacactttcacctggagtgcctgggattggcatcacttcctgatagcaagttcatctgcatggaatgtaaaactgggcagcacccatgtttttcgtgtaaagtgtctggtaaagatgtgaagcgttgttctgttggtgcttgtgggaaattttatcatgaagcctgtgtccgcaaattccccactgccatctttgaatcaaaaggattccgctgtcctcagcactgctgctctgcctgctctatggagaaagatatccacaaagcaagtaaaggccgcatgatgagatgtttaagatgtccagttgcctatcactctggagatgcttgcattgcggccggaagcatgttagtatcctcctacattctcatctgtagtaatcattccaaacggagcagtaattcttctgctgtaaatgtaggcttttgtttcgtttgtgccagaggtggaagattgctctgctgtgaatcgtgcccagcttccttccacccggaatgcctaagcatagaaatgccagaaggctgctggaattgtaatgactgtaaagctggcaagaaactacattacaagcagattgtttgggtcaaattgggaaattacagatggtggccagcagagatctgcaaccccaggtctgtgccactgaacatccagggccttaaacatgacttgggggacttccctgtattcttctttggttctcatgactactactgggtacaccagggcagagtgttcccttatgttgaaggagacaaaagctttgctgaagggcagactagtattaacaagaccttcaaaaaggcactggaagaagctgcaaaacgtttccaggaattgaaagcacaaagagaaagtaaagaagccctagagattgaaaaaaactcaagaaaaccccctccctacaaacacatcaaagctaacaaagtaataggaaaggtgcagatccaggttgctgacctgtcagagattccccgctgtaactgcaagccagctgatgaaaacccttgtggcttggaatcggagtgcctgaacagaatgttgcagtatgaatgccacccgcaggtgtgcccagctggagatcgttgtcagaaccagtgctttacaaagagactataccctgatgcagagatcatcaaaacggagcggagaggctggggcctcaggaccaaaaggagcattaagaagggtgaatttgtaaatgaatacgtcggtgaattaattgatgaagaagaatgcagattgcgaatcaagcgagcccacgagaacagtgtaactaatttttatatgttaactgttaccaaggaccgtataattgatgccggcccaaaaggaaattattctcgcttcatgaaccacagttgtaatcccaactgtgaaacacaaaagtggacagtgaatggagatgttcgagtgggactatttgctctctgtgatattcctgcagggatggagttaacatttaattataacctagattgtctgggcaacggcagaacggagtgccactgtggagcagataactgcagtggttttctaggagtgcggccaaagtcggcatgtgcgtcaacaaatgaagagaaggcaaaaaatgctaagttaaaacagaagagacgaaagatcaaaacagaaccaaagcagatgcatgaagattactgttttcaatgtggagatggtggagagctggtcatgtgtgacaaaaaagactgtcccaaagcataccacctcctatgccttaacctgactcagccaccatatggaaagtgggagtgtccgtggcatcagtgcgatgagtgcagcagtgcagctgtttccttctgtgaattctgtccacattcattttgtaaagatcatgaaaagggggccctggttccctctgcactggaaggccgcctctgctgctcggaacatgaccccatggctcctgtgtcaccagaatactggagcaagataaaatgtaaatgggaatcacaagatcatggagaagaagtaaaagaataaatgtgtggtgtcccctcctttctatttaagtgaaaaaagcaaatagatcatgcatttaaaaagaagagactgctacagtgcatacagcctttgccatcggaactgccttattaaagcaaaaatgggaaaccagttcatgcaggcagaagcagttggtggtgtctggtttttgtttgatttggttggtttgggattcttttgtggagggttaaattcccttggtcttttcttgccttttattgtgcttcagtgccattgcagcttgaaaaagaaatgtttttgctgttaaaataagaacaaagagaaaagtaagttttgttaatgagataaatttaaagtctaagatgtgttccttggttgtataaagcaaaagtagccatcattcctttatttattttcatttttaggaatttcaagaagtgtagttcaatagtctaatcaagtgtgtgtgtgttttaagtaggaatctgagaaagccctctaggaaagggtatgataagctttatatacctctttactgagcagtaggtaggctcacttctctttcccttcaaaatgcttttcataggcttagagaagggctctatggaagtattaaatctggcctcttgaaaacaatgcctcggtggatttta

SEQ ID NO: 365121 - DNA, 3966 bp, Homo sapiens
  misc_feature (4)..(4): n is a, c, g, or t
  misc_feature (6)..(6): n is a, c, g, or t
  misc_feature (8)..(8): n is a, c, g, or t
ggcngngncccgagagtcggggtgggggggctttgtgcgcggcggcggcgggagaggcggcggcggcggccagcacggaggcggaggccgagggggctgtgcacaggtcgccgcggagaggcgtgcgaattccgagccgagcgccgaggaccgtgctacccaggccgggctgccagccgcaggctcctctctggcagcagcggcggcgcggcgacccccgtccctcggcctccccttcccatcccacctcccgagccttcctcttcccgcagcacgcccggcccggcccggccgtggccctcctcagtgccggccgccatggcagaggcgtccggcgcggggaaaatctagcccggggatttcatgcggcctagctcggttccgcctcctcctcgcgcggccccagcggctgcccgcaccccagccccactccgggcctccgtgtctctcctgtgatcgcactgacacggccggggggttagaatggaacaaactgaaggcccgatgagagaaagggaaagttaaggatgctggagcagaacaatggatttctctttctctttcatgcaagggatcatgggaaacacaattcagcaaccacctcaactcattgactccgccaacatccgtcaggaggatgcctttgataacaacagtgacattgctgaagatggtggccagacaccatatgaagctactttgcagcaaggctttcagtacccagctacaacagaagatcttcctccactcacaaatgggtatccatcatcaatcagtgtgtatgaaactcaaaccaaataccagtcatataatcagtatcctaatgggtcagccaatggctttggtgcagttagaaactttagccccactgactattatcattcagaaattccaaacacaagaccacatgaaattctggaaaaaccttcccctccacagccaccacctcctccttcggtaccacaaactgtgattccaaagaagactggctcacctgaaattaaactaaaaataaccaaaactatccagaatggcagggaattgtttgagtcttccctttgtggagaccttttaaatgaagtacaggcaagtgagcacacgaaatcaaagcatgaaagcagaaaagaaaagaggaaaaaaagcaacaagcatgactcatcaagatctgaagagcgcaagtcacacaaaatccccaaattagaaccagaggaacaaaatagaccaaatgagagggttgacactgtatcagaaaaaccaagggaagaaccagtactaaaagaggaagccccagttcagccaatactatcttctgttccaacaacggaagtgtccactggtgttaagtttcaggttggcgatcttgtgtggtccaaggtgggaacctatccttggtggccttgtatggtttcaagtgatccccagcttgaggttcatactaaaattaacacaagaggtgcccgagaatatcatgtccagttttttagcaaccagccagagagggcgtgggttcatgaaaaacgggtacgagagtataaaggtcataaacagtatgaagaattactggctgaggcaaccaaacaagccagcaatcactctgagaaacaaaagattcggaaaccccgacctcagagagaacgtgctcagtgggatattggcattgcccatgcagagaaagcattgaaaatgactcgagaagaaagaatagaacagtatacttttatttacattgataaacagcctgaagaggctttatcccaagcaaaaaagagtgttgcctccaaaaccgaagttaaaaaaacccgacgaccaagatctgtgctgaatactcagccagaacagaccaatgcaggggaggtggcctcctcactctcaagtactgaaattcggagacatagccagaggcggcacacaagtgcggaagaggaagagccaccgcctgttaaaatagcctggagcctggatttgcagaagtgtaacatgtctccagttgtgaaaattgaacaagtgtttgctcttcagaatgctacaggggatgggaaatttatcgatcaatttgtttattcaacaaagggaattggtaacaaaacagaaataagtgtcagggggcaagacaggcttataatttctacaccaaaccagagaaatgaaaagccaacgcagagtgtatcatctcctgaagcaacatctggttctacaggctcagtagaaaagaagcaacagagaagatcaattagaactcgttctgaatcagagaaatccactgaggttgtgccaaagaagaagatcaaaaaggagcaggttgaaacagttcctcaggctacagtgaagactggattacagaaagggtcggcggaccggggagtgcagggctctgtcagattcagtgacagctccgtctccgcagcgattgaggaaactgtggactgagattcctgtacaatttcatcccagaaactccagacttgtagtctccatgcaagatttctttgtcggcggcttgataaacagtttctttgttttcgattttgatttcgccaatcatcattattggcattttcctgcctggtttcttcttcaagactctgaacaattgctttaacagtcaaatgatttttttttttcggtttgagctggatgggtacagcttaaatcatgggtccagcctaaaaaccaccatttaacttacactgatcaatttcaacatggactgtttttggttttttgtttttaaataaagcatcattaatgcacatctgcaggggtttgccaaacagcccaaactgtatacattacaatcattaaaagttcttattttttttaatattagtgccgttatcatggagaacagcatgacagctgtctttggcagtctgtcatttttctagcattttcagaaactcatcggaaatggcggtacctgtgtttcccttcgaaagcctctcagtacagcactcctgttcctctgttaaaactccttgttaatccagtgatcttttaggccaaggaaatattttgtgatggtgttctgggtccatacaccagcaatgaaggagatagatttgtgtacttgtgttttttaatcagcattaacatgggcaggcaccctcatttatagatgtcaggaaacattcagtgaaaaacttgtagaatgggatgtgataacgaggttccagtaatctgagcagtctaacgaggcccacctcctccaccacagaacgtggctatgttccaagtgctactctcactcagcctgttgcggatcttcatggcctcaggagacttgtttctccatgggctcttctggactgcacacttccaccatagcttgctgggttgatctagatgtctgtttgttgtatggaaattttgggggaaaaaatccaaaacacaaactgtgggttgaaatattaaccgtctccttggttccttggtattcaccgtgcctgatctgcacatttcatcgtggctgtttctgtatagcctatactgcattagcccaagagattgttgctttgtaactttttgcactattgttttggctggatttgtattacacacagttttaaaaaaaacaattccacactattctctgccttttttttcctatttatttcttcccgcacaaattccacatagaggccttcccatccagctctacgtgatttggctgcacttgaacactgattgtccatttacagccctcagcaatgtgccttctaaatggcatgacatatgtagatgtgctgcagcgcttgttaatggtcacaataaatgccacttcaccaaggaagtctcagatgaacaattatgaacatccaaattttattggggggcaataatcaactgaattgcaaaatttgggggaaaatggcactatccgtgtacgaatcgaatacaaatcaaagatttgtcacatccctaataaaaacaagatggagatgtctctgcaaccatatttgtaagcta

SEQ ID NO: 365122 - DNA, 2772 bp, Homo sapiens
gcttctgccacatgatgacgagcgcggtgaaaccgatgaaggacatggcaccgcccacaaccgtcttccactcgttcgagcccctgttcatctcagcaaagctctccttgaacttaatgcgatacaactcgactttctcatccatggagaggctgctccaggaggccttctccttgtccttcagtgccttctggctggcagacaggtgcccgagaatatcatgtccagttttttagcaaccagccagagagggcgtgggttcatgaaaaacgggtacgagagtataaaggtcataaacagtatgaagaattactggctgaggcaaccaaacaagccagcaatcactctgagaaacaaaagattcggaaaccccgacctcagagagaacgtgctcagtgggatattggcattgcccatgcagagaaagcattgaaaatgactcgagaagaaagaatagaacagtatacttttatttacattgataaacagcctgaagaggctttatcccaagcaaaaaagagtgttgcctccaaaaccgaagttaaaaaaacccgacgaccaagatctgtgctgaatactcagccagaacagaccaatgcaggggaggtggcctcctcactctcaagtactgaaattcggagacatagccagaggcggcacacaagtgcggaagaggaagagccaccgcctgttaaaatagcctggaaaactgcggcagcaaggaaatccttaccagcttccattacgatgcacaaagggagcctggatttgcagaagtgtaacatgtctccagttgtgaaaattgaacaagtgtttgctcttcagaatgctacaggggatgggaaatttatcgatcaatttgtttattcaacaaagggaattggtaacaaaacagaaataagtgtcagggggcaagacaggcttataatttctacaccaaaccagagaaatgaaaagccaacgcagagtgtatcatctcctgaagcaacatctggttctacaggctcagtagaaaagaagcaacagagaagatcaattagaactcgttctgaatcagagaaatccactgaggttgtgccaaagaagaagatcaaaaaggagcaggttgaaacagttcctcaggctacagtgaagactggattacagaaagggtcggcggaccggggagtgcagggctctgtcagattcagtgacagctccgtctccgcagcgattgaggaaactgtggactgagattcctgtacaatttcatcccagaaactccagacttgtagtctccatgcaagatttctttgtcggcggcttgataaacagtttctttgttttcgattttgatttcgccaatcatcattattggcattttcctgcctggtttcttcttcaagactctgaacaattgctttaacagtcaaatgatttttttttttcggtttgagctggatgggtacagcttaaatcatgggtccagcctaaaaaccaccatttaacttacactgatcaatttcaacatggactgtttttggttttttgtttttaaataaagcatcattaatgcacatctgcaggggtttgccaaacagcccaaactgtatacattacaatcattaaaagttcttattttttttaatattagtgccgttatcatggagaacagcatgacagctgtctttggcagtctgtcatttttctagcattttcagaaactcatcggaaatggcggtacctgtgtttcccttcgaaagcctctcagtacagcactcctgttcctctgttaaaactccttgttaatccagtgatcttttaggccaaggaaatattttgtgatggtgttctgggtccatacaccagcaatgaaggagatagatttgtgtacttgtgttttttaatcagcattaacatgggcaggcaccctcatttatagatgtcaggaaacattcagtgaaaaacttgtagaatgggatgtgataacgaggttccagtaatctgagcagtctaacgaggcccacctcctccaccacagaacgtggctatgttccaagtgctactctcactcagcctgttgcggatcttcatggcctcaggagacttgtttctccatgggctcttctggactgcacacttccaccatagcttgctgggttgatctagatgtctgtttgttgtatggaaattttgggggaaaaaatccaaaacacaaactgtgggttgaaatattaaccgtctccttggttccttggtattcaccgtgcctgatctgcacatttcatcgtggctgtttctgtatagcctatactgcattagcccaagagattgttgctttgtaactttttgcactattgttttggctggatttgtattacacacagttttaaaaaaaacaattccacactattctctgccttttttttcctatttatttcttcccgcacaaattccacatagaggccttcccatccagctctacgtgatttggctgcacttgaacactgattgtccatttacagccctcagcaatgtgccttctaaatggcatgacatatgtagatgtgctgcagcgcttgttaatggtcacaataaatgccacttcaccaaggaagtctcagatgaacaattatgaacatccaaattttattggggggcaataatcaactgaattgcaaaatttgggggaaaatggcactatccgtgtacgaatcgaatacaaatcaaagatttgtcacatccctaataaaaacaagatggagatgtctctgcaaccatatttgtaagcta

SEQ ID NO: 365123 - DNA, 3936 bp, Homo sapiens
  misc_feature (4)..(4): n is a, c, g, or t
  misc_feature (6)..(6): n is a, c, g, or t
  misc_feature (8)..(8): n is a, c, g, or t
ggcngngncccgagagtcggggtgggggggctttgtgcgcggcggcggcgggagaggcggcggcggcggccagcacggaggcggaggccgagggggctgtgcacaggtcgccgcggagaggcgtgcgaattccgagccgagcgccgaggaccgtgctacccaggccgggctgccagccgcaggctcctctctggcagcagcggcggcgcggcgacccccgtccctcggcctccccttcccatcccacctcccgagccttcctcttcccgcagcacgcccggcccggcccggccgtggccctcctcagtgccggccgccatggcagaggcgtccggcgcggggaaaatctagcccggggatttcatgcggcctagctcggttccgcctcctcctcgcgcggccccagcggctgcccgcaccccagccccactccgggcctccgtgtctctcctgtgatcgcactgacacggccggggggttagaatggaacaaactgaaggcccgatgagagaaagggaaagttaaggatgctggagcagaacaatggatttctctttctctttcatgcaagggatcatgggaaacacaattcagcaaccacctcaactcattgactccgccaacatccgtcaggaggatgcctttgataacaacagtgacattgctgaagatggtggccagacaccatatgaagctactttgcagcaaggctttcagtacccagctacaacagaagatcttcctccactcacaaatgggtatccatcatcaatcagtgtgtatgaaactcaaaccaaataccagtcatataatcagtatcctaatgggtcagccaatggctttggtgcagttagaaactttagccccactgactattatcattcagaaattccaaacacaagaccacatgaaattctggaaaaaccttcccctccacagccaccacctcctccttcggtaccacaaactgtgattccaaagaagactggctcacctgaaattaaactaaaaataaccaaaactatccagaatggcagggaattgtttgagtcttccctttgtggagaccttttaaatgaagtacaggcaagtgagcacacgaaatcaaagcatgaaagcagaaaagaaaagaggaaaaaaagcaacaagcatgactcatcaagatctgaagagcgcaagtcacacaaaatccccaaattagaaccagaggaacaaaatagaccaaatgagagggttgacactgtatcagaaaaaccaagggaagaaccagtactaaaagaggaagccccagttcagccaatactatcttctgttccaacaacggaagtgtccactggtgttaagtttcaggttggcgatcttgtgtggtccaaggtgggaacctatccttggtggccttgtatggtttcaagtgatccccagcttgaggttcatactaaaattaacacaagaggtgcccgagaatatcatgtccagttttttagcaaccagccagagagggcgtgggttcatgaaaaacgggtacgagagtataaaggtcataaacagtatgaagaattactggctgaggcaaccaaacaagccagcaatcactctgagaaacaaaagattcggaaaccccgacctcagagagaacgtgctcagtgggatattggcattgcccatgcagagaaagcattgaaaatgactcgagaagaaagaatagaacagtatacttttatttacattgataaacagcctgaagaggctttatcccaagcaaaaaagagtgttgcctccaaaaccgaagttaaaaaaacccgacgaccaagatctgtgctgaatactcagccagaacagaccaatgcaggggaggtggcctcctcactctcaagtactgaaattcggagacatagccagaggcggcacacaagtgcggaagaggaagagccaccgcctgttaaaatagcctggaaaactgcggcagcaaggaaatccttaccagcttccattacgatgcacaaagggagcctggatttgcagaagtgtaacatgtctccagttgtgaaaattgaacaagtgtttgctcttcagaatgctacaggggatgggaaatttatcgatcaatttgtttattcaacaaagggaattggtaacaaaacagaaataagtgtcagggggcaagacaggcttataatttctacaccaaaccagagaaatgaaaagccaacgcagagtgtatcatctcctgaagcaacatctggttctacaggctcagtagaaaagaagcaacagagaagatcaattagaactcgttctgaatcagagaaatccactgaggttgtgccaaagaagaagatcaaaaaggagcaggttgaaacagttcctcaggctacagtgaagactggattacagaaagggtcggcggaccggggagtgcagggctctgtcagattcagtgacagctccgtctccgcagcgattgaggaaactgtggactgagattcctgtacaatttcatcccagaaactccagacttgtagtctccatgcaagatttctttgtcggcggcttgataaacagtttctttgttttcgattttgatttcgccaatcatcattattggcattttcctgcctggtttcttcttcaagactctgaacaattgctttaacagtcaaatgatttttttttttcggtttgagctggatgggtacagcttaaatcatgggtccagcctaaaaaccaccatttaacttacactgatcaatttcaacatggactgtttttggttttttgtttttaaataaagcatcattaatgcacatctgcaggggtttgccaaacagcccaaactgtatacattacaatcattaaaagttcttattttttttaatattagtgccgttatcatggagaacagcatgacagctgtctttggcagtctgtcatttttctagcattttcagaaactcatcggaaatggcggtacctgtgtttcccttcgaaagcctctcagtacagcactcctgttcctctgttaaaactccttgttaatccagtgatcttttaggccaaggaaatattttgtgatggtgttctgggtccatacaccagcaatgaaggagatagatttgtgtacttgtgttttttaatcagcattaacatgggcaggcaccctcatttatagatgtcaggaaacattcagtgaaaaacttgtagaatgggatgtgataacgaggttccagtaatctgagcagtctaacgaggcccacctcctccaccacagaacgtggctatgttccaagtgctactctcactcagcctgttgcggatcttcatggcctcaggagacttgtttctccatgggctcttctggactgcacacttccaccatagcttgctgggttgatctagatgtctgtttgttgtatggaaattttgggggaaaaaatccaaaacacaaactgtgggttgaaatattaaccgtctccttggttccttggtattcaccgtgcctgatctgcacatttcatcgtggctgtttctgtatagcctatactgcattagcccaagagattgttgctttgtaactttttgcactattgttttggctggatttgtattacacacagttttaaaaaaaacaattcaaaaaaaaaaaaaaaaaaaaaaaaacggggcggagcgggatactaaaaagtaaattccccacggggaggcggcaacaggatctatagcggggatcaccccagcgatttcagtggtaccacgggggggccccatagtagtagaggcggaaataataacgaatgagggaaacgtgggcggagttagacacgcggagtggacagcgggcacacagtgcaagaccggcgacccaccgtgggaaggaaaccataaccgggggcgcgaaacatggtggacagaacactaagagatattaaggaccaggaa

SEQ ID NO: 365124 - DNA, 5459 bp, Homo sapiens
  misc_feature (4)..(4): n is a, c, g, or t
  misc_feature (6)..(6): n is a, c, g, or t
  misc_feature (8)..(8): n is a, c, g, or t
ggcngngncccgagagtcggggtgggggggctttgtgcgcggcggcggcgggagaggcggcggcggcggccagcacggaggcggaggccgagggggctgtgcacaggtcgccgcggagaggcgtgcgaattccgagccgagcgccgaggaccgtgctacccaggccgggctgccagccgcaggctcctctctggcagcagcggcggcgcggcgacccccgtccctcggcctccccttcccatcccacctcccgagccttcctcttcccgcagcacgcccggcccggcccggccgtggccctcctcagtgccggccgccatggcagaggcgtccggcgcggggaaaatctagcccggggatttcatgcggcctagctcggttccgcctcctcctcgcgcggccccagcggctgcccgcaccccagccccactccgggcctccgtgtctctcctgtgatcgcactgacacggccggggggttagaatggaacaaactgaaggcccgatgagagaaagggaaagttaaggatgctggagcagaacaatggatttctctttctctttcatgcaagggatcatgggaaacacaattcagcaaccacctcaactcattgactccgccaacatccgtcaggaggatgcctttgataacaacagtgacattgctgaagatggtggccagacaccatatgaagctactttgcagcaaggctttcagtacccagctacaacagaagatcttcctccactcacaaatgggtatccatcatcaatcagtgtgtatgaaactcaaaccaaataccagtcatataatcagtatcctaatgggtcagccaatggctttggtgcagttagaaactttagccccactgactattatcattcagaaattccaaacacaagaccacatgaaattctggaaaaaccttcccctccacagccaccacctcctccttcggtaccacaaactgtgattccaaagaagactggctcacctgaaattaaactaaaaataaccaaaactatccagaatggcagggaattgtttgagtcttccctttgtggagaccttttaaatgaagtacaggcaagtgagcacacgaaatcaaagcatgaaagcagaaaagaaaagaggaaaaaaagcaacaagcatgactcatcaagatctgaagagcgcaagtcacacaaaatccccaaattagaaccagaggaacaaaatagaccaaatgagagggttgacactgtatcagaaaaaccaagggaagaaccagtactaaaagaggaagccccagttcagccaatactatcttctgttccaacaacggaagtgtccactggtgttaagtttcaggttggcgatcttgtgtggtccaaggtgggaacctatccttggtggccttgtatggtttcaagtgatccccagcttgaggttcatactaaaattaacacaagaggtgcccgagaatatcatgtccagttttttagcaaccagccagagagggcgtgggttcatgaaaaacgggtacgagagtataaaggtcataaacagtatgaagaattactggctgaggcaaccaaacaagccagcaatcactctgagaaacaaaagattcggaaaccccgacctcagagagaacgtgctcagtgggatattggcattgcccatgcagagaaagcattgaaaatgactcgagaagaaagaatagaacagtatacttttatttacattgataaacagcctgaagaggctttatcccaagcaaaaaagagtgttgcctccaaaaccgaagttaaaaaaacccgacgaccaagatctgtgctgaatactcagccagaacagaccaatgcaggggaggtggcctcctcactctcaagtactgaaattcggagacatagccagaggcggcacacaagtgcggaagaggaagagccaccgcctgttaaaatagcctggaaaactgcggcagcaaggaaatccttaccagcttccattacgatgcacaaagggagcctggatttgcagaagtgtaacatgtctccagttgtgaaaattgaacaagtgtttgctcttcagaatgctacaggggatgggaaatttatcgatcaatttgtttattcaacaaagggaattggtaacaaaacagaaataagtgtcagggggcaagacaggcttataatttctacaccaaaccagagaaatgaaaagccaacgcagagtgtatcatctcctgaagcaacatctggttctacaggctcagtagaaaagaagcaacagagaagatcaattagaactcgttctgaatcagagaaatccactgaggttgtgccaaagaagaagatcaaaaaggagcaggttgaaacagttcctcaggctacagtgaagactggattacagaaaggtgccagcgagatttcagattcctgtaaacctctaaagaaaaggagtcgcgcctcaactgatgtagaaatgactagttcagcatacagagacacatctgactccgattctagaggactgagtgacctgcaggtaggctttggaaagcaagtagatagcccttcagctactgcagatgcagacgtttctgatgtgcagtccatggattcaagtttgtcgagaagaggcactggaatgagtaagaaggacactgtatgtcagatttgtgaaagctctggtgactctctgattccttgtgagggagagtgctgcaaacactttcacctggagtgcctgggattggcatcacttcctgatagcaagttcatctgcatggaatgtaaaactgggcagcacccatgtttttcgtgtaaagtgtctggtaaagatgtgaagcgttgttctgttggtgcttgtgggaaattttatcatgaagcctgtgtccgcaaattccccactgccatctttgaatcaaaaggattccgctgtcctcagcactgctgctctgcctgctctatggagaaagatatccacaaagcaagtaaaggccgcatgatgagatgtttaagatgtccagttgcctatcactctggagatgcttgcattgcggccggaagcatgttagtatcctcctacattctcatctgtagtaatcattccaaacggagcagtaattcttctgctgtaaatgtaggcttttgtttcgtttgtgccagagggctgatagttcaggaccattcagaccccatgttcagttcatatgcctataagtcccactacctactgaatgaatcaaatcgtgctgagttgatgaaattacctatgattccttcttcgtcagcttccaaaaagaaatgtgagaaaggtggaagattgctctgctgtgaatcgtgcccagcttccttccacccggaatgcctaagcatagaaatgccagaaggctgctggaattgtaatgactgtaaagctggcaagaaactacattacaagcagattgtttgggtcaaattgggaaattacagatggtggccagcagagatctgcaaccccaggtctgtgccactgaacatccagggccttaaacatgacttgggggacttccctgtattcttctttggttctcatgactactactgggtacaccagggcagagtgttcccttatgttgaaggagacaaaagctttgctgaagggcagactagtattaacaagaccttcaaaaaggcactggaagaagctgcaaaacgtttccaggaattgaaagcacaaagagaaagtaaagaagccctagagattgaaaaaaactcaagaaaaccccctccctacaaacacatcaaagctaacaaagtaataggaaaggtgcagatccaggttgctgacctgtcagagattccccgctgtaactgcaagccagctgatgaaaacccttgtggcttggaatcggagtgcctgaacagaatgttgcagtatgaatgccacccgcaggtgtgcccagctggagatcgttgtcagaaccagtgctttacaaagagactataccctgatgcagagatcatcaaaacggagcggagaggctggggcctcaggaccaaaaggagcattaagaagggtgaatttgtaaatgaatacgtcggtgaattaattgatgaagaagaatgcagattgcgaatcaagcgagcccacgagaacagtgaccgtataattgatgccggcccaaaaggaaattattctcgcttcatgaaccacagttgtaatcccaactgtgaaacacaaaagtggacagtgaatggagatgttcgagtgggactatttgctctctgtgatattcctgcagggatggagttaacatttaattataacctagattgtctgggcaacggcagaacggagtgccactgtggagcagataactgcagtggttttctaggagtgcggccaaagtcggcatgtgcgtcaacaaatgaagagaaggcaaaaaatgctaagttaaaacagaagagacgaaagatcaaaacagaaccaaagcagatgcatgaagattactgttttcaatgtggagatggtggagagctggtcatgtgtgacaaaaaagactgtcccaaagcataccacctcctatgccttaacctgactcagccaccatatggaaagtgggagtgtccgtggcatcagtgcgatgagtgcagcagtgcagctgtttccttctgtgaattctgtccacattcattttgtaaagatcatgaaaagggggccctggttccctctgcactggaaggccgcctctgctgctcggaacatgaccccatggctcctgtgtcaccagaatactggagcaagataaaatgtaaatgggaatcacaagatcatggagaagaagtaaaagaataaatgtgtggtgtcccctcctttctatttaagtgaaaaaagcaaatagatcatgcatttaaaaagaagagactgctacagtgcatacagcctttgccatcggaactgccttattaaagcaaaaatgggaaaccagttcatgcaggcagaagcagttggtggtgtctggtttttgtttgatttggttggtttgggattcttttgtggagggttaaattcccttggtcttttcttgccttttattgtgcttcagtgccattgcagcttgaaaaagaaatgtttttgctgttaaaataagaacaaagagaaaagtaagttttgttaatgagataaatttaaagtctaagatgtgttccttggttgtataaagcaaaagtagccatcattcctttatttattttcatttttaggaatttcaagaagtgtagttcaatagtctaatcaagtgtgtgtgtgttttaagtaggaatctgagaaagccctctaggaaagggtatgataagctttatatacctctttactgagcagtaggtaggctcacttctctttcccttcaaaatgcttttcataggcttagagaagggctctatggaagtattaaatctggcctcttgaaaacaatgcctcggtggatttta

SEQ ID NO: 365125 - DNA, 3411 bp, Homo sapiens
  misc_feature (4)..(4): n is a, c, g, or t
  misc_feature (6)..(6): n is a, c, g, or t
  misc_feature (8)..(8): n is a, c, g, or t
ggcngngncccgagagtcggggtgggggggctttgtgcgcggcggcggcgggagaggcggcggcggcggccagcacggaggcggaggccgagggggctgtgcacaggtcgccgcggagaggcgtgcgaattccgagccgagcgccgaggaccgtgctacccaggccgggctgccagccgcaggctcctctctggcagcagcggcggcgcggcgacccccgtccctcggcctccccttcccatcccacctcccgagccttcctcttcccgcagcacgcccggcccggcccggccgtggccctcctcagtgccggccgccatggcagaggcgtccggcgcggggaaaatctagcccggggatttcatgcggcctagctcggttccgcctcctcctcgcgcggccccagcggctgcccgcaccccagccccactccgggcctccgtgtctctcctgtgatcgcactgacacggccggggggttagaatggaacaaactgaaggcccgatgagagaaagggaaagttaaggatgctggagcagaacaatggatttctctttctctttcatgcaagggatcatgggaaacacaattcagcaaccacctcaactcattgactccgccaacatccgtcaggaggatgcctttgataacaacagtgacattgctgaagatggtggccagacaccatatgaagctactttgcagcaaggctttcagtacccagctacaacagaagatcttcctccactcacaaatgggtatccatcatcaatcagtgtgtatgaaactcaaaccaaataccagtcatataatcagtatcctaatgggtcagccaatggctttggtgcagttagaaactttagccccactgactattatcattcagaaattccaaacacaagaccacatgaaattctggaaaaaccttcccctccacagccaccacctcctccttcggtaccacaaactgtgattccaaagaagactggctcacctgaaattaaactaaaaataaccaaaactatccagaatggcagggaattgtttgagtcttccctttgtggagaccttttaaatgaagtacaggcaagtgagcacacgaaatcaaagcatgaaagcagaaaagaaaagaggaaaaaaagcaacaagcatgactcatcaagatctgaagagcgcaagtcacacaaaatccccaaattagaaccagaggaacaaaatagaccaaatgagagggttgacactgtatcagaaaaaccaagggaagaaccagtactaaaagaggaagccccagttcagccaatactatcttctgttccaacaacggaagtgtccactggtgttaagtttcaggttggcgatcttgtgtggtccaaggtgggaacctatccttggtggccttgtatggtttcaagtgatccccagcttgaggttcatactaaaattaacacaagaggtgcccgagaatatcatgtccagttttttagcaaccagccagagagggcgtgggttcatgaaaaacgggtacgagagtataaaggtcataaacagtatgaagaattactggctgaggcaaccaaacaagccagcaatcactctgagaaacaaaagattcggaaaccccgacctcagagagaacgtgctcagtgggatattggcattgcccatgcagagaaagcattgaaaatgactcgagaagaaagaatagaacagtatacttttatttacattgataaacagcctgaagaggctttatcccaagcaaaaaagagtgttgcctccaaaaccgaagttaaaaaaacccgacgaccaagatctgtgctgaatactcagccagaacagaccaatgcaggggaggtggcctcctcactctcaagtactgaaattcggagacatagccagaggcggcacacaagtgcggaagaggaagagccaccgcctgttaaaatagcctggaaaactgcggcagcaaggaaatccttaccagcttccattacgatgcacaaagggagcctggatttgcagaagtgtaacatgtctccagttgtgaaaattgaacaagtgtttgctcttcagaatgctacaggggatgggaaatttatcgatcaatttgtttattcaacaaagggaattggtaacaaaacagaaataagtgtcagggggcaagacaggcttataatttctacaccaaaccagagaaatgaaaagccaacgcagagtgtatcatctcctgaagcaacatctggttctacaggctcagtagaaaagaagcaacagagaagatcaattagaactcgttctgaatcagagaaatccactgaggttgtgccaaagaagaagatcaaaaaggagcaggttggcttcctacatgtagagagttaaaacattgtatttgtaaatgttgtggcttacattcctgtcttaaaagaaagagaaactttcccccacactgagtttcctttctggactatcttaacgcttctgtcctggtgggttccagtgctcagttttaatacagccatccctgtgattctgcttcaagcattttcacagaaaacaggtttcaggagatgggaagccagtggtgcaagacttaaaaaatccttcacatttatttagaagtttctgttatcagcagaatgatttcatgtttttatgatttttatttggaaccatcattgagttccttttttttttttaagttggattttgggtttaagctggctggtatatattgttttttattttttaaacaaatcaatttaatttatattcttatatttaagaagcagatattcatagatgatctgttttttctggttaatatcgcagattttttggaatgttattttcccagtggaatattcacctgatatcaggttgtcagataaataatatttaggtaaaaaaaggtgtgtgggggggttgcattttgactgaagtgtattaaaccagtgtaatcaatgtagtaagatacatttaaatcaacttttcaaataaaattttagaagccattcttctttaaattaaactcacaatcagattttttcttaatttttttgttaaagaatatccattcttacagcctaaacacctgctagcaaacaaaacaaattctgaatagaattagttccaataagttttatattttttaaaccatttatatggaagaatgtgagcttttctatttaaaatatttccttcatgattttaaacttccaaatttaaaagctaactttgtgggtgctctgtggtatcaccaagcaagtgaaacagtttttccagaatatttaactaaaatttaaatagtatactaatttgtcattcatttatcatattaactttcatatttcatacttaggaaattatattccaaaaaatgaatgacaaattagtatactatttaaattttag

SEQ ID NO: 365126 - DNA, 2443 bp, Homo sapiens
tcatatttcaccacatcttaaagaaacatgaaattcaatttatagcttaaacaggaactcctccaaacagcctcctttctctaattccaatggttcaatcctcaaattaccacgtgttttacatatacattggcagaataacttctgatctcgctctcctaatgtaggatcaagacactgttcataagacactcaagaaagtgcttttgcaatatcacaaacttattttcttaagtttgtactagcagcaaaagtattgagcttccagctgtatggagccctgtagcactctctacagagagggtcctgattcccagcaacttagctgtgagtgcaggcgcggaagggtcttaaagtggcgtgagttacattaacctgagtatcatagtaagtaaaaatttatcctaacgtctttggggcgggaggggtttttagcaacattggggccggttgcagaaacaacccctctcctgccttccagacactgaggaaagtattcttgttctcttcatataccaagggaatggtgggaaaagtctttgctagagagcatgtggctgtgtgttgtcacttgatattcagcacaggcagctaggatttaaaccctccctgatcttgagacagagaactttacccaaaagatgggactgagttcagatttcagatacattaatcactcatcattgcttagattgatgaaagtatcttttccctctgttaataattaaaagggaaaaaaattctttgttaatgctgtatttttctgtccaaacaggttgaaacagttcctcaggctacagtgaagactggattacagaaagggtcggcggaccggggagtgcagggctctgtcagattcagtgacagctccgtctccgcagcgattgaggaaactgtggactgagattcctgtacaatttcatcccagaaactccagacttgtagtctccatgcaagatttctttgtcggcggcttgataaacagtttctttgttttcgattttgatttcgccaatcatcattattggcattttcctgcctggtttcttcttcaagactctgaacaattgctttaacagtcaaatgatttttttttttcggtttgagctggatgggtacagcttaaatcatgggtccagcctaaaaaccaccatttaacttacactgatcaatttcaacatggactgtttttggttttttgtttttaaataaagcatcattaatgcacatctgcaggggtttgccaaacagcccaaactgtatacattacaatcattaaaagttcttattttttttaatattagtgccgttatcatggagaacagcatgacagctgtctttggcagtctgtcatttttctagcattttcagaaactcatcggaaatggcggtacctgtgtttcccttcgaaagcctctcagtacagcactcctgttcctctgttaaaactccttgttaatccagtgatcttttaggccaaggaaatattttgtgatggtgttctgggtccatacaccagcaatgaaggagatagatttgtgtacttgtgttttttaatcagcattaacatgggcaggcaccctcatttatagatgtcaggaaacattcagtgaaaaacttgtagaatgggatgtgataacgaggttccagtaatctgagcagtctaacgaggcccacctcctccaccacagaacgtggctatgttccaagtgctactctcactcagcctgttgcggatcttcatggcctcaggagacttgtttctccatgggctcttctggactgcacacttccaccatagcttgctgggttgatctagatgtctgtttgttgtatggaaattttgggggaaaaaatccaaaacacaaactgtgggttgaaatattaaccgtctccttggttccttggtattcaccgtgcctgatctgcacatttcatcgtggctgtttctgtatagcctatactgcattagcccaagagattgttgctttgtaactttttgcactattgttttggctggatttgtattacacacagttttaaaaaaaacaattccacactattctctgccttttttttcctatttatttcttcccgcacaaattccacatagaggccttcccatccagctctacgtgatttggctgcacttgaacactgattgtccatttacagccctcagcaatgtgccttctaaatggcatgacatatgtagatgtgctgcagcgcttgttaatggtcacaataaatgccacttcaccaaggaagtctcagatgaacaattatgaacatccaaattttattggggggcaataatcaactgaattgcaaaatttgggggaaaatggcactatccgtgtacgaatcgaatacaaatcaaagatttgtcacatccctaataaaaacaagatggagatgtctctgcaaccatatttgtaagcta

SEQ ID NO: 365127 - DNA, 2078 bp, Homo sapiens
tgtttatgtgcctttaaaactaatgtgtctgctgttttagtttgacttttcaatttttaaaaaaccaatccccctttatttgtataatttaggaccctttgtgaatcccagtctcagcttatcagcctttacaatttgatctgttaaataatttatatgctcctgaatgtttagcattttttaatgattttaattaaaattccaaaagtaatgggtaagaaaagcaaggaatgtggtcatatcttaattacatagatgtcaaggtatccttaagtgagtttttgtttgtgtgtttaaatcatttcttaggctcagtagaaaagaagcaacagagaagatcaattagaactcgttctgaatcagagaaatccactgaggttgtgccaaagaagaagatcaaaaaggagcaggttgaaacagttcctcaggctacagtgaagactggattacagaaagggtcggcggaccggggagtgcagggctctgtcagattcagtgacagctccgtctccgcagcgattgaggaaactgtggactgagattcctgtacaatttcatcccagaaactccagacttgtagtctccatgcaagatttctttgtcggcggcttgataaacagtttctttgttttcgattttgatttcgccaatcatcattattggcattttcctgcctggtttcttcttcaagactctgaacaattgctttaacagtcaaatgatttttttttttcggtttgagctggatgggtacagcttaaatcatgggtccagcctaaaaaccaccatttaacttacactgatcaatttcaacatggactgtttttggttttttgtttttaaataaagcatcattaatgcacatctgcaggggtttgccaaacagcccaaactgtatacattacaatcattaaaagttcttattttttttaatattagtgccgttatcatggagaacagcatgacagctgtctttggcagtctgtcatttttctagcattttcagaaactcatcggaaatggcggtacctgtgtttcccttcgaaagcctctcagtacagcactcctgttcctctgttaaaactccttgttaatccagtgatcttttaggccaaggaaatattttgtgatggtgttctgggtccatacaccagcaatgaaggagatagatttgtgtacttgtgttttttaatcagcattaacatgggcaggcaccctcatttatagatgtcaggaaacattcagtgaaaaacttgtagaatgggatgtgataacgaggttccagtaatctgagcagtctaacgaggcccacctcctccaccacagaacgtggctatgttccaagtgctactctcactcagcctgttgcggatcttcatggcctcaggagacttgtttctccatgggctcttctggactgcacacttccaccatagcttgctgggttgatctagatgtctgtttgttgtatggaaattttgggggaaaaaatccaaaacacaaactgtgggttgaaatattaaccgtctccttggttccttggtattcaccgtgcctgatctgcacatttcatcgtggctgtttctgtatagcctatactgcattagcccaagagattgttgctttgtaactttttgcactattgttttggctggatttgtattacacacagttttaaaaaaaacaattccacactattctctgccttttttttcctatttatttcttcccgcacaaattccacatagaggccttcccatccagctctacgtgatttggctgcacttgaacactgattgtccatttacagccctcagcaatgtgccttctaaatggcatgacatatgtagatgtgctgcagcgcttgttaatggtcacaataaatgccacttcaccaaggaagtctcagatgaacaattatgaacatccaaattttattggggggcaataatcaactgaattgcaaaatttgggggaaaatggcactatccgtgtacgaatcgaatacaaatcaaagatttgtcacatccctaataaaaacaagatggagatgtctctgcaaccatatttgtaagcta

SEQ ID NO: 365128 - DNA, 1951 bp, Homo sapiens
tgtttatgtgcctttaaaactaatgtgtctgctgttttagtttgacttttcaatttttaaaaaaccaatccccctttatttgtataatttaggaccctttgtgaatcccagtctcagcttatcagcctttacaatttgatctgttaaataatttatatgctcctgaatgtttagcattttttaatgattttaattaaaattccaaaagtaatgggtaagaaaagcaaggaatgtggtcatatcttaattacatagatgtcaaggtatccttaagtgagtttttgtttgtgtgtttaaatcatttcttaggctcagtagaaaagaagcaacagagaagatcaattagaactcgttctgaatcagagaaatccactgaggttgtgccaaagaagaagatcaaaaaggagcaggttgaaacagttcctcaggctacagtgaagactggattacagaaagggtcggcggaccggggagtgcagggctctgtcagattcagtgacagctccgtctccgcagcgattgaggaaactgtggactgagattcctgtacaatttcatcccagaaactccagacttgtagtctccattcaaatgatttttttttttcggtttgagctggatgggtacagcttaaatcatgggtccagcctaaaaaccaccatttaacttacactgatcaatttcaacatggactgtttttggttttttgtttttaaataaagcatcattaatgcacatctgcaggggtttgccaaacagcccaaactgtatacattacaatcattaaaagttcttattttttttaatattagtgccgttatcatggagaacagcatgacagctgtctttggcagtctgtcatttttctagcattttcagaaactcatcggaaatggcggtacctgtgtttcccttcgaaagcctctcagtacagcactcctgttcctctgttaaaactccttgttaatccagtgatcttttaggccaaggaaatattttgtgatggtgttctgggtccatacaccagcaatgaaggagatagatttgtgtacttgtgttttttaatcagcattaacatgggcaggcaccctcatttatagatgtcaggaaacattcagtgaaaaacttgtagaatgggatgtgataacgaggttccagtaatctgagcagtctaacgaggcccacctcctccaccacagaacgtggctatgttccaagtgctactctcactcagcctgttgcggatcttcatggcctcaggagacttgtttctccatgggctcttctggactgcacacttccaccatagcttgctgggttgatctagatgtctgtttgttgtatggaaattttgggggaaaaaatccaaaacacaaactgtgggttgaaatattaaccgtctccttggttccttggtattcaccgtgcctgatctgcacatttcatcgtggctgtttctgtatagcctatactgcattagcccaagagattgttgctttgtaactttttgcactattgttttggctggatttgtattacacacagttttaaaaaaaacaattccacactattctctgccttttttttcctatttatttcttcccgcacaaattccacatagaggccttcccatccagctctacgtgatttggctgcacttgaacactgattgtccatttacagccctcagcaatgtgccttctaaatggcatgacatatgtagatgtgctgcagcgcttgttaatggtcacaataaatgccacttcaccaaggaagtctcagatgaacaattatgaacatccaaattttattggggggcaataatcaactgaattgcaaaatttgggggaaaatggcactatccgtgtacgaatcgaatacaaatcaaagatttgtcacatccctaataaaaacaagatggagatgtctctgcaaccatatttgtaagcta

SEQ ID NO: 365129 - DNA, 1388 bp, Homo sapiens
gatgtttctgggagagacttaatttatgtaaaaggtacttttcttttctttctgaaggaccgtataattgatgccggcccaaaaggaaattattctcgcttcatgaaccacagttgtaatcccaactgtgaaacacaaaagtggacagtgaatggagatgttcgagtgggactatttgctctctgtgatattcctgcagggatggagttaacatttaattataacctagattgtctgggcaacggcagaacggagtgccactgtggagcagataactgcagtggttttctaggagtgcggccaaagtcggcatgtgcgtcaacaaatgaagagaaggcaaaaaatgctaagttaaaacagaagagacgaaagatcaaaacagaaccaaagcagatgcatgaagattactgttttcaatgtggagatggtggagagctggtcatgtgtgacaaaaaagactgtcccaaagcataccacctcctatgccttaacctgactcagccaccatatggaaagtgggagtgtccgtggcatcagtgcgatgagtgcagcagtgcagctgtttccttctgtgaattctgtccacattcattttgtaaagatcatgaaaagggggccctggttccctctgcactggaaggccgcctctgctgctcggaacatgaccccatggctcctgtgtcaccagaatactggagcaagataaaatgtaaatgggaatcacaagatcatggagaagaagtaaaagaataaatgtgtggtgtcccctcctttctatttaagtgaaaaaagcaaatagatcatgcatttaaaaagaagagactgctacagtgcatacagcctttgccatcggaactgccttattaaagcaaaaatgggaaaccagttcatgcaggcagaagcagttggtggtgtctggtttttgtttgatttggttggtttgggattcttttgtggagggttaaattcccttggtcttttcttgccttttattgtgcttcagtgccattgcagcttgaaaaagaaatgtttttgctgttaaaataagaacaaagagaaaagtaagttttgttaatgagataaatttaaagtctaagatgtgttccttggttgtataaagcaaaagtagccatcattcctttatttattttcatttttaggaatttcaagaagtgtagttcaatagtctaatcaagtgtgtgtgtgttttaagtaggaatctgagaaagccctctaggaaagggtatgataagctttatatacctctttactgagcagtaggtaggctcacttctctttcccttcaaaatgcttttcataggcttagagaagggctctatggaagtattaaatctggcctcttgaaaacaatgcctcggtggatttta

SEQ ID NO: 365130 - DNA, 913 bp, Homo sapiens
gcaataacattttattatttttgtaataaaaacaaccactggacaaaatatgaatgattttaaaggaagctcttatggaagcagattgatatgtgtcaggacactgcttattttgcaaacaccagttttaacctgagacgatctctaacttgggaaataaaaaggaatgtcaaaactatttcgtgtgttggtggtgatgataaaatcttgttgccacagttgttgtgaaagtaatcaggagtttcaaacagataagcattgaagataaaaggtatttgccctgtgtcagaattatatcagttatctgttttagaaatatttaatgtctatgcatatctggatatgaaaattgagttcaaaacattttagtttaatcctttttcagttgattagcctctagcctatgagaatagtaacaccttctaatcccctcttttataattttaggcccgatgagagaaagggaaagttaaggatgctggagcagaacaatggatttctctttctctttcatgcaagggatcatgggaaacacaattcagcaaccacctcaactcattgactccgccaacatccgtcaggaggatgcctttgataacaacagtgacattgctgaagatggtggccagacaccatatgaagctactttgcagcaaggctttcagtacccagctacaacagaagatcttcctccactcacaaatgggtatccatcatcaatcagtgtgtatgaaactcaaaccaaataccagtcatataatcagtatcctaatgggtcagccaatggctttggtgcagttagaaactttagccccactgactattatcattcagaaattccaaacacaagaccacatgaaattctggaaaaaccttcccctccacagccaccacctcctccttcggtaccaca

SEQ ID NO: 365131 - DNA, 3401 bp, Homo sapiens
  misc_feature (4)..(4): n is a, c, g, or t
  misc_feature (6)..(6): n is a, c, g, or t
  misc_feature (8)..(8): n is a, c, g, or t
ggcngngncccgagagtcggggtgggggggctttgtgcgcggcggcggcgggagaggcggcggcggcggccagcacggaggcggaggccgggggttagaatggaacaaactgaaggcccgatgagagaaagggaaagttaaggatgctggagcagaacaatggatttctctttctctttcatgcaagggatcatgggaaacacaattcagcaaccacctcaactcattgactccgccaacatccgtcaggaggatgcctttgataacaacagtgacattgctgaagatggtggccagacaccatatgaagctactttgcagcaaggctttcagtacccagctacaacagaagatcttcctccactcacaaatgggtatccatcatcaatcagtgtgtatgaaactcaaaccaaataccagtcatataatcagtatcctaatgggtcagccaatggctttggtgcagttagaaactttagccccactgactattatcattcagaaattccaaacacaagaccacatgaaattctggaaaaaccttcccctccacagccaccacctcctccttcggtaccacaaactgtgattccaaagaagactggctcacctgaaattaaactaaaaataaccaaaactatccagaatggcagggaattgtttgagtcttccctttgtggagaccttttaaatgaagtacaggcaagtgagcacacgaaatcaaagcatgaaagcagaaaagaaaagaggaaaaaaagcaacaagcatgactcatcaagatctgaagagcgcaagtcacacaaaatccccaaattagaaccagaggaacaaaatagaccaaatgagagggttgacactgtatcagaaaaaccaagggaagaaccagtactaaaagaggaagccccagttcagccaatactatcttctgttccaacaacggaagtgtccactggtgttaagtttcaggttggcgatcttgtgtggtccaaggtgggaacctatccttggtggccttgtatggtttcaagtgatccccagcttgaggttcatactaaaattaacacaagaggtgcccgagaatatcatgtccagttttttagcaaccagccagagagggcgtgggttcatgaaaaacgggtacgagagtataaaggtcataaacagtatgaagaattactggctgaggcaaccaaacaagccagcaatcactctgagaaacaaaagattcggaaaccccgacctcagagagaacgtgctcagtgggatattggcattgcccatgcagagaaagcattgaaaatgactcgagaagaaagaatagaacagtatacttttatttacattgataaacagcctgaagaggctttatcccaagcaaaaaagagtgttgcctccaaaaccgaagttaaaaaaacccgacgaccaagatctgtgctgaatactcagccagaacagaccaatgcaggggaggtggcctcctcactctcaagtactgaaattcggagacatagccagaggcggcacacaagtgcggaagaggaagagccaccgcctgttaaaatagcctggaaaactgcggcagcaaggaaatccttaccagcttccattacgatgcacaaagggagcctggatttgcagaagtgtaacatgtctccagttgtgaaaattgaacaagtgtttgctcttcagaatgctacaggggatgggaaatttatcgatcaatttgtttattcaacaaagggaattggtaacaaaacagaaataagtgtcagggggcaagacaggcttataatttctacaccaaaccagagaaatgaaaagccaacgcagagtgtatcatctcctgaagcaacatctggttctacaggctcagtagaaaagaagcaacagagaagatcaattagaactcgttctgaatcagagaaatccactgaggttgtgccaaagaagaagatcaaaaaggagcaggttgaaacagttcctcaggctacagtgaagactggattacagaaagggtcggcggaccggggagtgcagggctctgtcagattcagtgacagctccgtctccgcagcgattgaggaaactgtggactgagattcctgtacaatttcatcccagaaactccagacttgtagtctccatgcaagatttctttgtcggcggcttgataaacagtttctttgttttcgattttgatttcgccaatcatcattattggcattttcctgcctggtttcttcttcaagactctgaacaattgctttaacagtcaaatgatttttttttttcggtttgagctggatgggtacagcttaaatcatgggtccagcctaaaaaccaccatttaacttacactgatcaatttcaacatggactgtttttggttttttgtttttaaataaagcatcattaatgcacatctgcaggggtttgccaaacagcccaaactgtatacattacaatcattaaaagttcttattttttttaatattagtgccgttatcatggagaacagcatgacagctgtctttggcagtctgtcatttttctagcattttcagaaactcatcggaaatggcggtacctgtgtttcccttcgaaagcctctcagtacagcactcctgttcctctgttaaaactccttgttaatccagtgatcttttaggccaaggaaatattttgtgatggtgttctgggtccatacaccagcaatgaaggagatagatttgtgtacttgtgttttttaatcagcattaacatgggcaggcaccctcatttatagatgtcaggaaacattcagtgaaaaacttgtagaatgggatgtgataacgaggttccagtaatctgagcagtctaacgaggcccacctcctccaccacagaacgtggctatgttccaagtgctactctcactcagcctgttgcggatcttcatggcctcaggagacttgtttctccatgggctcttctggactgcacacttccaccatagcttgctgggttgatctagatgtctgtttgttgtatggaaattttgggggaaaaaatccaaaacacaaactgtgggttgaaatattaaccgtctccttggttccttggtattcaccgtgcctgatctgcacatttcatcgtggctgtttctgtatagcctatactgcattagcccaagagattgttgctttgtaactttttgcactattgttttggctggatttgtattacacacagttttaaaaaaaacaattctaaaaaaaaaaaaaaacatgtcggcgccttggccagcgactttactgagcaaggttttgcatgccggcccgaaattgggctcactttggcaatcccctaaaggggtggttacaattatggccgcggtttacaaacgccggatggaaaacctgt

SEQ ID NO: 365132 - DNA, 2874 bp, Homo sapiens
  misc_feature (4)..(4): n is a, c, g, or t
  misc_feature (6)..(6): n is a, c, g, or t
  misc_feature (8)..(8): n is a, c, g, or t
ggcngngncccgagagtcggggtgggggggctttgtgcgcggcggcggcgggagaggcggcggcggcggccagcacggaggcggaggccgagggggctgtgcacaggtcgccgcggagaggcgtgcgaattccgagccgagcgccgaggaccgtgctacccaggccgggctgccagccgcaggctcctctctggcagcagcggcggcgcggcgacccccgtccctcggcctccccttcccatcccacctcccgagccttcctcttcccgcagcacgcccggcccggcccggccgtggccctcctcagtgccggccgccatggcagaggcgtccggcgcggggaaaatctagcccggggatttcatgcggcctagctcggttccgcctcctcctcgcgcggccccagcggctgcccgcaccccagccccactccgggcctccgtgtctctcctgtgatcgcactgacacggccggggggttagaatggaacaaactgaaggcccgatgagagaaagggaaagttaaggatgctggagcagaacaatggatttctctttctctttcatgcaagggatcatgggaaacacaattcagcaaccacctcaactcattgactccgccaacatccgtcaggaggatgcctttgataacaacagtgacattgctgaagatggtggccagacaccatatgaagctactttgcagcaaggctttcagtacccagctacaacagaagatcttcctccactcacaaatgggtatccatcatcaatcagtgtgtatgaaactcaaaccaaataccagtcatataatcagtatcctaatgggtcagccaatggctttggtgcagttagaaactttagccccactgactattatcattcagaaattccaaacacaagaccacatgaaattctggaaaaaccttcccctccacagccaccacctcctccttcggtaccacaaactgtgattccaaagaagactggctcacctgaaattaaactaaaaataaccaaaactatccagaatggcagggaattgtttgagtcttccctttgtggagaccttttaaatgaagtacaggcaagtgagcacacgaaatcaaagcatgaaagcagaaaagaaaagaggaaaaaaagcaacaagcatgactcatcaagatctgaagagcgcaagtcacacaaaatccccaaattagaaccagaggaacaaaatagaccaaatgagagggttgacactgtatcagaaaaaccaagggaagaaccagtactaaaagaggaagccccagttcagccaatactatcttctgttccaacaacggaagtgtccactggtgttaagtttcaggttggcgatcttgtgtggtccaaggtgggaacctatccttggtggccttgtatggtttcaagtgatccccagcttgaggttcatactaaaattaacacaagaggtgcccgagaatatcatgtccagttttttagcaaccagccagagagggcgtgggttcatgaaaaacgggtacgagagtataaaggtcataaacagtatgaagaattactggctgaggcaaccaaacaagccagcaatcactctgagaaacaaaagattcggaaaccccgacctcagagagaacgtgctcagtgggatattggcattgcccatgcagagaaagcattgaaaatgactcgagaagaaagaatagaacagtatacttttatttacattgataaacagcctgaagaggctttatcccaagcaaaaaagagtgttgcctccaaaaccgaagttaaaaaaacccgacgaccaagatctgtgctgaatactcagccagaacagaccaatgcaggggaggtggcctcctcactctcaagtactgaaattcggagacatagccagaggcggcacacaagtgcggaagaggaagagccaccgcctgttaaaatagcctggaaaactgcggcagcaaggaaatccttaccagcttccattacgatgcacaaagggagcctggatttgcagaagtgtaacatgtctccagttgtgaaaattgaacaagtgtttgctcttcagaatgctacaggggatgggaaatttatcgatcaatttgtttattcaacaaagggaattggtaacaaaacagaaataagtgtcagggggcaagacaggcttataatttctacaccaaaccagagaaatgaaaagccaacgcagagtgtatcatctcctgaagcaacatctggttctacaggctcagtagaaaagaagcaacagagaagatcaattagaactcgttctgaatcagagaaatccactgaggttgtgccaaagaagaagatcaaaaaggagcaggttgaaacagttcctcaggctacagtgaagactggattacagaaagggtcggcggaccggggagtgcagggctctgtcagattcagtgacagctccgtctccgcagcgattgaggaaactgtggactgagattcctgtacaatttcatcccagaaactccagacttgtagtctccatgcaagatttctttgtcggcggcttgataaacagtttctttgttttcgattttgatttcgccaatcatcattattggcattttcctgcctggtttcttcttcaagactctgaacaattgctttaacagtcaaatgatttttttttttcggtttgagctggatgggtacagcttaaatcatgggtccagcctaaaaaccaccatttaacttacactgatcaatttcaacatggactgtttttggttttttgtttttaaataaagcatcattaatgcacatctgcaggggtttgccaaacagcccaaactgtatacattacaatcattaaaagttcttatttttttta

SEQ ID NO: 365133 - DNA, 4064 bp, Homo sapiens
  misc_feature (4)..(4): n is a, c, g, or t
  misc_feature (6)..(6): n is a, c, g, or t
  misc_feature (8)..(8): n is a, c, g, or t
ggcngngncccgagagtcggggtgggggggctttgtgcgcggcggcggcgggagaggcggcggcggcggccagcacggaggcggaggccgagggggctgtgcacaggtcgccgcggagaggcgtgcgaattccgagccgagcgccgaggaccgtgctacccaggccgggctgccagccgcaggctcctctctggcagcagcggcggcgcggcgacccccgtccctcggcctccccttcccattccgcgaccgtccccggatgcgctatccgtcgtttcgccctgcattgcaacttgcccctggggcccgcgtgtgctcactggtgcccgtgttgtgccccgtccgtcatgttgccggccgccatggcagaggcgtccggcgcggggaaaatctagcccggggatttcatgcggcctagctcggttccgcctcctcctcgcgcggccccagcggctgcccgcaccccagccccactccgggcctccgtgtctctcctgtgatcgcactgacacggccggggggttagaatggaacaaactgaaggcccgatgagagaaagggaaagttaaggatgctggagcagaacaatggatttctctttctctttcatgcaagggatcatgggaaacacaattcagcaaccacctcaactcattgactccgccaacatccgtcaggaggatgcctttgataacaacagtgacattgctgaagatggtggccagacaccatatgaagctactttgcagcaaggctttcagtacccagctacaacagaagatcttcctccactcacaaatgggtatccatcatcaatcagtgtgtatgaaactcaaaccaaataccagtcatataatcagtatcctaatgggtcagccaatggctttggtgcagttagaaactttagccccactgactattatcattcagaaattccaaacacaagaccacatgaaattctggaaaaaccttcccctccacagccaccacctcctccttcggtaccacaaactgtgattccaaagaagactggctcacctgaaattaaactaaaaataaccaaaactatccagaatggcagggaattgtttgagtcttccctttgtggagaccttttaaatgaagtacaggcaagtgagcacacgaaatcaaagcatgaaagcagaaaagaaaagaggaaaaaaagcaacaagcatgactcatcaagatctgaagagcgcaagtcacacaaaatccccaaattagaaccagaggaacaaaatagaccaaatgagagggttgacactgtatcagaaaaaccaagggaagaaccagtactaaaagaggaagccccagttcagccaatactatcttctgttccaacaacggaagtgtccactggtgttaagtttcaggttggcgatcttgtgtggtccaaggtgggaacctatccttggtggccttgtatggtttcaagtgatccccagcttgaggttcatactaaaattaacacaagaggtgcccgagaatatcatgtccagttttttagcaaccagccagagagggcgtgggttcatgaaaaacgggtacgagagtataaaggtcataaacagtatgaagaattactggctgaggcaaccaaacaagccagcaatcactctgagaaacaaaagattcggaaaccccgacctcagagagaacgtgctcagtgggatattggcattgcccatgcagagaaagcattgaaaatgactcgagaagaaagaatagaacagtatacttttatttacattgataaacagcctgaagaggctttatcccaagcaaaaaagagtgttgcctccaaaaccgaagttaaaaaaacccgacgaccaagatctgtgctgaatactcagccagaacagaccaatgcaggggaggtggcctcctcactctcaagtactgaaattcggagacatagccagaggcggcacacaagtgcggaagaggaagagccaccgcctgttaaaatagcctggaaaactgcggcagcaaggaaatccttaccagcttccattacgatgcacaaagggagcctggatttgcagaagtgtaacatgtctccagttgtgaaaattgaacaagtgtttgctcttcagaatgctacaggggatgggaaatttatcgatcaatttgtttattcaacaaagggaattggtaacaaaacagaaataagtgtcagggggcaagacaggcttataatttctacaccaaaccagagaaatgaaaagccaacgcagagtgtatcatctcctgaagcaacatctggttctacaggctcagtagaaaagaagcaacagagaagatcaattagaactcgttctgaatcagagaaatccactgaggttgtgccaaagaagaagatcaaaaaggagcaggttgaaacagttcctcaggctacagtgaagactggattacagaaagggtcggcggaccggggagtgcagggctctgtcagattcagtgacagctccgtctccgcagcgattgaggaaactgtggactgagattcctgtacaatttcatcccagaaactccagacttgtagtctccatgcaagatttctttgtcggcggcttgataaacagtttctttgttttcgattttgatttcgccaatcatcattattggcattttcctgcctggtttcttcttcaagactctgaacaattgctttaacagtcaaatgatttttttttttcggtttgagctggatgggtacagcttaaatcatgggtccagcctaaaaaccaccatttaacttacactgatcaatttcaacatggactgtttttggttttttgtttttaaataaagcatcattaatgcacatctgcaggggtttgccaaacagcccaaactgtatacattacaatcattaaaagttcttattttttttaatattagtgccgttatcatggagaacagcatgacagctgtctttggcagtctgtcatttttctagcattttcagaaactcatcggaaatggcggtacctgtgtttcccttcgaaagcctctcagtacagcactcctgttcctctgttaaaactccttgttaatccagtgatcttttaggccaaggaaatattttgtgatggtgttctgggtccatacaccagcaatgaaggagatagatttgtgtacttgtgttttttaatcagcattaacatgggcaggcaccctcatttatagatgtcaggaaacattcagtgaaaaacttgtagaatgggatgtgataacgaggttccagtaatctgagcagtctaacgaggcccacctcctccaccacagaacgtggctatgttccaagtgctactctcactcagcctgttgcggatcttcatggcctcaggagacttgtttctccatgggctcttctggactgcacacttccaccatagcttgctgggttgatctagatgtctgtttgttgtatggaaattttgggggaaaaaatccaaaacacaaactgtgggttgaaatattaaccgtctccttggttccttggtattcaccgtgcctgatctgcacatttcatcgtggctgtttctgtatagcctatactgcattagcccaagagattgttgctttgtaactttttgcactattgttttggctggatttgtattacacacagttttaaaaaaaacaattccacactattctctgccttttttttcctatttatttcttcccgcacaaattccacatagaggccttcccatccagctctacgtgatttggctgcacttgaacactgattgtccatttacagccctcagcaatgtgccttctaaatggcatgacatatgtagatgtgctgcagcgcttgttaatggtcacaataaatgccacttcaccaaggaagtctcagatgaacaattatgaacatccaaattttattggggggcaataatcaactgaattgcaaaatttgggggaaaatggcactatccgtgtacgaatcgaatacaaatcaaagatttgtcacatccctaataaaaacaagatggagatgtctctgcaaccatatttgtaagcta

SEQ ID NO: 365134 - DNA, 3285 bp, Homo sapiens
  misc_feature (2)..(2): n is a, c, g, or t
gntattatttaataaaggagatctgggatgggctggtggggtgtgtatgaaactcaaaccaaataccagtcatataatcagtatcctaatgggtcagccaatggctttggtgcagttagaaactttagccccactgactattatcattcagaaattccaaacacaagaccacatgaaattctggaaaaaccttcccctccacagccaccacctcctccttcggtaccacaaactgtgattccaaagaagactggctcacctgaaattaaactaaaaataaccaaaactatccagaatggcagggaattgtttgagtcttccctttgtggagaccttttaaatgaagtacaggcaagtgagcacacgaaatcaaagcatgaaagcagaaaagaaaagaggaaaaaaagcaacaagcatgactcatcaagatctgaagagcgcaagtcacacaaaatccccaaattagaaccagaggaacaaaatagaccaaatgagagggttgacactgtatcagaaaaaccaagggaagaaccagtactaaaagaggaagccccagttcagccaatactatcttctgttccaacaacggaagtgtccactggtgttaagtttcaggttggcgatcttgtgtggtccaaggtgggaacctatccttggtggccttgtatggtttcaagtgatccccagcttgaggttcatactaaaattaacacaagaggtgcccgagaatatcatgtccagttttttagcaaccagccagagagggcgtgggttcatgaaaaacgggtacgagagtataaaggtcataaacagtatgaagaattactggctgaggcaaccaaacaagccagcaatcactctgagaaacaaaagattcggaaaccccgacctcagagagaacgtgctcagtgggatattggcattgcccatgcagagaaagcattgaaaatgactcgagaagaaagaatagaacagtatacttttatttacattgataaacagcctgaagaggctttatcccaagcaaaaaagagtgttgcctccaaaaccgaagttaaaaaaacccgacgaccaagatctgtgctgaatactcagccagaacagaccaatgcaggggaggtggcctcctcactctcaagtactgaaattcggagacatagccagaggcggcacacaagtgcggaagaggaagagccaccgcctgttaaaatagcctggaaaactgcggcagcaaggaaatccttaccagcttccattacgatgcacaaagggagcctggatttgcagaagtgtaacatgtctccagttgtgaaaattgaacaagtgtttgctcttcagaatgctacaggggatgggaaatttatcgatcaatttgtttattcaacaaagggaattggtaacaaaacagaaataagtgtcagggggcaagacaggcttataatttctacaccaaaccagagaaatgaaaagccaacgcagagtgtatcatctcctgaagcaacatctggttctacaggctcagtagaaaagaagcaacagagaagatcaattagaactcgttctgaatcagagaaatccactgaggttgtgccaaagaagaagatcaaaaaggagcaggttgaaacagttcctcaggctacagtgaagactggattacagaaagggtcggcggaccggggagtgcagggctctgtcagattcagtgacagctccgtctccgcagcgattgaggaaactgtggactgagattcctgtacaatttcatcccagaaactccagacttgtagtctccatgcaagatttctttgtcggcggcttgataaacagtttctttgttttcgattttgatttcgccaatcatcattattggcattttcctgcctggtttcttcttcaagactctgaacaattgctttaacagtcaaatgatttttttttttcggtttgagctggatgggtacagcttaaatcatgggtccagcctaaaaaccaccatttaacttacactgatcaatttcaacatggactgtttttggttttttgtttttaaataaagcatcattaatgcacatctgcaggggtttgccaaacagcccaaactgtatacattacaatcattaaaagttcttattttttttaatattagtgccgttatcatggagaacagcatgacagctgtctttggcagtctgtcatttttctagcattttcagaaactcatcggaaatggcggtacctgtgtttcccttcgaaagcctctcagtacagcactcctgttcctctgttaaaactccttgttaatccagtgatcttttaggccaaggaaatattttgtgatggtgttctgggtccatacaccagcaatgaaggagatagatttgtgtacttgtgttttttaatcagcattaacatgggcaggcaccctcatttatagatgtcaggaaacattcagtgaaaaacttgtagaatgggatgtgataacgaggttccagtaatctgagcagtctaacgaggcccacctcctccaccacagaacgtggctatgttccaagtgctactctcactcagcctgttgcggatcttcatggcctcaggagacttgtttctccatgggctcttctggactgcacacttccaccatagcttgctgggttgatctagatgtctgtttgttgtatggaaattttgggggaaaaaatccaaaacacaaactgtgggttgaaatattaaccgtctccttggttccttggtattcaccgtgcctgatctgcacatttcatcgtggctgtttctgtatagcctatactgcattagcccaagagattgttgctttgtaactttttgcactattgttttggctggatttgtattacacacagttttaaaaaaaacaattccacactattctctgccttttttttcctatttatttcttcccgcacaaattccacatagaggccttcccatccagctctacgtgatttggctgcacttgaacactgattgtccatttacagccctcagcaatgtgccttctaaatggcatgacatatgtagatgtgctgcagcgcttgttaatggtcacaataaatgccacttcaccaaggaagtctcagatgaacaattatgaacatccaaattttattggggggcaataatcaactgaattgcaaaatttgggggaaaatggcactatccgtgtacgaatcgaatacaaatcaaagatttgtcacatccctaataaaaacaagatggagatgtctctgcaaccatatttgtaagcta

SEQ ID NO: 365135 - DNA, 3681 bp, Homo sapiens
  misc_feature (4)..(4): n is a, c, g, or t
  misc_feature (6)..(6): n is a, c, g, or t
  misc_feature (8)..(8): n is a, c, g, or t
ggcngngncccgagagtcggggtgggggggctttgtgcgcggcggcggcgggagaggcggcggcggcggccagcacggaggcggaggccgagggggctgtgcacaggtcgccgcggagaggcgtgcgaattccgagccgagcgccgaggaccgtgctacccaggccgggctgccagccgcaggctcctctctggcagcagcggcggcgcggcgacccccgtccctcggcctccccttcccatcccacctcccgagccttcctcttcccgcagcacgcccggcccggcccggccgtggccctcctcagtgccggccgccatggcagaggcgtccggcgcggggaaaatctagcccggggatttcatgcggcctagctcggttccgcctcctcctcgcgcggccccagcggctgcccgcaccccagccccactccgggcctccgtgtctctcctgtgatcgcactgacacggccggggggttagaatggaacaaactgaaggcccgatgagagaaagggaaagttaaggatgctggagcagaacaatggatttctctttctctttcatgcaagggatcatgggaaacacaattcagcaaccacctcaactcattgactccgccaacatccgtcaggaggatgcctttgataacaacagtgacattgctgaagatggtggccagacaccatatgaagctactttgcagcaaggctttcagtacccagctacaacagaagatcttcctccactcacaaatgggtatccatcatcaatcagtgtgtatgaaactcaaaccaaataccagtcatataatcagtatcctaatgggtcagccaatggctttggtgcagttagaaactttagccccactgactattatcattcagaaattccaaacacaagaccacatgaaattctggaaaaaccttcccctccacagccaccacctcctccttcggtaccacaaactgtgattccaaagaagactggctcacctgaaattaaactaaaaataaccaaaactatccagaatggcagggaattgtttgagtcttccctttgtggagaccttttaaatgaagtacaggcaagtgagcacacgaaatcaaagcatgaaagcagaaaagaaaagaggaaaaaaagcaacaagcatgactcatcaagatctgaagagcgcaagtcacacaaaatccccaaattagaaccagaggaacaaaatagaccaaatgagagggttgacactgtatcagaaaaaccaagggaagaaccagtactaaaagaggaagccccagttcagccaatactatcttctgttccaacaacggaagtgtccactggtgttaagtttcaggttggcgatcttgtgtggtccaaggtgggaacctatccttggtggccttgtatggtttcaagtgatccccagcttgaggttcatactaaaattaacacaagaggtgcccgagaatatcatgtccagttttttagcaaccagccagagagggcgtgggttcatgaaaaacgggtacgagagtataaaggtcataaacagtatgaagaattactggctgaggcaaccaaacaagccagcaatcactctgagaaacaaaagattcggaaaccccgacctcagagagaacgtgctcagtgggatattggcattgcccatgcagagaaagcattgaaaatgactcgagaagaaagaatagaacagtatacttttatttacattgataaacagcctgaagaggctttatcccaagcaaaaaagagtgttgcctccaaaaccgaagttaaaaaaacccgacgaccaagatctgtgctgaatactcagccagaacagaccaatgcaggggaggtggcctcctcactctcaagtactgaaattcggagacatagccagaggcggcacacaagtgcggaagaggaagagccaccgcctgttaaaatagcctggaaaactgcggcagcaaggaaatccttaccagcttccattacgatgcacaaagggagcctggatttgcagaagtgtaacatgtctccagttgtgaaaattgaacaagtgtttgctcttcagaatgctacaggggatgggaaatttatcgatcaatttgtttattcaacaaagggaattggtaacaaaacagaaataagtgtcagggggcaagacaggcttataatttctacaccaaaccagagaaatgaaaagccaacgcagagtgtatcatctcctgaagcaacatctggttctacaggctcagtagaaaagaagcaacagagaagatcaattagaactcgttctgaatcagagaaatccactgaggttgtgccaaagaagaagatcaaaaaggagcaggttggcttcctacatgtagagagttaaaacattgtatttgtaaatgttgtggcttacattcctgtcttaaaagaaagagaaactttcccccacactgagtttcctttctggactatcttaacgcttctgtcctggtgggttccagtgctcagttttaatacagccatccctgtgattctgcttcaagcattttcacagaaaacaggtttcaggagatgggaagccagtggtgcaagacttaaaaaatccttcacatttatttagaagtttctgttatcagcagaatgatttcatgtttttatgatttttatttggaaccatcattgagttccttttttttttttaagttggattttgggtttaagctggctggtatatattgttttttattttttaaacaaatcaatttaatttatattcttatatttaagaagcagatattcatagatgatctgttttttctggttaatatcgcagattttttggaatgttattttcccagtggaatattcacctgatatcaggttgtcagataaataatatttaggtaaaaaaaggtgtgtgggggggttgcattttgactgaagtgtattaaaccagtgtaatcaatgtagtaagatacatttaaatcaacttttcaaataaaattttagaagccattcttctttaaattaaactcacaatcagattttttcttaatttttttgttaaagaatatccattcttacagcctaaacacctgctagcaaacaaaacaaattctgaatagaattagttccaataagttttatattttttaaaccatttatatggaagaatgtgagcttttctatttaaaatatttccttcatgattttaaacttccaaatttaaaagctaactttgtgggtgctctgtggtatcaccaagcaagtgaaacagtttttccagaatatttaactaaaatttaaatagtatactaatttgtcattcatttatcatattaactttcatatttcatacttaggaaattatattccaaaaaatctttctaagctcttgaaaatctatagttattcattaccaaaatgaagttgtgattttgccagctggttcccaaaatcagtctgtgaccagtcagttttaaactaataagcagaatgagtataaaaagtgggacaaattgttaatgccactgtgttatagttagtagtagaacaataccagtgattgtttagaagattttatatttgtattactaattgtatcttataaaagcgtttctgttgtatgtttttttacctgttgtaaaaaaaataaaattttttttaaaaagcttagaacaatcct

SEQ ID NO: 365136 - DNA, 4296 bp, Homo sapiens
  misc_feature (4)..(4): n is a, c, g, or t
  misc_feature (6)..(6): n is a, c, g, or t
  misc_feature (8)..(8): n is a, c, g, or t
ggcngngncccgagagtcggggtgggggggctttgtgcgcggcggcggcgggagaggcggcggcggcggccagcacggaggcggaggccgagggggctgtgcacaggtcgccgcggagaggcgtgcgaattccgagccgagcgccgaggaccgtgctacccaggccgggctgccagccgcaggctcctctctggcagcagcggcggcgcggcgacccccgtccctcggcctccccttcccatcccacctcccgagccttcctcttcccgcagcacgcccggcccggcccggccgtggccctcctcagtgccggccgccatggcagaggcgtccggcgcggggaaaatctagcccggggatttcatgcggcctagctcggttccgcctcctcctcgcgcggccccagcggctgcccgcaccccagccccactccgggcctccgtgtctctcctgtgatcgcactgacacggccggggggttagaatggaacaaactgaaggcccgatgagagaaagggaaagttaaggatgctggagcagaacaatggatttctctttctctttcatgcaagggatcatgggaaacacaattcagcaaccacctcaactcattgactccgccaacatccgtcaggaggatgcctttgataacaacagtgacattgctgaagatggtggccagacaccatatgaagctactttgcagcaaggctttcagtacccagctacaacagaagatcttcctccactcacaaatgggtatccatcatcaatcagtgtgtatgaaactcaaaccaaataccagtcatataatcagtatcctaatgggtcagccaatggctttggtgcagttagaaactttagccccactgactattatcattcagaaattccaaacacaagaccacatgaaattctggaaaaaccttcccctccacagccaccacctcctccttcggtaccacaaactgtgattccaaagaagactggctcacctgaaattaaactaaaaataaccaaaactatccagaatggcagggaattgtttgagtcttccctttgtggagaccttttaaatgaagtacaggcaagtgagcacacgaaatcaaagcatgaaagcagaaaagaaaagaggaaaaaaagcaacaagcatgactcatcaagatctgaagagcgcaagtcacacaaaatccccaaattagaaccagaggaacaaaatagaccaaatgagagggttgacactgtatcagaaaaaccaagggaagaaccagtactaaaagaggaagccccagttcagccaatactatcttctgttccaacaacggaagtgtccactggtgttaagtttcaggttggcgatcttgtgtggtccaaggtgggaacctatccttggtggccttgtatggtttcaagtgatccccagcttgaggttcatactaaaattaacacaagaggtgcccgagaatatcatgtccagttttttagcaaccagccagagagggcgtgggttcatgaaaaacgggtacgagagtataaaggtcataaacagtatgaagaattactggctgaggcaaccaaacaagccagcaatcactctgagaaacaaaagattcggaaaccccgacctcagagagaacgtgctcagtgggatattggcattgcccatgcagagaaagcattgaaaatgactcgagaagaaagaatagaacagtatacttttatttacattgataaacagcctgaagaggctttatcccaagcaaaaaagagtgttgcctccaaaaccgaagttaaaaaaacccgacgaccaagatctgtgctgaatactcagccagaacagaccaatgcaggggaggtggcctcctcactctcaagtactgaaattcggagacatagccagaggcggcacacaagtgcggaagaggaagagccaccgcctgttaaaatagcctggaaaactgcggcagcaaggaaatccttaccagcttccattacgatgcacaaagggagcctggatttgcagaagtgtaacatgtctccagttgtgaaaattgaacaagtgtttgctcttcagaatgctacaggggatgggaaatttatcgatcaatttgtttattcaacaaagggaattggtaacaaaacagaaataagtgtcagggggcaagacaggcttataatttctacaccaaaccagagaaatgaaaagccaacgcagagtgtatcatctcctgaagcaacatctggttctacaggctcagtagaaaagaagcaacagagaagatcaattagaactcgttctgaatcagagaaatccactgaggttgtgccaaagaagaagatcaaaaaggagcaggttgaaacagttcctcaggctacagtgaagactggattacagaaaggtgccagcgagatttcagattcctgtaaacctctaaagaaaaggagtcgcgcctcaactgatgtagaaatgactagttcagcatacagagacacatctgactccgattctagaggactgagtgacctgcaggtaggctttggaaagcaagtagatagcccttcagctactgcagatgcagacgtttctgatgtgcagtccatggattcaagtttgtcgagaagaggcactggaatgagtaagaaggacactgtatgtcagatttgtgaaagctctggtgactctctgattccttgtgagggagagtgctgcaaacactttcacctggagtgcctgggattggcatcacttcctgatagcaagttcatctgcatggaatgtaaaactgggcagcacccatgtttttcgtgtaaagtgtctggtaaagatgtgaagcgttgttctgttggtgcttgtgggaaattttatcatgaagcctgtgtccgcaaattccccactgccatctttgaatcaaaaggattccgctgtcctcagcactgctgctctgcctgctctatggagaaagatatccacaaagcaagtaaaggccgcatgatgagatgtttaagatgtccagttgcctatcactctggagatgcttgcattgcggccggaagcatgttagtatcctcctacattctcatctgtagtaatcattccaaacggagcagtaattcttctgctgtaaatgtaggcttttgtttcgtttgtgccagagggctgatagttcaggaccattcagaccccatgttcagttcatatgcctataagtcccactacctactgaatgaatcaaatcgtgctgagttgatgaaattacctatgattccttcttcgtcagcttccaaaaagaaatgtgagaaaggtggaagattgctctgctgtgaatcgtgcccagcttccttccacccggaatgcctaagcatagaaatgccagaaggctgctggaattgtaatgactgtaaagctggcaagaaactacattacaagcagattgtttgggtcaaattgggaaattacagatggtggccagcagagatctgcaaccccaggtctgtgccactgaacatccagggccttaaacatgacttgggggacttccctgtattcttctttggttctcatgactactactgggtacaccagggcagagtgttcccttatgttgaaggagacaaaagctttgctgaagggcagactagtattaacaagaccttcaaaaaggcactggaagaagctgcaaaacgtttccaggaattgaaagcacaaagagaaagtaaagaagccctagagattgaaaaaaactcaagaaaaccccctccctacaaacacatcaaagctaacaaagtaataggaaaggtgcagatccaggttgctgacctgtcagagattccccgctgtaactgcaagccagctgatgaaaacccttgtggcttggaatcggagtgcctgaacagaatgttgcagtatgaatgccacccgcaggtgtgcccagctggagatcgttgtcagaaccagtgctttacaaagagactataccctgatgcagagatcatcaaaacggagcggagaggctggggcctcaggaccaaaaggagcattaagaagggtgaatttgtaaatgaatacgtcggtgaattaattgatgaagaagaatgcagattgcgaatcaagcgagcccacgagaacagtgaccgtataattgatgccggcccaaaaggaaattattctcgcttcatgaaccacagttgtaatcccaactgtgaaacacaaaagtggacagtgaatggagatgttcgagtgggactatttgctctctgtgatattcctgcagatagaaaaagtgactcgttccccatg

SEQ ID NO: 365137 - DNA, 2579 bp, Homo sapiens
cttttttctagataacagttgagtttgagtttggttcctttttttttgtcaagtgtgttactcaattttgaaaactgttagtcctagccagatcctaagaggcaagcaattagagtaatggaacaaagtaacagatggctactttggggcctccattatcagcctttaaaaagaaaaaaagatctacttcaagaaaaacaaggcagggcacagtgcctcatgcctgtaatcccagcactttgggaggccaaggtgggtggatcacctgaggttaggagttcaagaccagcctggccaatatggtgaaaccccatatctaaaaaaagagtgttgcctccaaaaccgaagttaaaaaaacccgacgaccaagatctgtgctgaatactcagccagaacagaccaatgcaggggaggtggcctcctcactctcaagtactgaaattcggagacatagccagaggcggcacacaagtgcggaagaggaagagccaccgcctgttaaaatagcctggaaaactgcggcagcaaggaaatccttaccagcttccattacgatgcacaaagggagcctggatttgcagaagtgtaacatgtctccagttgtgaaaattgaacaagtgtttgctcttcagaatgctacaggggatgggaaatttatcgatcaatttgtttattcaacaaagggaattggtaacaaaacagaaataagtgtcagggggcaagacaggcttataatttctacaccaaaccagagaaatgaaaagccaacgcagagtgtatcatctcctgaagcaacatctggttctacaggctcagtagaaaagaagcaacagagaagatcaattagaactcgttctgaatcagagaaatccactgaggttgtgccaaagaagaagatcaaaaaggagcaggttgaaacagttcctcaggctacagtgaagactggattacagaaagggtcggcggaccggggagtgcagggctctgtcagattcagtgacagctccgtctccgcagcgattgaggaaactgtggactgagattcctgtacaatttcatcccagaaactccagacttgtagtctccatgcaagatttctttgtcggcggcttgataaacagtttctttgttttcgattttgatttcgccaatcatcattattggcattttcctgcctggtttcttcttcaagactctgaacaattgctttaacagtcaaatgatttttttttttcggtttgagctggatgggtacagcttaaatcatgggtccagcctaaaaaccaccatttaacttacactgatcaatttcaacatggactgtttttggttttttgtttttaaataaagcatcattaatgcacatctgcaggggtttgccaaacagcccaaactgtatacattacaatcattaaaagttcttattttttttaatattagtgccgttatcatggagaacagcatgacagctgtctttggcagtctgtcatttttctagcattttcagaaactcatcggaaatggcggtacctgtgtttcccttcgaaagcctctcagtacagcactcctgttcctctgttaaaactccttgttaatccagtgatcttttaggccaaggaaatattttgtgatggtgttctgggtccatacaccagcaatgaaggagatagatttgtgtacttgtgttttttaatcagcattaacatgggcaggcaccctcatttatagatgtcaggaaacattcagtgaaaaacttgtagaatgggatgtgataacgaggttccagtaatctgagcagtctaacgaggcccacctcctccaccacagaacgtggctatgttccaagtgctactctcactcagcctgttgcggatcttcatggcctcaggagacttgtttctccatgggctcttctggactgcacacttccaccatagcttgctgggttgatctagatgtctgtttgttgtatggaaattttgggggaaaaaatccaaaacacaaactgtgggttgaaatattaaccgtctccttggttccttggtattcaccgtgcctgatctgcacatttcatcgtggctgtttctgtatagcctatactgcattagcccaagagattgttgctttgtaactttttgcactattgttttggctggatttgtattacacacagttttaaaaaaaacaattccacactattctctgccttttttttcctatttatttcttcccgcacaaattccacatagaggccttcccatccagctctacgtgatttggctgcacttgaacactgattgtccatttacagccctcagcaatgtgccttctaaatggcatgacatatgtagatgtgctgcagcgcttgttaatggtcacaataaatgccacttcaccaaggaagtctcagatgaacaattatgaacatccaaattttattggggggcaataatcaactgaattgcaaaatttgggggaaaatggcactatccgtgtacgaatcgaatacaaatcaaagatttgtcacatccctaataaaaacaagatggagatgtctctgcaaccatatttgtaagcta

SEQ ID NO: 365138 - DNA, 2072 bp, Homo sapiens
tgccaatcttgtaaatagtggttttttgtttcgtttttgccctcttgatctaaaattgcttttgttttcagatggtggccagcagagatctgcaaccccaggtctgtgccactgaacatccagggccttaaacatgacttgggggacttccctgtattcttctttggttctcatgactactactgggtacaccagggcagagtgttcccttatgttgaaggagacaaaagctttgctgaagggcagactagtattaacaagaccttcaaaaaggcactggaagaagctgcaaaacgtttccaggaattgaaagcacaaagagaaagtaaagaagccctagagattgaaaaaaactcaagaaaaccccctccctacaaacacatcaaagctaacaaagtaataggaaaggtgcagatccaggttgctgacctgtcagagattccccgctgtaactgcaagccagctgatgaaaacccttgtggcttggaatcggagtgcctgaacagaatgttgcagtatgaatgccacccgcaggtgtgcccagctggagatcgttgtcagaaccagtgctttacaaagagactataccctgatgcagagatcatcaaaacggagcggagaggctggggcctcaggaccaaaaggagcattaagaagggtgaatttgtaaatgaatacgtcggtgaattaattgatgaagaagaatgcagattgcgaatcaagcgagcccacgagaacagtgaccgtataattgatgccggcccaaaaggaaattattctcgcttcatgaaccacagttgtaatcccaactgtgaaacacaaaagtggacagtgaatggagatgttcgagtgggactatttgctctctgtgatattcctgcagggatggagttaacatttaattataacctagattgtctgggcaacggcagaacggagtgccactgtggagcagataactgcagtggttttctaggagtgcggccaaagtcggcatgtgcgtcaacaaatgaagagaaggcaaaaaatgctaagttaaaacagaagagacgaaagatcaaaacagaaccaaagcagatgcatgaagattactgttttcaatgtggagatggtggagagctggtcatgtgtgacaaaaaagactgtcccaaagcataccacctcctatgccttaacctgactcagccaccatatggaaagtgggagtgtccgtggcatcagtgcgatgagtgcagcagtgcagctgtttccttctgtgaattctgtccacattcattttgtaaagatcatgaaaagggggccctggttccctctgcactggaaggccgcctctgctgctcggaacatgaccccatggctcctgtgtcaccagaatactggagcaagataaaatgtaaatgggaatcacaagatcatggagaagaagtaaaagaataaatgtgtggtgtcccctcctttctatttaagtgaaaaaagcaaatagatcatgcatttaaaaagaagagactgctacagtgcatacagcctttgccatcggaactgccttattaaagcaaaaatgggaaaccagttcatgcaggcagaagcagttggtggtgtctggtttttgtttgatttggttggtttgggattcttttgtggagggttaaattcccttggtcttttcttgccttttattgtgcttcagtgccattgcagcttgaaaaagaaatgtttttgctgttaaaataagaacaaagagaaaagtaagttttgttaatgagataaatttaaagtctaagatgtgttccttggttgtataaagcaaaagtagccatcattcctttatttattttcatttttaggaatttcaagaagtgtagttcaatagtctaatcaagtgtgtgtgtgttttaagtaggaatctgagaaagccctctaggaaagggtatgataagctttatatacctctttactgagcagtaggtaggctcacttctctttcccttcaaaatgcttttcataggcttagagaagggctctatggaagtattaaatctggcctcttgaaaacaatgcctcggtggatttta

SEQ ID NO: 365139 - DNA, 707 bp, Homo sapiens
ggctgatagttcaggaccattcagaccccatgttcagttcatatgcctataagtcccactacctactgaatgaatcaaatcgtgctgagttgatgaaattacctatgattccttcttcgtcagcttccaaaaagaaatgtgagaaaggtaataatcaaaatagtttctcttgcttttatttttgcatttcctatttttttctctttcaatataggggggaaatgtatgcctgtcaagcaccatctgttgcttttggtaaattctgccttggtggttgtgactgtttcttcatatggctgcacaattattaaaaagggcttaaaataattccattgttgcacatttttacatactcttcccttgaataaatttttacacattccatatttataagttattaaaataggaagactaggattttggtcagtataaatatagaatcatattctaaatgttctttctctttttcctggtgtgaaactatcattcaagttggaatagaaaagatagggtataatttgttactaactttcaactaaataacaaggtaggttattaaaagagggaaactaagatactgatacttgaaagtttgcttttagaatatgttctgtcattgggcttcttaaatgtttggttaagatgctatgaaaactagttgcccttcccttaggagacattggtgggaagctggttggggagaatac

SEQ ID NO: 365140 - DNA, 1840 bp, Homo sapiens
cctggaatcaagcctcctacgtctgcctcccaaagttttgggattacaggtgtgagccaccacacccagccctgatctgttcttgaatcagttaaagccctcacactcccagaaggccgccagccaatgcacctgttggaactttgcacacagggtgtcttctcccttcaagcttggtctgcagctcagtaacaaatgggctacagacaccaggggcttgcccatgggagccccaaggcctaaagagggtggcagagatttgatgtctgtcactctccacctgcagcctcagtccacggtcggccaggcaccaagagctcacactttgccctcctaaatgccaggcccttcataagtatcatctcattgttaagagcggaggcttcagcgccagacaaatgcgagtttgtgtacaactcaaccacgtgctggtgggagagtcaccatctctgagcagacctgtgactcctgttccaaatggacgaggaaccactgcgatgatgtgttaggactcccagcctgccagaacctcacagcccctggcccttcacagcaaagttgaccgcagtgagcattccatccaccagtcagaacaccctggacgctgagcggccttctctgaaagcctggtgcctttgttagccctgggtgactcctgtgatcccagccaccaggttgtcactatagacctaatttaaccatctgtcctcagtaccgagggctcaacatttggaatgggaggtggttctgggagccaattagaggccaggctttgggaggtggcagaggtgagtctcacacctgggctctgtctgataagtctaggtctcggtcaggggaccttggcctaaagggcctgtcttgcctggagcgtgggagggggctgagtctacacagctggcctggcctcaggcctggagctttagctcaaggacgagaagacccataaagccagacccagctcccaacctcacatctgccacgatgttgctgctcagcctgaccctaagcctggttctcctcggctcctcctggggctgcggcattcctgccatcaaaccggcactgagcttcagccagaggattgtcaacggggagaatgcagtgttgggctcctggccctggcaggtgtccctgcaggacagcagcggcttccacttctgcggtggttctctcatcagccagtcctgggtggtcactgctgcccactgcaatgtcagccctggccgccattttgttgtcctgggcgagtatgaccgatcatcaaacgcagagcccttgcaggttctgtccgtctctcgggccattacacaccctagctggaactctaccaccatgaacaatgacgtgacgctgctgaagctcgcctcgccagcccagtacacaacacgcatctcgccagtttgcctggcatcctcaaacgaggctctgactgaaggcctcacgtgtgtcaccaccggctggggtcgcctcagtggcgtgggcaatgtgacaccagcacatctgcagcaggtggctttgcccctggtcactgtgaatcagtgccggcagtactggggctcaagtatcactgactccatgatctgtgcaggtggcgcaggtgcctcctcgtgccagggtgactccggaggccctcttgtctgccagaagggaaacacatgggtgcttattggtattgtctcctggggcaccaaaaactgcaatgtgcgcgcacctgctgtgtatactcgagttagcaagttcagcacctggatcaaccaggtcatagcctacaactgagctcaccacaggccctccccagctcaacccattaaagacccaggccctgtcccatcatgca

SEQ ID NO: 365141 - DNA, 188 bp, Homo sapiens
gcgcgcacctgcagtttttggtgccccaggagacaataccaaaaactgcaatgtgcgcgcacctgctgtgtatactcgagttagcaagttcagcacctggatcaaccaggtcatagcctacaactgagctcaccacaggccctccccagctcaacccattaaagacccaggccctgtcccatcatgca

SEQ ID NO: 365142 - DNA, 2439 bp, Homo sapiens
cctggaatcaagcctcctacgtctgcctcccaaagttttgggattacaggtgtgagccaccacacccagccctgatctgttcttgaatcagttaaagccctcacactcccagaaggccgccagccaatgcacctgttggaactttgcacacagggtgtcttctcccttcaagcttggtctgcagctcagtaacaaatgggctacagacaccaggggcttgcccatgggagccccaaggcctaaagagggtggcagagatttgatgtctgtcactctccacctgcagcctcagtccacggtcggccaggcaccaagagctcacactttgccctcctaaatgccaggcccttcataagtatcatctcattgttaagagcggaggcttcagcgccagacaaatgcgagtttgtgtacaactcaaccacgtgctggtgggagagtcaccatctctgagcagacctgtgactcctgttccaaatggacgaggaaccactgcgatgatgtgttaggactcccagcctgccagaacctcacagcccctggcccttcacagcaaagttgaccgcagtgagcattccatccaccagtcagaacaccctggacgctgagcggccttctctgaaagcctggtgcctttgttagccctgggtgactcctgtgatcccagccaccaggttgtcactatagacctaatttaaccatctgtcctcagtaccgagggctcaacatttggaatgggaggtggttctgggagccaattagaggccaggctttgggaggtggcagaggtgagtctcacacctgggctctgtctgataagtctaggtctcggtcaggggaccttggcctaaagggcctgtcttgcctggagcgtgggagggggctgagtctacacagctggcctggcctcaggcctggagctttagctcaaggacgagaagacccataaagccagacccagctcccaacctcacatctgccacgatgttgctgctcagcctgaccctaagcctggttctcctcggctcctcctggggtgagtgggccaggaccagccctgattcagccctgggagcaactcagctcccagcaacagcccagggaaggagctaggctggctggaagggacgaaggtggacagagtgggcaaaagaaacaggatatgccagggcagtggagcagggaacaggcctgcagggctgggagggggcaagaggtggggtggtctcacaaataggaccagagattgagccaggccctggagcccgggagggtttaggaagctgagacaggaagacctgtccatgtcttttagaaagaaccttctggctgcatgaagggtatgaactgttcaggtcgggagggggcagagagaccaggggtagagatggggaacagcggggactaggctggagacagatgtaggagaacagcagggctgggggactgggtggatagggataaccaagatagctgtggggcccgaaggtgcttgcatgtaccctgttggggaaggggtagtgctgtaccctctcgacagacctctctggggtgcacagcctggggcacccaaaaggaggtggggaaagatgggctgaggcatgggaagcaggtcctcattagcccaatggccaggctgcggcattcctgccatcaaaccggcactgagcttcagccagaggattgtcaacggggagaatgcagtgttgggctcctggccctggcaggtgtccctgcaggacagcagcggcttccacttctgcggtggttctctcatcagccagtcctgggtggtcactgctgcccactgcaatgtcagccctggccgccattttgttgtcctgggcgagtatgaccgatcatcaaacgcagagcccttgcaggttctgtccgtctctcgggccattacacaccctagctggaactctaccaccatgaacaatgacgtgacgctgctgaagctcgcctcgccagcccagtacacaacacgcatctcgccagtttgcctggcatcctcaaacgaggctctgactgaaggcctcacgtgtgtcaccaccggctggggtcgcctcagtggcgtgggcaatgtgacaccagcacatctgcagcaggtggctttgcccctggtcactgtgaatcagtgccggcagtactggggctcaagtatcactgactccatgatctgtgcaggtggcgcaggtgcctcctcgtgccagggtgactccggaggccctcttgtctgccagaagggaaacacatgggtgcttattggtattgtctcctggggcaccaaaaactgcaatgtgcgcgcacctgctgtgtatactcgagttagcaagttcagcacctggatcaaccaggtcatagcctacaactgagctcaccacaggccctccccagctcaacccattaaagacccaggccctgtcccatcatgca

SEQ ID NO: 365143 - DNA, 131 bp, Homo sapiens
gacagcagcggcttccacttctgcggtggttctctcatcagccagtcctgggtggtcactgctgcccactgcaatgtcaggtgagtgcctgcattccacctgccccgcccctcgcctcttcctgcctcctc

SEQ ID NO: 365144 - DNA, 2142 bp, Homo sapiens
cctggaatcaagcctcctacgtctgcctcccaaagttttgggattacaggtgtgagccaccacacccagccctgatctgttcttgaatcagttaaagccctcacactcccagaaggccgccagccaatgcacctgttggaactttgcacacagggtgtcttctcccttcaagcttggtctgcagctcagtaacaaatgggctacagacaccaggggcttgcccatgggagccccaaggcctaaagagggtggcagagatttgatgtctgtcactctccacctgcagcctcagtccacggtcggccaggcaccaagagctcacactttgccctcctaaatgccaggcccttcataagtatcatctcattgttaagagcggaggcttcagcgccagacaaatgcgagtttgtgtacaactcaaccacgtgctggtgggagagtcaccatctctgagcagacctgtgactcctgttccaaatggacgaggaaccactgcgatgatgtgttaggactcccagcctgccagaacctcacagcccctggcccttcacagcaaagttgaccgcagtgagcattccatccaccagtcagaacaccctggacgctgagcggccttctctgaaagcctggtgcctttgttagccctgggtgactcctgtgatcccagccaccaggttgtcactatagacctaatttaaccatctgtcctcagtaccgagggctcaacatttggaatgggaggtggttctgggagccaattagaggccaggctttgggaggtggcagaggtgagtctcacacctgggctctgtctgataagtctaggtctcggtcaggggaccttggcctaaagggcctgtcttgcctggagcgtgggagggggctgagtctacacagctggcctggcctcaggcctggagctttagctcaaggacgagaagacccataaagccagacccagctcccaacctcacatctgccacgatgttgctgctcagcctgaccctaagcctggttctcctcggctcctcctggggctgcggcattcctgccatcaaaccggcactgagcttcagccagaggattgtcaacggggagaatgcagtgttgggctcctggccctggcaggtgtccctgcaggacagcagcggcttccacttctgcggtggttctctcatcagccagtcctgggtggtcactgctgcccactgcaatgtcagccctggccgccattttgttgtcctgggcgagtatgaccgatcatcaaacgcagagcccttgcaggttctgtccgtctctcgggccattacacaccctagctggaactctaccaccatgaacaatgacgtgacgctgctgaagctcgcctcgccagcccagtacacaacacgcatctcgccagtttgcctggcatcctcaaacgaggctctgactgaaggcctcacgtgtgtcaccaccggctggggtcgcctcagtggcgtgggcaatgtgacaccagcacatctgcagcaggtggctttgcccctggtcactgtgaatcagtgccggcagtactggggctcaagtatcactgactccatgatctgtgcaggtggcgcaggtgcctcctcgtgccagggtgactccggaggccctcttgtctgccagaagggaaacacatgggtgcttattggtattgtctcctggggcaccaaaaactgcaatgtgcgcgcacctgctgtgtatactcgagttagcaagttcagcacctggatcaaccaggtcatagcctacaactgagctcaccacaggccctccccagctcaacccattaaagacccaggccctgtcccatcatgcattcatgtctgtcttcctggctcaggagaaagaagaggctgttgagggtccgactccctacttggacttctggcacagaaggggctgagtgactccttgagtagcagtggctcttcctagagtagccatgccgaggccggggcccccacccctcctccagggcaaccccttggtcctacagcaagaagccagaactgttggaatgaatggcagccctccctggagaggcagcctgtttactgaatacagaggatacgtttacaaactgaatacgcataataaataactgcacattctccatcc

SEQ ID NO: 365145 - DNA, 2537 bp, Homo sapiens
cctggaatcaagcctcctacgtctgcctcccaaagttttgggattacaggtgtgagccaccacacccagccctgatctgttcttgaatcagttaaagccctcacactcccagaaggccgccagccaatgcacctgttggaactttgcacacagggtgtcttctcccttcaagcttggtctgcagctcagtaacaaatgggctacagacaccaggggcttgcccatgggagccccaaggcctaaagagggtggcagagatttgatgtctgtcactctccacctgcagcctcagtccacggtcggccaggcaccaagagctcacactttgccctcctaaatgccaggcccttcataagtatcatctcattgttaagagcggaggcttcagcgccagacaaatgcgagtttgtgtacaactcaaccacgtgctggtgggagagtcaccatctctgagcagacctgtgactcctgttccaaatggacgaggaaccactgcgatgatgtgttaggactcccagcctgccagaacctcacagcccctggcccttcacagcaaagttgaccgcagtgagcattccatccaccagtcagaacaccctggacgctgagcggccttctctgaaagcctggtgcctttgttagccctgggtgactcctgtgatcccagccaccaggttgtcactatagacctaatttaaccatctgtcctcagtaccgagggctcaacatttggaatgggaggtggttctgggagccaattagaggccaggctttgggaggtggcagaggtgagtctcacacctgggctctgtctgataagtctaggtctcggtcaggggaccttggcctaaagggcctgtcttgcctggagcgtgggagggggctgagtctacacagctggcctggcctcaggcctggagctttagctcaaggacgagaagacccataaagccagacccagctcccaacctcacatctgccacgatgttgctgctcagcctgaccctaagcctggttctcctcggctcctcctggggtgagtgggccaggaccagccctgattcagccctgggagcaactcagctcccagcaacagcccagggaaggagctaggctggctggaagggacgaaggtggacagagtgggcaaaagaaacaggatatgccagggcagtggagcagggaacaggcctgcagggctgggagggggcaagaggtggggtggtctcacaaataggaccagagattgagccaggccctggagcccgggagggtttaggaagctgagacaggaagacctgtccatgtcttttagaaagaaccttctggctgcatgaagggtatgaactgttcaggtcgggagggggcagagagaccaggggtagagatggggaacagcggggactaggctggagacagatgtaggagaacagcagggctgggggactgggtggatagggataaccaagatagctgtggggcccgaaggtgcttgcatgtaccctgttggggaaggggtagtgctgtaccctctcgacagacctctctggggtgcacagcctggggcacccaaaaggaggtggggaaagatgggctgaggcatgggaagcaggtcctcattagcccaatggccaggctgcggcattcctgccatcaaaccggcactgagcttcagccagaggattgtcaacggggagaatgcagtgttgggctcctggccctggcaggtgtccctgcaggtacaccaccagaggggtgggcagggtcctgggtacgtcatgcctaggggcagcctcagcagcccacccccactctgacctctgagccctgaccacaggacagcagcggcttccacttctgcggtggttctctcatcagccagtcctgggtggtcactgctgcccactgcaatgtcagccctggccgccattttgttgtcctgggcgagtatgaccgatcatcaaacgcagagcccttgcaggttctgtccgtctctcgggccattacacaccctagctggaactctaccaccatgaacaatgacgtgacgctgctgaagctcgcctcgccagcccagtacacaacacgcatctcgccagtttgcctggcatcctcaaacgaggctctgactgaaggcctcacgtgtgtcaccaccggctggggtcgcctcagtggcgtgggcaatgtgacaccagcacatctgcagcaggtggctttgcccctggtcactgtgaatcagtgccggcagtactggggctcaagtatcactgactccatgatctgtgcaggtggcgcaggtgcctcctcgtgccagggtgactccggaggccctcttgtctgccagaagggaaacacatgggtgcttattggtattgtctcctggggcaccaaaaactgcaatgtgcgcgcacctgctgtgtatactcgagttagcaagttcagcacctggatcaaccaggtcatagcctacaactgagctcaccacaggccctccccagctcaacccattaaagacccaggccctgtcccatcatgca

SEQ ID NO: 365146 - DNA, 2382 bp, Homo sapiens
cctggaatcaagcctcctacgtctgcctcccaaagttttgggattacaggtgtgagccaccacacccagccctgatctgttcttgaatcagttaaagccctcacactcccagaaggccgccagccaatgcacctgttggaactttgcacacagggtgtcttctcccttcaagcttggtctgcagctcagtaacaaatgggctacagacaccaggggcttgcccatgggagccccaaggcctaaagagggtggcagagatttgatgtctgtcactctccacctgcagcctcagtccacggtcggccaggcaccaagagctcacactttgccctcctaaatgccaggcccttcataagtatcatctcattgttaagagcggaggcttcagcgccagacaaatgcgagtttgtgtacaactcaaccacgtgctggtgggagagtcaccatctctgagcagacctgtgactcctgttccaaatggacgaggaaccactgcgatgatgtgttaggactcccagcctgccagaacctcacagcccctggcccttcacagcaaagttgaccgcagtgagcattccatccaccagtcagaacaccctggacgctgagcggccttctctgaaagcctggtgcctttgttagccctgggtgactcctgtgatcccagccaccaggttgtcactatagacctaatttaaccatctgtcctcagtaccgagggctcaacatttggaatgggaggtggttctgggagccaattagaggccaggctttgggaggtggcagaggtgagtctcacacctgggctctgtctgataagtctaggtctcggtcaggggaccttggcctaaagggcctgtcttgcctggagcgtgggagggggctgagtctacacagctggcctggcctcaggcctggagctttagctcaaggacgagaagacccataaagccagacccagctcccaacctcacatctgccacgatgttgctgctcagcctgaccctaagcctggttctcctcggctcctcctggggtgagtgggccaggaccagccctgattcagccctgggagcaactcagctcccagcaacagcccagggaaggagctaggctggctggaagggacgaaggtggacagagtgggcaaaagaaacaggatatgccagggcagtggagcagggaacaggcctgcagggctgggagggggcaagaggtggggtggtctcacaaataggaccagagattgagccaggccctggagcccgggagggtttaggaagctgagacaggaagacctgtccatgtcttttagaaagaaccttctggctgcatgaagggtatgaactgttcaggtcgggagggggcagagagaccaggggtagagatggggaacagcggggactaggctggagacagatgtaggagaacagcagggctgggggactgggtggatagggataaccaagatagctgtggggcccgaaggtgcttgcatgtaccctgttggggaaggggtagtgctgtaccctctcgacagacctctctggggtgcacagcctggggcacccaaaaggaggtggggaaagatgggctgaggcatgggaagcaggtcctcattagcccaatggccaggctgcggcattcctgccatcaaaccggcactgagcttcagccagaggattgtcaacggggagaatgcagtgttgggctcctggccctggcaggtgtccctgcaggtacaccaccagaggggtgggcagggtcctgggtacgtcatgcctaggggcagcctcagcagcccacccccactctgacctctgagccctgaccacaggacagcagcggcttccacttctgcggtggttctctcatcagccagtcctgggtggtcactgctgcccactgcaatgtcagccctggccgccattttgttgtcctgggcgagtatgaccgatcatcaaacgcagagcccttgcaggttctgtccgtctctcgggccattacacaccctagctggaactctaccaccatgaacaatgacgtgacgctgctgaagctcgcctcgccagcccagtacacaacacgcatctcgccagtttgcctggcatcctcaaacgaggctctgactgaaggcctcacgtgtgtcaccaccggctggggtcgcctcagtggcgtgggcaatgtgacaccagcacatctgcagcaggtggctttgcccctggtcactgtgaatcagtgccggcagtactggggctgctgtgtatactcgagttagcaagttcagcacctggatcaaccaggtcatagcctacaactgagctcaccacaggccctccccagctcaacccattaaagacccaggccctgtcccatcatgca

SEQ ID NO: 365147 - DNA, 289 bp, Homo sapiens
accctgataggccagtcccaggcacaggaggaatcatctgcctgaaacaccctcattccttccactgcttatcctttatattgagcaactgctggaataatcagagctaatgtttattgagcacttacactgtgccacacactgttcgaaaccctttatacataccagctcatttaattctcacaccaacccaatgaggtgagtgctgttatgattatctccattttatagttgaggaaactgagacatggcaattaggtaagttgtccacaattttaaagctcatcag

SEQ ID NO: 365148 - DNA, 1546 bp, Homo sapiens
accgctctgggctgcgctcctcgcttgccctcggactcggctcccgctgcgagcggccgccctgcccgcgcaccgcgctcagcgcccaccgccgggcttcccgcgccggacccagtacctcggctccccggggccggaccgaggccgcaagcagcgccgcggggtgtggggcggacccaggagatgaaatgacaacgtcaaccctccagaaagccattgatctggtgacgaaagccacagaggaggacaaagccaagaactacgaggaggcgctgcggctgtaccagcatgcggtggagtacttcctccacgctatcaagtatgaggcccacagcgacaaggccaaggagagcattcgagccaagtgcgtgcagtacctagaccgggccgagaagctgaaggattatttacgaagcaaagagaaacacggcaagaagccagtcaaagagaaccagagtgagggcaagggcagtgacagtgacagtgaaggggataatccggagaaaaagaaactgcaagaacagctgatgggtgccgtcgtgatggagaagcccaacatacggtggaacgacgtggccgggctggagggggccaaggaggccctcaaagaagctgtcattttgccaatcaaattcccacacttgttcacaggcaagcgcaccccctggcgggggattctgctgttcggaccccctggcacagggaaatcctacctggccaaagccgtggcaacagaggccaacaactccaccttcttctctgtgtcctcctcagatctgatgtccaagtggctgggggagagtgaaaagctggtcaagaacctgtttgagctggccaggcagcacaagccctccatcatcttcatcgatgaggtggattccctctgcgggtcccgaaatgaaaatgagagtgaggccgcccggaggatcaaaacggagttcttggtccagatgcagggggtggggaataacaatgatgggactctggttcttggagccacaaacatcccatgggtgttggattcggccatcaggaggaggtttgaaaaacgaatttatatccccttgccggaggaagctgcccgcgcccagatgttccggttgcatctcgggagcactccccacaacctcacggatgcaaacatccacgagctggcccggaagacggaaggctactcgggcgcggacatcagcatcatcgtgcgggactctctcatgcagcccgtgaggaaggtgcagtcggccacacacttcaaaaaggtctgtggcccctctcgcaccaaccccagcatgatgattgatgacctcctgactccatgctcaccaggggacccaggagccatggagatgacttggatggatgtccctggggacaaactcttagagcctgtggtttgcatgtcggacatgctgcggtctctggccaccacccggcccacggtgaatgcagacgacctcctgaaagtgaagaaattctcagaggactttgggcaagagagttaaaaggtcgacccctaagctggtttcaagccaaccccatggcctcg

SEQ ID NO: 365149 - DNA, 2324 bp, Homo sapiens
accgctctgggctgcgctcctcgcttgccctcggactcggctcccgctgcgagcggccgccctgcccgcgcaccgcgctcagcgcccaccgccgggcttcccgcgccggacccagtacctcggctccccggggccggaccgaggccgcaagcagcgccgcggggtgtggggcggacccaggagatgaaatgacaacgtcaaccctccagaaagccattgatctggtgacgaaagccacagaggaggacaaagccaagaactacgaggaggcgctgcggctgtaccagcatgcggtggagtacttcctccacgctatcaagtatgaggcccacagcgacaaggccaaggagagcattcgagccaagtgcgtgcagtacctagaccgggccgagaagctgaaggattatttacgaagcaaagagaaacacggcaagaagccagtcaaagagaaccagagtgagggcaagggcagtgacagtgacagtgaaggggataatccggagaaaaagaaactgcaagaacagctgatgggtgccgtcgtgatggagaagcccaacatacggtggaacgacgtggccgggctggagggggccaaggaggccctcaaagaagctgtcattttgccaatcaaattcccacacttgttcacaggcaagcgcaccccctggcgggggattctgctgttcggaccccctggcacagggaaatcctacctggccaaagccgtggcaacagaggccaacaactccaccttcttctctgtgtcctcctcagatctgatgtccaagtggctgggggagagtgaaaagctggtcaagaacctgtttgagctggccaggcagcacaagccctccatcatcttcatcgatgaggtggattccctctgcgggtcccgaaatgaaaatgagagtgaggccgcccggaggatcaaaacggagttcttggtccagatgcagggggtggggaataacaatgatgggactctggttcttggagccacaaacatcccatgggtgttggattcggccatcaggaggaggtttgaaaaacgaatttatatccccttgccggaggaagctgcccgcgcccagatgttccggttgcatctcgggagcactccccacaacctcacggatgcaaacatccacgagctggcccggaagacggaaggctactcgggcgcggacatcagcatcatcgtgcgggactctctcatgcagcccgtgaggaaggtgcagtcggccacacacttcaaaaaggtctgtggcccctctcgcaccaaccccagcatgatgattgatgacctcctgactccatgctcaccaggggacccaggagccatggagatgacttggatggatgtccctggggacaaactcttagagcctgtggtttgcatgtcggacatgctgcggtctctggccaccacccggcccacggtgaatgcagacgacctcctgaaagtgaagaaattctcagaggactttgggcaagagagttaaaagctgcttcacttgggcaatggtgaaggtgggaggttgattggggcaaatccaggcactccccatgtcaacagccagacagggctccagggcttgtcccagtcaatacagagttccctctgctgtctggccgtctgccagggagccagaaggaagggccttgcagccacagagacactccactgccctggggcacacagtggacactgctcttcctacttcctcctctcctggatgctcatcagctccttctgcctcccccccttttttttccatcttttgttcccctaaattaatgctgcttggattttcatcttatttataaagataaaatcacctggaagtgtcaaggagtggggcggggtggcgggggagaagcagccgtgctgccaggtcacccagacctccagacagccggctagccccactgcccgttccttttacgcccaagttttgctccttgagagcagattggctgatgcccctgcaaccccagcccaagctctgcctcaaagaccgagtgacataagccattcccaccctcctaggttcacatccagggctgtgtcttccttgggggaggagatggtgtcgtttagatcagggtaaggcagtcaggcgggtgttcaccactgccttttcttcctctgagcgtgagaacactgaacccagccactgcccctgggtccctgtcctggaaatggtctaataaatccttttcccttcttgagctacccaagtgatctcatctttccttgactcttaactgagactctgaagggccacccttgcttccaattaaaagaccctctggttttcagt

SEQ ID NO: 365150 - DNA, 2436 bp, Homo sapiens
  misc_feature (2261)..(2262): n is a, c, g, or t
  misc_feature (2266)..(2268): n is a, c, g, or t
  misc_feature (2272)..(2272): n is a, c, g, or t
  misc_feature (2274)..(2274): n is a, c, g, or t
  misc_feature (2276)..(2276): n is a, c, g, or t
  misc_feature (2278)..(2278): n is a, c, g, or t
  misc_feature (2312)..(2312): n is a, c, g, or t
  misc_feature (2314)..(2314): n is a, c, g, or t
  misc_feature (2317)..(2317): n is a, c, g, or t
  misc_feature (2319)..(2321): n is a, c, g, or t
  misc_feature (2323)..(2324): n is a, c, g, or t
  misc_feature (2421)..(2421): n is a, c, g, or t
accgctctgggctgcgctcctcgcttgccctcggactcggctcccgctgcgagcggccgccctgcccgcgcaccgcgctcagcgcccaccgccgggcttcccgcgccggacccagtacctcggctccccggggccggaccgaggccgcaagcagcgccgcggggtgtggggcggacccaggagatgaaatgacaacgtcaaccctccagaaagccattgatctggtgacgaaagccacagaggaggacaaagccaagaactacgaggaggcgctgcggctgtaccagcatgcggtggagtacttcctccacgctatcaagtatgaggcccacagcgacaaggccaaggagagcattcgagccaagtgcgtgcagtacctagaccgggccgagaagctgaaggattatttacgaagcaaagagaaacacggcaagaagccagtcaaagagaaccagagtgagggcaagggcagtgacagtgacagtgaaggggataatccggagaaaaagaaactgcaagaacagctgatgggtgccgtcgtgatggagaagcccaacatacggtggaacgacgtggccgggctggagggggccaaggaggccctcaaagaagctgtcattttgccaatcaaattcccacacttgttcacaggcaagcgcaccccctggcgggggattctgctgttcggaccccctggcacagggaaatcctacctggccaaagccgtggcaacagaggccaacaactccaccttcttctctgtgtcctcctcagatctgatgtccaagtggctgggggagagtgaaaagctggtcaagaacctgtttgagctggccaggcagcacaagccctccatcatcttcatcgatgaggtggattccctctgcgggtcccgaaatgaaaatgagagtgaggccgcccggaggatcaaaacggagttcttggtccagatgcagggggtggggaataacaatgatgggactctggttcttggagccacaaacatcccatgggtgttggattcggccatcaggaggaggtttgaaaaacgaatttatatccccttgccggaggaagctgcccgcgcccagatgttccggttgcatctcgggagcactccccacaacctcacggatgcaaacatccacgagctggcccggaagacggaaggctactcgggcgcggacatcagcatcatcgtgcgggactctctcatgcagcccgtgaggaaggtgcagtcggccacacacttcaaaaaggtctgtggcccctctcgcaccaaccccagcatgatgattgatgacctcctgactccatgctcaccaggggacccaggagccatggagatgacttggatggatgtccctggggacaaactcttagagcctgtggtttgcatgtcggacatgctgcggtctctggccaccacccggcccacggtgaatgcagacgacctcctgaaagtgaagaaattctcagaggactttgggcaagagagttaaaagctgcttcacttgggcaatggtgaaggtgggaggttgattggggcaaatccaggcactccccatgtcaacagccagacagggctccagggcttgtcccagtcaatacagagttccctctgctgtctggccgtctgccagggagccagaaggaagggccttgcagccacagagacactccactgccctggggcacacagtggacactgctcttcctacttcctcctctcctggatgctcatcagctccttctgcctcccccccttttttttccatcttttgttcccctaaattaatgctgcttggattttcatcttatttataaagataaaatcacctggaagtgtcaaggagtggggcggggtggcgggggagaagcagccgtgctgccaggtcacccagacctccagacagccggctagccccactgcccgttccttttacgcccaagttttgctccttgagagcagattggctgatgcccctgcaaccccagcccaagctctgcctcaaagaccgagtgacataagccattcccaccctcctaggttcacatccagggctgtgtcttccttgggggaggagatggtgtcgtttagatcagggtaaggcagtcaggcgggtgttcaccactgccttttcttcctctgagcgtgagaacactgaacccagccactgcccctgggtccctgtcctggaaatggtctaataaatccttttcccttcttgagctaaaaaaaaaaaaaaaaaaaaaaaaanntttnnnaaananananaaaaaaaaaaaaaaaaaaaaaaaaaaaaaaaaananaanannntnnttttttttttttttttttttttttttttttttttttttttttttttttttttttttttttttttttttttttttttttttttttttttttttttttngggggggtttttttt

SEQ ID NO: 365151 - DNA, 2274 bp, Homo sapiens
accgctctgggctgcgctcctcgcttgccctcggactcggctcccgctgcgagcggccgccctgcccgcgcaccgcgctcagcgcccaccgccgggcttcccgcgccggacccagtacctcggctccccggggccggaccgaggccgcaagcagcgccgcggggtgtggggcggacccaggagatgaaatgacaacgtcaaccctccagaaagccattgatctggtgacgaaagccacagaggaggacaaagccaagaactacgaggaggcgctgcggctgtaccagcatgcggtggagtacttcctccacgctatcaagtatgaggcccacagcgacaaggccaaggagagcattcgagccaagtgcgtgcagtacctagaccgggccgagaagctgaaggattatttacgaagcaaagagaaacacggcaagaagccagtcaaagagaaccagagtgagggcaagggcagtgacagtgacagtgaaggggataatccggagaaaaagaaactgcaagaacagctgatgggtgccgtcgtgatggagaagcccaacatacggtggaacgacgtggccgggctggagggggccaaggaggccctcaaagaagctgtcattttgccaatcaaattcccacacttgttcacaggcaagcgcaccccctggcgggggattctgctgttcggaccccctggcacagggaaatcctacctggccaaagccgtggcaacagaggccaacaactccaccttcttctctgtgtcctcctcagatctgatgtccaagtggctgggggagagtgaaaagctggtcaagaacctgtttgagctggccaggcagcacaagccctccatcatcttcatcgatgaggtggattccctctgcgggtcccgaaatgaaaatgagagtgaggccgcccggaggatcaaaacggagttcttggtccagatgcagggggtggggaataacaatgatgggactctggttcttggagccacaaacatcccatgggtgttggattcggccatcaggaggaggtttgaaaaacgaatttatatccccttgccggaggaagctgcccgcgcccagatgttccggttgcatctcgggagcactccccacaacctcacggatgcaaacatccacgagctggcccggaagacggaaggctactcgggcgcggacatcagcatcatcgtgcgggactctctcatgcagcccgtgaggaaggtgcagtcggccacacacttcaaaaaggtctgtggcccctctcgcaccaaccccagcatgatgattgatgacctcctgactccatgctcaccaggggacccaggagccatggagatgacttggatggatgtccctggggacaaactcttagagcctgtggtttgcatgtcggacatgctgcggtctctggccaccacccggcccacggtgaatgcagacgacctcctgaaagtgaagaaattctcagaggactttgggcaagagagttaaaagctgcttcacttgggcaatggtgaaggtgggaggttgattggggcaaatccaggcactccccatgtcaacagccagacagggctccagggcttgtcccagtcaatacagagttccctctgctgtctggccgtctgccagggagccagaaggaagggccttgcagccacagagacactccactgccctggggcacacagtggacactgctcttcctacttcctcctctcctggatgctcatcagctccttctgcctcccccccttttttttccatcttttgttcccctaaattaatgctgcttggattttcatcttatttataaagataaaatcacctggaagtgtcaaggagtggggcggggtggcgggggagaagcagccgtgctgccaggtcacccagacctccagacagccggctagccccactgcccgttccttttacgcccaagttttgctccttgagagcagattggctgatgcccctgcaaccccagcccaagctctgcctcaaagaccgagtgacataagccattcccaccctcctaggttcacatccagggctgtgtcttccttgggggaggagatggtgtcgtttagatcagggtaaggcagtcaggcgggtgttcaccactgccttttcttcctctgagcgtgagaacactgaacccagccactgcccctgggtccctgtcctggaaatggtctaataaatccttttcccttcttgagcttctgttgcccaggctggagtgcagtggcacgatcttggt

SEQ ID NO: 365152 - DNA, 2112 bp, Homo sapiens
accgctctgggctgcgctcctcgcttgccctcggactcggctcccgctgcgagcggccgccctgcccgcgcaccgcgctcagcgcccaccgccgggcttcccgcgccggacccagtacctcggctccccggggccggaccgaggccgcaagcagcgccgcggggtgtggggcggacccaggagatgaaatgacaacgtcaaccctccagaaagccattgatctggtgacgaaagccacagaggaggacaaagccaagaactacgaggaggcgctgcggctgtaccagcatgcggtggagtacttcctccacgctatcaagtatgaggcccacagcgacaaggccaaggagagcattcgagccaagtgcgtgcagtacctagaccgggccgagaagctgaaggattatttacgaagcaaagagaaacacggcaagaagccagtcaaagagaaccagagtgagggcaagggcagtgacagtgacagtgaaggggataatccggagaaaaagaaactgcaagaacagctgatgggtgccgtcgtgatggagaagcccaacatacggtggaacgacgtggccgggctggagggggccaaggaggccctcaaagaagctgtcattttgccaatcaaattcccacacttgttcacaggcaagcgcaccccctggcgggggattctgctgttcggaccccctggcacagggaaatcctacctggccaaagccgtggcaacagaggccaacaactccaccttcttctctgtgtcctcctcagatctgatgtccaagtggctgggggagagtgaaaagctggtcaagaacctgtttgagctggccaggcagcacaagccctccatcatcttcatcgatgaggtggattccctctgcgggtcccgaaatgaaaatgagagtgaggccgcccggaggatcaaaacggagttcttggtccagatgcagggggtggggaataacaatgatgggactctggttcttggagccacaaacatcccatgggtgttggattcggccatcaggaggaggtttgaaaaacgaatttatatccccttgccggaggaagctgcccgcgcccagatgttccggttgcatctcgggagcactccccacaacctcacggatgcaaacatccacgagctggcccggaagacggaaggctactcgggcgcggacatcagcatcatcgtgcgggactctctcatgcagcccgtgaggaaggtgcagtcggccacacacttcaaaaaggtctgtggcccctctcgcaccaaccccagcatgatgattgatgacctcctgactccatgctcaccaggggacccaggagccatggagatgacttggatggatgtccctggggacaaactcttagagcctgtggtttgcatgtcggacatgctgcggtctctggccaccacccggcccacggtgaatgcagacgacctcctgaaagtgaagaaattctcagaggactttgggcaagagagttaaaagctgcttcacttgggcaatggtgaaggtgggaggttgattggggcaaatccaggcactccccatgtcaacagccagacagggctccagggcttgtcccagtcaatacagagttccctctgctgtctggccgtctgccagggagccagaaggaagggccttgcagccacagagacactccactgccctggggcacacagtggacactgctcttcctacttcctcctctcctggatgctcatcagctccttctgcctcccccccttttttttccatcttttgttcccctaaattaatgctgcttggattttcatcttatttataaagataaaatcacctggaagtgtcaaggagtggggcggggtggcgggggagaagcagccgtgctgccaggtcacccagacctccagacagccggctagccccactgcccgttccttttacgcccaagttttgctccttgagagcagattggctgatgcccctgcaaccccagcccaagctctgcctcaaagaccgagtgacataagccattcccacccttttttttccatcttttgtcccctaaattaatgctgtttggattttcatcttattataaagatatcac

SEQ ID NO: 365153 - DNA, 3749 bp, Homo sapiens
accgctctgggctgcgctcctcgcttgccctcggactcggctcccgctgcgagcggccgccctgcccgcgcaccgcgctcagcgcccaccgccgggcttcccgcgccggacccagtacctcggctccccggggccggaccgaggccgcaagcagcgccgcggggtgtggggcggacccaggagatgaaatgacaacgtcaaccctccagaaagccattgatctggtgacgaaagccacagaggaggacaaagccaagaactacgaggaggcgctgcggctgtaccagcatgcggtggagtacttcctccacgctatcaagtatgaggcccacagcgacaaggccaaggagagcattcgagccaagtgcgtgcagtacctagaccgggccgagaagctgaaggattatttacgaagcaaagagaaacacggcaagaagccagtcaaagagaaccagagtgagggcaagggcagtgacagtgacagtgaaggggataatccggagaaaaagaaactgcaagaacagctgatgggtgccgtcgtgatggagaagcccaacatacggtggaacgacgtggccgggctggagggggccaaggaggccctcaaagaagctgtcattttgccaatcaaattcccacacttgttcacaggcaagcgcaccccctggcgggggattctgctgttcggaccccctggcacagggaaatcctacctggccaaagccgtggcaacagaggccaacaactccaccttcttctctgtgtcctcctcagatctgatgtccaagtggctgggggagagtgaaaagctggtcaagaacctgtttgagctggccaggcagcacaagccctccatcatcttcatcgatgaggtggattccctctgcgggtcccgaaatgaaaatgagagtgaggccgcccggaggatcaaaacggagttcttggtccagatgcagggggtggggaataacaatgatgggactctggttcttggagccacaaacatcccatgggtgttggattcggccatcaggaggaggtttgaaaaacgaatttatatccccttgccggaggaagctgcccgcgcccagatgttccggttgcatctcgggagcactccccacaacctcacggatgcaaacatccacgagctggcccggaagacggaaggctactcgggcgcggacatcagcatcatcgtgcgggactctctcatgcagcccgtgaggaaggtgcagtcggccacacacttcaaaaaggtgagtgcccgcggccactgctgagaaaaatctcatagtaagagcgggatgttcggttttttttttcccagctcctggtcctgctccccggctgctcaggtgacacagtctctgaggcctcctggagagccgagggccagtgccatgggggctgcacccactgtcccctccctgcagctcttctggagtgtggccatctcagggtgtgtgaaagcagaggacagggccactttactgtcttaaccctgctgcggcctcctccgtcagcactgtgtgctcttgtgcggggtggacaccaaatcagtgtttggaaagtgttggatataaaatgaccaggaagacctgtctattcattcagcagatctctgctgagtatttgctgtgggtcctcctgtgtgcccggccctgtcctaagtgctgggaagatatgagtgaccaacagacaaaaatcctagaccttccgttgttggtggggagacagtcaacacagtcagtgagtgtctcagaggatggagatggagcagggttaggagagaggtgtctcgggcatggagggaagggcagatggcactggggtgatgcctgagacaggaggtgaaggtgtgagggaatgagccttgtggacattgggggaatgttttgccaaggcagcggacttcagttggaaaaccactttgtgttaatctattttcatgctgctgataaagacatacccgagactgggaagaaaaagaggtttaattggccttacagttccacatggctagggaggcctcagaatcatggtaggagaccaaaggcacttcttacatgctggtggcaagagaaaatgaagaaacaaaagtggaaacccctgataaacccatcagatctcgtgagacttcaccatcacgagaatagcacgggaaagaccagcccccatgattcagttacctccccctgggtccctcccacaacatgtgggaattctgggagatagatacagttcaagttgaaatgtgggtgggggcacagctaaaccatatcacacttttaatgtcactgtattcctggtgagacgtgacagtgttaatgaggaagacatcaaggcattggggctacagattgccagagtcccatgcaaatcatgagtcgctcggaccacccagcccgagttctgaaggagcccgtcctcctcagatgctagggacccacagagcattctctttgggacttccttagagaccggaggggtcgagcccctctgacactgaggggcagctgccccagtcagatccatttggtttcaggtctgtggcccctctcgcaccaaccccagcatgatgattgatgacctcctgactccatgctcaccaggggacccaggagccatggagatgacttggatggatgtccctggggacaaactcttagagcctgtggtttgcatggtaagtgacttgacaggggagggaagagggctgcacagagcccagaaaattgagggtttgggtccagaataaaaacggtcttctccaggccaggcatggtagctcacgcctgtaatcccagcactttgggaggccagggtgggcagatcacaaggttaggagttcgagaccagcctagccaatatggagaaaccctgtctctactaaaaatacaaaaattagccgggtgtggtggtgtgcacttgtagtcccagctactcaggaggctgaggcagaaggatcgcctgaagccgggaggcagaggttgcagtgagcagagattgggccactgcactccagcctgggtgacagagtgagactccgtctcaaaaataaaaaatagtcttcttctatgtcctgggctgttgagaatggcctttgtagctcagggaagctggcattacactcactgggggcccagaatgcaggtggcagcattagcattttgtacatacagagaaaggctagatgcagtggtgcagtgatagctcactgcaggcttgacctcacgagctcacacaatcttctgacctcagcctcctgagtagcaacaggcacacaccatcatgcccagctaatttttccttttttttttagaaacggcctcacagtgttgcccaggccagtctgaaactgctgggctcaagtgatcctctcagcgtggcctcccaaagtgctgggattacaagcatgagctgagccaccacacctagcctgcattttatattctttagcaagtaaagtcaggtccagataatatgacgtcaatccatgggtttggctttgcggtgcagtgaggcagtgaatgtgtcaagactgtgacgcagttgcaaaggcagcgcctcacctgcatagcctggcccgtgccatcctggcaagggtctgcccttgtggctggtgttgggggtgtgcagctaagaaggctcctggccgggcgccgtggctcccgcctgtaatcccagcattttgtacatacagagaaaggctagatgcagtggtgcagtgatagctcactgcaggc

SEQ ID NO: 365154 - DNA, 1499 bp, Homo sapiens
  misc_feature (28)..(28): n is a, c, g, or t
  misc_feature (32)..(32): n is a, c, g, or t
  misc_feature (44)..(45): n is a, c, g, or t
  misc_feature (49)..(49): n is a, c, g, or t
  misc_feature (55)..(55): n is a, c, g, or t
  misc_feature (63)..(63): n is a, c, g, or t
gcagcacttatgtggctgacaccttaantagnaaaacaccgttnntggntatttnataataanaagcagcgtacggtcggaatctggatgagtgaggcgccgaggatcaaacggagtcttggtcagatgcaggggtggggaataacaatgatgggactctggttcttggagccacaaacatcccatgggtgttggattcggccatcaggaggaggtttgaaaaacgaatttatatccccttgccggaggaagctgcccgcgcccagatgttccggttgcatctcgggagcactccccacaacctcacggatgcaaacatccacgagctggcccggaagacggaaggctactcgggcgcggacatcagcatcatcgtgcgggactctctcatgcagcccgtgaggaaggtgcagtcggccacacacttcaaaaaggtctgtggcccctctcgcaccaaccccagcatgatgattgatgacctcctgactccatgctcaccaggggacccaggagccatggagatgacttggatggatgtccctggggacaaactcttagagcctgtggtttgcatgtcggacatgctgcggtctctggccaccacccggcccacggtgaatgcagacgacctcctgaaagtgaagaaattctcagaggactttgggcaagagagttaaaagctgcttcacttgggcaatggtgaaggtgggaggttgattggggcaaatccaggcactccccatgtcaacagccagacagggctccagggcttgtcccagtcaatacagagttccctctgctgtctggccgtctgccagggagccagaaggaagggccttgcagccacagagacactccactgccctggggcacacagtggacactgctcttcctacttcctcctctcctggatgctcatcagctccttctgcctcccccccttttttttccatcttttgttcccctaaattaatgctgcttggattttcatcttatttataaagataaaatcacctggaagtgtcaaggagtggggcggggtggcgggggagaagcagccgtgctgccaggtcacccagacctccagacagccggctagccccactgcccgttccttttacgcccaagttttgctccttgagagcagattggctgatgcccctgcaaccccagcccaagctctgcctcaaagaccgagtgacataagccattcccaccctcctaggttcacatccagggctgtgtcttccttgggggaggagatggtgtcgtttagatcagggtaaggcagtcaggcgggtgttcaccactgccttttcttcctctgagcgtgagaacactgaacccagccactgcccctgggtccctgtcctggaaatggtctaataaatccttttcccttcttgagctacccaagtgatctcatctttccttgactcttaactgagactctgaagggccacccttgcttccaattaaaagaccctctggttttcagt

SEQ ID NO: 365155 - DNA, 1184 bp, Homo sapiens
accgctctgggctgcgctcctcgcttgccctcggactcggctcccgctgcgagcggccgccctgcccgcgcaccgcgctcagcgcccaccgccgggcttcccgcgccggacccagtacctcggctccccggggccggaccgaggccgcaagcagcgccgcggggtgtggggcggacccaggagatgaaatgacaacgtcaaccctccagaaagccattgatctggtgacgaaagccacagaggaggacaaagccaagaactacgaggaggcgctgcggctgtaccagcatgcggtggagtacttcctccacgctatcaagtatgaggcccacagcgacaaggccaaggagagcattcgagccaagtgcgtgcagtacctagaccgggccgagaagctgaaggattatttacgaagcaaagagaaacacggcaagaagccagtcaaagagaaccagagtgagggcaagggcagtgacagtgacagtgaaggggataatccggagaaaaagaaactgcaagaacagctgatgggtgccgtcgtgatggagaagcccaacatacggtggaacgacgtggccgggctggagggggccaaggaggccctcaaagaagctgtcattttgccaatcaaattcccacacttgttcacaggcaagcgcaccccctggcgggggattctgctgttcggaccccctggcacagggaaatcctacctggccaaagccgtggcaacagaggccaacaactccaccttcttctctgtgtcctcctcagatctgatgtccaagtggctgggggagagtgaaaagctggtcaagaacctgtttgagctggccaggcagcacaagccctccatcatcttcatcgatgaggtggattccctctgcgggtcccgaaatgaaaatgagagtgaggccgcccggaggatcaaaacggagttcttggtccagatgcagggggtggggaataacaatgatgggactctggttcttggagccacaaacatcccatgggtgttggattcggccatcaggaggaggtgagtcttccccaggagaagccagggctggaggcttcctcccaccatggtcacggtccgcctgctgctggcagcccgggtgcagcctggccccttttccctggagtctttcccgtctgcctgccaagcagagccctttgtgagg

SEQ ID NO: 365156 - DNA, 762 bp, Homo sapiens
accgctctgggctgcgctcctcgcttgccctcggactcggctcccgctgcgagcggccgccctgcccgcgcaccgcgctcagcgcccaccgccgggcttcccgcgccggacccagtacctcggctccccggggccggaccgaggccgcaagcagcgccgcggggtgtggggcggacccaggagatgaaatgacaacgtcaaccctccagaaagccattgatctggtgacgaaagccacagaggaggacaaagccaagaactacgaggaggcgctgcggctgtaccagcatgcggtggagtacttcctccacgctatcaagtatgaggcccacagcgacaaggccaaggagagcattcgagccaagtgcgtgcagtacctagaccgggccgagaagctgaaggattatttacgaagcaaagagaaacacggcaagaagccagtcaaagagaaccagagtgagggcaagggcagtgacagtgacagtgaaggggataatccggagaaaaagaaactgcaagaacagctgatggctctgcctcaaagaccgagtgacataagccattcccaccctcctaggttcacatccagggctgtgtcttccttgggggaggagatggtgtcgtttagatcagggtaaggcagtcaggcgggtgttcaccactgccttttcttcctctgagcgtgagaacactgaacccagccactgcccctgggtccctgtcctggaaatggtctaataaatccttttcccttcttgagct

SEQ ID NO: 365157 - DNA, 2235 bp, Homo sapiens
accgctctgggctgcgctcctcgcttgccctcggactcggctcccgctgcgagcggccgccctgcccgcgcaccgcgctcagcgcccaccgccgggcttcccgcgccggacccagtacctcggctccccggggccggaccgaggccgcaagcagcgccgcggggtgtggggcggacccaggagatgaaatgacaacgtcaaccctccagaaagccattgatctggtgacgaaagccacagaggaggacaaagccaagaactacgaggaggcgctgcggctgtaccagcatgcggtggagtacttcctccacgctatcaagtatgaggcccacagcgacaaggccaaggagagcattcgagccaagtgcgtgcagtacctagaccgggccgagaagctgaaggattatttacgaagcaaagagaaacacggcaagaagccagtcaaagagaaccagagtgagggcaagggcagtgacagtgacagtgaaggggataatccggagaaaaagaaactgcaagaacagctgatgggtgccgtcgtgatggagaagcccaacatacggtggaacgacgtggccgggctggagggggccaaggaggccctcaaagaagctgtcattttgccaatcaaattcccacacttgttcacaggcaagcgcaccccctggcgggggattctgctgttcggaccccctggcacagggaaatcctacctggccaaagccgtggcaacagaggccaacaactccaccttcttctctgtgtcctcctcagatctgatgtccaagtggctgggggagagtgaaaagctggtcaagaacctgtttgagctggccaggcagcacaagccctccatcatcttcatcgatgaggtggattccctctgcgggtcccgaaatgaaaatgagagtgaggccgcccggaggatcaaaacggagttcttggtccagatgcagggggtggggaataacaatgatgggactctggttcttggagccacaaacatcccatgggtgttggattcggccatcaggaggaggtttgaaaaacgaatttatatccccttgccggaggaagctgcccgcgcccagatgttccggttgcatctcgggagcactccccacaacctcacggatgcaaacatccacgagctggcccggaagacggaaggctactcgggcgcggacatcagcatcatcgtgcgggactctctcatgcagcccgtgaggaaggtgcagtcggccacacacttcaaaaaggtctgtggcccctctcgcaccaaccccagcatgatgattgatgacctcctgactccatgctcaccaggggacccaggagccatggagatgacttggatggatgtccctggggacaaactcttagagcctgtggtttgcatgtcggacatgctgcggtctctggccaccacccggcccacggtgaatgcagacgacctcctgaaagtgaagaaattctcagaggactttgggcaagagagttaaaagctgcttcacttgggcaatggtgaaggtgggaggttgattggggcaaatccaggcactccccatgtcaacagccagacagggctccagggcttgtcccagtcaatacagagttccctctgctgtctggccgtctgccagggagccagaaggaagggccttgcagccacagagacactccactgccctggggcacacagtggacactgctcttcctacttcctcctctcctggatgctcatcagctccttctgcctcccccccttttttttccatcttttgttcccctaaattaatgctgcttggattttcatcttatttataaagataaaatcacctggaagtgtcaaggagtggggcggggtggcgggggagaagcagccgtgctgccaggtcacccagacctccagacagccggctagccccactgcccgttccttttacgcccaagttttgctccttgagagcagattggctgatgcccctgcaaccccagcccaagctctgcctcaaagaccgagtgacataagccattcccaccctcctaggttcacatccagggctgtgtcttccttgggggaggagatggtgtcgtttagatcagggtaaggcagtcaggcgggtgttcaccactgccttttcttcctctgagcgtgagaacactgaacccagccactgcccctgggtccctgtcctggaaatggtctaataaatccttttcccttcttgagct

SEQ ID NO: 365158 - DNA, 3613 bp, Homo sapiens
accgctctgggctgcgctcctcgcttgccctcggactcggctcccgctgcgagcggccgccctgcccgcgcaccgcgctcagcgcccaccgccgggcttcccgcgccggacccagtacctcggctccccggggccggaccgaggccgcaagcagcgccgcggggtgtggggcggacccaggagatgaaatgacaacgtcaaccctccagaaagccattgatctggtgacgaaagccacagaggaggacaaagccaagaactacgaggaggcgctgcggctgtaccagcatgcggtggagtacttcctccacgctatcaagtatgaggcccacagcgacaaggccaaggagagcattcgagccaagtgcgtgcagtacctagaccgggccgagaagctgaaggattatttacgaagcaaagagaaacacggcaagaagccagtcaaagagaaccagagtgagggcaagggcagtgacagtgacagtgaaggggataatccggagaaaaagaaactgcaagaacagctgatgggtgccgtcgtgatggagaagcccaacatacggtggaacgacgtggccgggctggagggggccaaggaggccctcaaagaagctgtcattttgccaatcaaattcccacacttgttcacaggcaagcgcaccccctggcgggggattctgctgttcggaccccctggcacagggaaatcctacctggccaaagccgtggcaacagaggccaacaactccaccttcttctctgtgtcctcctcagatctgatgtccaagtggctgggggagagtgaaaagctggtcaagaacctgtttgagctggccaggcagcacaagccctccatcatcttcatcgatgaggtggattccctctgcgggtcccgaaatgaaaatgagagtgaggccgcccggaggatcaaaacggagttcttggtccagatgcagggggtggggaataacaatgatgggactctggttcttggagccacaaacatcccatgggtgttggattcggccatcaggaggaggtttgaaaaacgaatttatatccccttgccggaggaagctgcccgcgcccagatgttccggttgcatctcgggagcactccccacaacctcacggatgcaaacatccacgagctggcccggaagacggaaggctactcgggcgcggacatcagcatcatcgtgcgggactctctcatgcagcccgtgaggaaggtgcagtcggccacacacttcaaaaaggtgagtgcccgcggccactgctgagaaaaatctcatagtaagagcgggatgttcggttttttttttcccagctcctggtcctgctccccggctgctcaggtgacacagtctctgaggcctcctggagagccgagggccagtgccatgggggctgcacccactgtcccctccctgcagctcttctggagtgtggccatctcagggtgtgtgaaagcagaggacagggccactttactgtcttaaccctgctgcggcctcctccgtcagcactgtgtgctcttgtgcggggtggacaccaaatcagtgtttggaaagtgttggatataaaatgaccaggaagacctgtctattcattcagcagatctctgctgagtatttgctgtgggtcctcctgtgtgcccggccctgtcctaagtgctgggaagatatgagtgaccaacagacaaaaatcctagaccttccgttgttggtggggagacagtcaacacagtcagtgagtgtctcagaggatggagatggagcagggttaggagagaggtgtctcgggcatggagggaagggcagatggcactggggtgatgcctgagacaggaggtgaaggtgtgagggaatgagccttgtggacattgggggaatgttttgccaaggcagcggacttcagttggaaaaccactttgtgttaatctattttcatgctgctgataaagacatacccgagactgggaagaaaaagaggtttaattggccttacagttccacatggctagggaggcctcagaatcatggtaggagaccaaaggcacttcttacatgctggtggcaagagaaaatgaagaaacaaaagtggaaacccctgataaacccatcagatctcgtgagacttcaccatcacgagaatagcacgggaaagaccagcccccatgattcagttacctccccctgggtccctcccacaacatgtgggaattctgggagatagatacagttcaagttgaaatgtgggtgggggcacagctaaaccatatcacacttttaatgtcactgtattcctggtgagacgtgacagtgttaatgaggaagacatcaaggcattggggctacagattgccagagtcccatgcaaatcatgagtcgctcggaccacccagcccgagttctgaaggagcccgtcctcctcagatgctagggacccacagagcattctctttgggacttccttagagaccggaggggtcgagcccctctgacactgaggggcagctgccccagtcagatccatttggtttcaggtctgtggcccctctcgcaccaaccccagcatgatgattgatgacctcctgactccatgctcaccaggggacccaggagccatggagatgacttggatggatgtccctggggacaaactcttagagcctgtggtttgcatgtcggacatgctgcggtctctggccaccacccggcccacggtgaatgcagacgacctcctgaaagtgaagaaattctcagaggactttgggcaagagagttaaaagctgcttcacttgggcaatggtgaaggtgggaggttgattggggcaaatccaggcactccccatgtcaacagccagacagggctccagggcttgtcccagtcaatacagagttccctctgctgtctggccgtctgccagggagccagaaggaagggccttgcagccacagagacactccactgccctggggcacacagtggacactgctcttcctacttcctcctctcctggatgctcatcagctccttctgcctcccccccttttttttccatcttttgttcccctaaattaatgctgcttggattttcatcttatttataaagataaaatcacctggaagtgtcaaggagtggggcggggtggcgggggagaagcagccgtgctgccaggtcacccagacctccagacagccggctagccccactgcccgttccttttacgcccaagttttgctccttgagagcagattggctgatgcccctgcaaccccagcccaagctctgcctcaaagaccgagtgacataagccattcccaccctcctaggttcacatccagggctgtgtcttccttgggggaggagatggtgtcgtttagatcagggtaaggcagtcaggcgggtgttcaccactgccttttcttcctctgagcgtgagaacactgaacccagccactgcccctgggtccctgtcctggaaatggtctaataaatccttttcccttcttgagctacccaagtgatctcatctttccttgactcttaactgagactctgaagggccacccttgcttccaattaaaagaccctctggttttcagt

SEQ ID NO: 365159 - DNA, 2530 bp, Homo sapiens
accgctctgggctgcgctcctcgcttgccctcggactcggctcccgctgcgagcggccgccctgcccgcgcaccgcgctcagcgcccaccgccgggcttcccgcgccggacccagtacctcggctccccggggccggaccgaggccgcaagcagcgccgcggggtgtggggcggacccaggagatgaaatgacaacgtcaaccctccagaaagccattgatctggtgacgaaagccacagaggaggacaaagccaagaactacgaggaggcgctgcggctgtaccagcatgcggtggagtacttcctccacgctatcaagtatgaggcccacagcgacaaggccaaggagagcattcgagccaagtgcgtgcagtacctagaccgggccgagaagctgaaggattatttacgaagcaaagagaaacacggcaagaagccagtcaaagagaaccagagtgagggcaagggcagtgacagtgacagtgaaggggataatccggagaaaaagaaactgcaagaacagctgatgggtgccgtcgtgatggagaagcccaacatacggtggaacgacgtggccgggctggagggggccaaggaggccctcaaagaagctgtcattttgccaatcaaattcccacacttgttcacaggcaagcgcaccccctggcgggggattctgctgttcggaccccctggcacagggaaatcctacctggccaaagccgtggcaacagaggccaacaactccaccttcttctctgtgtcctcctcagatctgatgtccaagtggctgggggagagtgaaaagctggtcaagaacctgtttgagctggccaggcagcacaagccctccatcatcttcatcgatgaggtggattccctctgcgggtcccgaaatgaaaatgagagtgaggccgcccggaggatcaaaacggagttcttggtccagatgcagggggtggggaataacaatgatgggactctggttcttggagccacaaacatcccatgggtgttggattcggccatcaggaggaggtttgaaaaacgaatttatatccccttgccggaggaagctgcccgcgcccagatgttccggttgcatctcgggagcactccccacaacctcacggatgcaaacatccacgagctggcccggaagacggaaggctactcgggcgcggacatcagcatcatcgtgcgggactctctcatgcagcccgtgaggaaggtgcagtcggccacacacttcaaaaaggtctgtggcccctctcgcaccaaccccagcatgatgattgatgacctcctgactccatgctcaccaggggacccaggagccatggagatgacttggatggatgtccctggggacaaactcttagagcctgtggtttgcatgtcggacatgctgcggtctctggccaccacccggcccacggtgaatgcagacgacctcctgaaagtgaagaaattctcagaggactttgggcaagagagttaaaagctgcttcacttgggcaatggtgaaggtgggaggttgattggggcaaatccaggcactccccatgtcaacagccagacagggctccagggcttgtcccagtcaatacagagttccctctgctgtctggccgtctgccagggagccagaaggaagggccttgcagccacagagacactccactgccctggggcacacagtggacactgctcttcctacttcctcctctcctggatgctcatcagctccttctgcctcccccccttttttttccatcttttgttcccctaaattaatgctgcttggattttcatcttatttataaagataaaatcacctggaagtgtcaaggagtggggcggggtggcgggggagaagcagccgtgctgccaggtcacccagacctccagacagccggctagccccactgcccgttccttttacgcccaagttttgctccttgagagcagattggctgatgcccctgcaaccccagcccaagctctgcctcaaagaccgagtgacataagccattcccaccctcctaggttcacatccagggctgtgtcttccttgggggaggagatggtgtcgtttagatcagggtaaggcagtcaggcgggtgttcaccactgccttttcttcctctgagcgtgagaacactgaacccagccactgcccctgggtccctgtcctggaaatggtctaataaatccttttcccttcttgagctaaaaaaaaaaaaaaaaaaaaaaaaaaaaaaaaaaaaaaaaaaaaaaaaaaaaaggggggggggggtaaaaatccccgggggggcgccacaatgtgacgggcgaccccacagttttgttgttcacacaggggcggccacaaataagaggagagcgttataaaacgacgagaacgggaggcccgtgtataaacaacgggggggacggagacaaaacgctacccggggccacagtgagagagacacccacacgcgggcggggcactacgggcaacagcaaccccgaaaagattaagcg

SEQ ID NO: 365160 - DNA, 2271 bp, Homo sapiens
accgctctgggctgcgctcctcgcttgccctcggactcggctcccgctgcgagcggccgccctgcccgcgcaccgcgctcagcgcccaccgccgggcttcccgcgccggacccagtacctcggctccccggggccggaccgaggccgcaagcagcgccgcggggtgtggggcggacccaggagatgaaatgacaacgtcaaccctccagaaagccattgatctggtgacgaaagccacagaggaggacaaagccaagaactacgaggaggcgctgcggctgtaccagcatgcggtggagtacttcctccacgctatcaagtatgaggcccacagcgacaaggccaaggagagcattcgagccaagtgcgtgcagtacctagaccgggccgagaagctgaaggattatttacgaagcaaagagaaacacggcaagaagccagtcaaagagaaccagagtgagggcaagggcagtgacagtgacagtgaaggggataatccggagaaaaagaaactgcaagaacagctgatgggtgccgtcgtgatggagaagcccaacatacggtggaacgacgtggccgggctggagggggccaaggaggccctcaaagaagctgtcattttgccaatcaaattcccacacttgttcacaggcaagcgcaccccctggcgggggattctgctgttcggaccccctggcacagggaaatcctacctggccaaagccgtggcaacagaggccaacaactccaccttcttctctgtgtcctcctcagatctgatgtccaagtggctgggggagagtgaaaagctggtcaagaacctgtttgagctggccaggcagcacaagccctccatcatcttcatcgatgaggtggattccctctgcgggtcccgaaatgaaaatgagagtgaggccgcccggaggatcaaaacggagttcttggtccagatgcagggggtggggaataacaatgatgggactctggttcttggagccacaaacatcccatgggtgttggattcggccatcaggaggaggtttgaaaaacgaatttatatccccttgccggaggaagctgcccgcgcccagatgttccggttgcatctcgggagcactccccacaacctcacggatgcaaacatccacgagctggcccggaagacggaaggctactcgggcgcggacatcagcatcatcgtgcgggactctctcatgcagcccgtgaggaaggtgcagtcggccacacacttcaaaaaggtctgtggcccctctcgcaccaaccccagcatgatgattgatgacctcctgactccatgctcaccaggggacccaggagccatggagatgacttggatggatgtccctggggacaaactcttagagcctgtggtttgcatgtcggacatgctgcggtctctggccaccacccggcccacggtgaatgcagacgacctcctgaaagtgaagaaattctcagaggactttgggcaagagagttaaaagcactccccatgtcaacagccagacagggctccagggcttgtcccagtcaatacagagttccctctgctgtctggccgtctgccagggagccagaaggaagggccttgcagccacagagacactccactgccctggggcacacagtggacactgctcttcctacttcctcctctcctggatgctcatcagctccttctgcctcccccccttttttttccatcttttgttcccctaaattaatgctgcttggattttcatcttatttataaagataaaatcacctggaagtgtcaaggagtggggcggggtggcgggggagaagcagccgtgctgccaggtcacccagacctccagacagccggctagccccactgcccgttccttttacgcccaagttttgctccttgagagcagattggctgatgcccctgcaaccccagcccaagctctgcctcaaagaccgagtgacataagccattcccaccctcctaggttcacatccagggctgtgtcttccttgggggaggagatggtgtcgtttagatcagggtaaggcagtcaggcgggtgttcaccactgccttttcttcctctgagcgtgagaacactgaacccagccactgcccctgggtccctgtcctggaaatggtctaataaatccttttcccttcttgagctacccaagtgatctcatctttccttgactcttaactgagactctgaagggccacccttgcttccaattaaaagaccctctggttttcagt

SEQ ID NO: 365161 - DNA, 3313 bp, Homo sapiens
accgctctgggctgcgctcctcgcttgccctcggactcggctcccgctgcgagcggccgccctgcccgcgcaccgcgctcagcgcccaccgccgggcttcccgcgccggacccagtacctcggctccccggggccggaccgaggccgcaagcagcgccgcggggtgtggggcggacccaggagatgaaatgacaacgtcaaccctccagaaagccattgatctggtgacgaaagccacagaggaggacaaagccaagaactacgaggaggcgctgcggctgtaccagcatgcggtggagtacttcctccacgctatcaagtatgaggcccacagcgacaaggccaaggagagcattcgagccaagtgcgtgcagtacctagaccgggccgagaagctgaaggattatttacgaagcaaagagaaacacggcaagaagccagtcaaagagaaccagagtgagggcaagggcagtgacagtgacagtgaaggggataatccggagaaaaagaaactgcaagaacagctgatgggtgccgtcgtgatggagaagcccaacatacggtggaacgacgtggccgggctggagggggccaaggaggccctcaaagaagctgtcattttgccaatcaaattcccacacttgttcacaggcaagcgcaccccctggcgggggattctgctgttcggaccccctggcacagggaaatcctacctggccaaagccgtggcaacagaggccaacaactccaccttcttctctgtgtcctcctcagatctgatgtccaagtggctgggggagagtgaaaagctggtcaagaacctgtttgagctggccaggcagcacaagccctccatcatcttcatcgatgaggtggattccctctgcgggtcccgaaatgaaaatgagagtgaggccgcccggaggatcaaaacggagttcttggtccagatgcagggggtggggaataacaatgatgggactctggttcttggagccacaaacatcccatgggtgttggattcggccatcaggaggaggtttgaaaaacgaatttatatccccttgccggaggaagctgcccgcgcccagatgttccggttgcatctcgggagcactccccacaacctcacggatgcaaacatccacgagctggcccggaagacggaaggctactcgggcgcggacatcagcatcatcgtgcgggactctctcatgcagcccgtgaggaaggtgcagtcggccacacacttcaaaaaggtgagtgcccgcggccactgctgagaaaaatctcatagtaagagcgggatgttcggttttttttttcccagctcctggtcctgctccccggctgctcaggtgacacagtctctgaggcctcctggagagccgagggccagtgccatgggggctgcacccactgtcccctccctgcagctcttctggagtgtggccatctcagggtgtgtgaaagcagaggacagggccactttactgtcttaaccctgctgcggcctcctccgtcagcactgtgtgctcttgtgcggggtggacaccaaatcagtgtttggaaagtgttggatataaaatgaccaggaagacctgtctattcattcagcagatctctgctgagtatttgctgtgggtcctcctgtgtgcccggccctgtcctaagtgctgggaagatatgagtgaccaacagacaaaaatcctagaccttccgttgttggtggggagacagtcaacacagtcagtgagtgtctcagaggatggagatggagcagggttaggagagaggtgtctcgggcatggagggaagggcagatggcactggggtgatgcctgagacaggaggtgaaggtgtgagggaatgagccttgtggacattgggggaatgttttgccaaggcagcggacttcagttggaaaaccactttgtgttaatctattttcatgctgctgataaagacatacccgagactgggaagaaaaagaggtttaattggccttacagttccacatggctagggaggcctcagaatcatggtaggagaccaaaggcacttcttacatgctggtggcaagagaaaatgaagaaacaaaagtggaaacccctgataaacccatcagatctcgtgagacttcaccatcacgagaatagcacgggaaagaccagcccccatgattcagttacctccccctgggtccctcccacaacatgtgggaattctgggagatagatacagttcaagttgaaatgtgggtgggggcacagctaaaccatatcacacttttaatgtcactgtattcctggtgagacgtgacagtgttaatgaggaagacatcaaggcattggggctacagattgccagagtcccatgcaaatcatgagtcgctcggaccacccagcccgagttctgaaggagcccgtcctcctcagatgctagggacccacagagcattctctttgggacttccttagagaccggaggggtcgagcccctctgacactgaggggcagctgccccagtcagatccatttggtttcaggtctgtggcccctctcgcaccaaccccagcatgatgattgatgacctcctgactccatgctcaccaggggacccaggagccatggagatgacttggatggatgtccctggggacaaactcttagagcctgtggtttgcatggtaagtgacttgacaggggagggaagagggctgcacagagcccagaaaattgagggtttgggtccagaataaaaacggtcttctccaggccaggcatggtagctcacgcctgtaatcccagcactttgggaggccagggtgggcagatcacaaggttaggagttcgagaccagcctagccaatatggagaaaccctgtctctactaaaaatacaaaaattagccgggtgtggtggtgtgcacttgtagtcccagctactcagcgtggcctcccaaagtgctgggattacaagcatgagctgagccaccacacctagcctgcattttatattctttagcaagtaaagtcaggtccagataatatgacgtcaatccatgggtttggctttgcggtgcagtgaggcagtgaatgtgtcaagactgtgacgcagttgcaaaggcagcgcctcacctgcatagcctggcccgtgccatcctggcaagggtctgcccttgtggctggtgttgggggtgtgcagctaagaaggctcctggccgggcgccgtggctcccgcctgtaatcccagcattttgtacatacagagaaaggctagatgcagtggtgcagtgatagctcactgcaggc

SEQ ID NO: 365162 - DNA, 1375 bp, Homo sapiens
accgctctgggctgcgctcctcgcttgccctcggactcggctcccgctgcgagcggccgccctgcccgcgcaccgcgctcagcgcccaccgccgggcttcccgcgccggacccagtacctcggctccccggggccggaccgaggccgcaagcagcgccgcggggtgtggggcggacccaggagatgaaatgacaacgtcaaccctccagaaagccattgatctggtgacgaaagccacagaggaggacaaagccaagaactacgaggaggcgctgcggctgtaccagcatgcggtggagtacttcctccacgctatcaagtatgaggcccacagcgacaaggccaaggagagcattcgagccaagtgcgtgcagtacctagaccgggccgagaagctgaaggattatttacgaagcaaagagaaacacggcaagaagccagtcaaagagaaccagagtgagggcaagggcagtgacagtgacagtgaaggggataatccggagaaaaagaaactgcaagaacagctgatgggtgccgtcgtgatggagaagcccaacatacggtggaacgacgtggccgggctggagggggccaaggaggccctcaaagaagctgtcattttgccaatcaaattcccacacttgttcacaggcaagcgcaccccctggcgggggattctgctgttcggaccccctggcacagggaaatcctacctggccaaagccgtggcaacagaggccaacaactccaccttcttctctgtgtcctcctcagatctgatgtccaagtggctgggggagagtgaaaagctggtcaagaacctgtttgagctggccaggcagcacaagccctccatcatcttcatcgatgaggtggattccctctgcgggtcccgaaatgaaaatgagagtgaggccgcccggaggatcaaaacggagttcttggtccagatgcagggggtggggaataacaatgatgggactctggttcttggagccacaaacatcccatgggtgttggattcggccatcaggaggaggtttgaaaaacgaatttatatccccttgccggaggaagctgcccgcgcccagatgttccggttgcatctcgggagcactccccacaacctcacggatgcaaacatccacgagctggcccggaagacggaaggctactcgggcgcggacatcagcatcatcgtgcgggactctctcatgcagcccgtgaggaaggtgcagtcggccacacacttcaaaaaggtctgtggcccctctcgcaccaaccccagcatgatgattgatgacctcctgactccatgtgcccctgggtccctgtcctggaaatggtctaataaatccttttcccttcttgagct

SEQ ID NO: 365163 - DNA, 1161 bp, Homo sapiens
accgctctgggctgcgctcctcgcttgccctcggactcggctcccgctgcgagcggccgccctgcccgcgcaccgcgctcagcgcccaccgccgggcttcccgcgccggacccagtacctcggctccccggggccggaccgaggccgcaagcagcgccgcggggtgtggggcggacccaggagatgaaatgacaacgtcaaccctccagaaagccattgatctggtgacgaaagccacagaggaggacaaagccaagaactacgaggaggcgctgcggctgtaccagcatgcggtggagtacttcctccacgctatcaagtatgaggcccacagcgacaaggccaaggagagcattcgagccaagtgcgtgcagtacctagaccgggccgagaagctgaaggattatttacgaagcaaagagaaacacggcaagaagccagtcaaagagaaccagagtgagggcaagggcagtgacagtgacagtgaaggggataatccggagaaaaagaaactgcaagaacagctgatgggtgccgtcgtgatggagaagcccaacatacggtggaacgacgtggccgggctggagggggccaaggaggccctcaaagaagctgtcattttgccaatcaaattcccacacttgttcacaggcaagcgcaccccctggcgggggattctgctgttcggaccccctggcacagggaaatcctacctggccaaagccgtggcaacagaggccaacaactccaccttcttctctgtgtcctcctcagatctgatgtccaagtggctgggggagagtgaaaagctggtcaagaacctgtttgagctggccaggcagcacaagccctccatcatcttcatcgatgaggtggattccctctgcgggtcccgaaatgaaaatgagagtgaggccgcccggaggatcaaaacggagttcttggtccagatgcagggggtggggaataacaatgatgggactctggttcttggagccacaaacatcccatgggtgttggattcggccatcaggaggaggtgagtcttccccaggagaagccatggtcacggtccgcctgctgctggcagcccgggtgcagcctggccccttttccctggagtctttcccgtctgcctgccaagcagagccctttgtgagg

SEQ ID NO: 365164 - DNA, 5548 bp, Homo sapiens
aagttttggagcgccggacaagctgaggtccgcgactcgtcgctaagattccccaaaactgagatttcaagaaaattcaccctttccgctttctttggcgcccttcaaccgtgaaggaaatgaaggttgagaacctggaacccgcttccaaagaccaagccctttctctgtgcctcacaacagtcttgcgctgtagctgtttttattacccctattttactactggggaggagatttgaggtcctgaaagtgaagtgacttgctggacgtcacttagcagaggagatggcgaaacctggattagaggcgatgccttctaactcccagcgtggacttgcctcctttcctgggggtgactgaatgcccagccagggacgcgacgtctctggccagcagaaatacggcctcctccccgccgactgggcaaagggggaccttgcggccaaggagggattcgcaggcgggccgggggtgggagcgggggccggagccggagccttggcccgcccccgggcggcgctgtgattggccggccgctccggcgggcgtcgcgattggccgtcctgcagccgttgagatttgaactcggtatttgtggctttgcccgcgcgttgccagactcagaggcggccctttgcctctgcctgccggggattggccggattctccgccgacttgaaaactgccttgctaattggtgcgtgttgtgcacgcgtgttttttccttttcatttcagcctgactgccggaatcagagccgcgggtgagatccccagccctgtgagcctgtaggagtagaatggctccccaaatgtatgagttccatctgccattatccccagaggagttgttgaaaagtggaggggtgaatcagtatgttgtgcaagaggtactgtccatcaaacatcttccaccacagcttagagcttttcaggctgcctttcgagctcaggggcccctggctatgctgcagcactttgatactatctacagcattttgcatcactttcgaagtatagatcctggcctcaaagaagatactctggaattcctgataaaagtggtatcccgccactcccaggagcttccagctatcctggatgatacaactttgagtggatcagatagaaacgcccatctaaatgccctcaaaatgaactgttatgctctgatacgtctcctggaatcctttgagaccatggccagccagacaaaccttgtggacctggaccttggtgggaagggtaagaaagctcggaccaaggcagcccatggctttgactgggaagaagagaggcaaccaattcttcagcttttaacacagctacttcagttggacatccgtcacctgtggaaccactcaataattgaagaagaatttgtcagtttggttactggctgttgctaccgccttctggagaatcccaccattaatcaccagaagaaccgccccactcgggaagccataacacacctgcttggtgtagccttgacccgttataaccatatgctcagtgctacagtgaagatcatccagatgctgcagcactttgaacacctggcacctgtactggttgcagccgtgagtctatgggcaactgactatggaatgaagagcatagtgggagagattgtaagagagattggacaaaagtgtccccaagagctgagtcgagacccttcagggacaaagggctttgcagcattcctgacagaactagcagaacgtgtcccagctatcctgatgtccagcatgtgcattttgctagatcacctggatggagaaaattacatgatgcgtaatgctgtgctggcagccatggcggagatggtgctgcaggttctcagtggcgatcaactggaagcagcagcccgagacaccagagaccagttcttggatactttacaagcccatggccatgatgtcaactcctttgtgcggagccgtgttttgcagctcttcacccgaattgtccagcagaaggctctccccctgacacgtttccaggcagtggtggctttagctgtgggacgtctggcagacaagtcagtgctagtatgtaaaaatgccatccagctgctggccagttttctagccaataatcctttctcctgcaagcttagtgatgctgaccttgccggaccactgcagaaggagacccagaaattacaagagatgagggcccagaggcgaactgcagcagcttctgcagtgctggacccagaggaggagtgggaagccatgctgccagagttgaagtctaccctgcagcagcttctacagcttccccagggagaggaggagattcctgagcaaattgccaatacagagacaactgaagatgtgaaaggacgcatctatcaactgcttgccaaagctagttacaaaaaggccatcattctcactcgagaagccacaggccacttccaggagtccgaacccttcagtcatatagacccagaggagtcagaggagaccaggctcttgaatatcttaggacttatcttcaaaggcccagcagcttccacacaagaaaagaatccccgggagtctacaggaaacatggtcacaggacagactgtctgtaaaaataaacccaatatgtcggatcctgaggaatccaggggaaatgatgaactagtgaagcaggagatgctggtacagtatctgcaggatgcctacagcttctcccggaagattacagaggccattggcataatcagcaagatgatgtatgaaaacacaactacagtggtgcaggaggtgattgaattctttgtgatggtcttccaatttggggtaccccaggccctgtttggggtgcgccgtatgctgcctctcatctggtctaaggagcctggtgtccgggaagccgtgcttaatgcctaccgccaactctacctcaaccccaaaggggactctgccagagccaaggcccaggctttgattcagaatctctctctgctgctagtggatgcctcggttgggaccattcagtgtcttgaggaaattctctgtgagtttgtgcagaaggatgagttgaaaccagcagtgacccagctgctgtgggagcgggccaccgagaaggtcgcctgctgtcctctggagcgctgttcctctgtcatgcttcttggcatgatggcacgaggaaagccagaaattgtgggaagcaatttagacacactggtgagcatagggctggatgagaagtttccacaggactacaggctggcccagcaggtgtgccatgccattgccaacatctcggacaggagaaagccttctctgggcaaacgtcacccccccttccggctgcctcaggaacacaggttgtttgagcgactgcgggagacagtcacaaaaggctttgtccacccagacccactctggatcccattcaaagaggtggcagtgaccctcatttaccaactggcagagggccccgaagtgatctgtgcccagatattgcagggctgtgcaaaacaggccctggagaagctagaagagaagagaaccagtcaggaggacccgaaggagtcccccgcaatgctccccactttcctgttgatgaacctgctgtccctggctggggatgtggctctgcagcagctggtccacttggagcaggcagtgagtggagagctctgccggcgccgagttctccgggaagaacaggagcacaagaccaaagatcccaaggagaagaatacgagctctgagaccaccatggaggaggagctggggctggttggggcaacagcagatgacacagaggcagaactaatccgtggcatctgcgagatggaactgttggatggcaaacagacactggctgcctttgttccactcttgcttaaagtctgtaacaacccaggcctctatagcaacccagacctctctgcagctgcttcacttgcccttggcaagttctgcatgatcagtgccactttctgcgactcccagcttcgtcttctgttcaccatgctggaaaagtctccacttcccattgtccggtctaacctcatggttgccactggggatctggccatccgctttcccaatctggtggacccctggactcctcatctgtatgctcgcctccgggaccctgctcagcaagtgcggaaaacagcggggctggtgatgacccacctgatcctcaaggacatggtgaaggtgaaggggcaggtcagcgagatggcggtgctgctcatcgaccccgagcctcagattgctgccctggccaagaacttcttcaatgagctctcccacaagggcaacgcaatctataatctccttccagatatcatcagccgcctgtcagaccccgagctgggggtggaggaagagcctttccacaccatcatgaaacagctcctctcctacatcaccaaggacaagcagacagagagcctggtggaaaagctgtgtcagcggttccgcacatcccgaactgagcggcagcagcgagacctggcctactgtgtgtcacagctgcccctcacagagcgaggcctccgtaagatgcttgacaattttgactgttttggagacaaactgtcagatgagtccatcttcagtgcttttttgtcagttgtgggcaagctgcgacgtggggccaagcctgagggcaaggctataatagatgaatttgagcagaagcttcgggcctgtcataccagaggtttggatggaatcaaggagcttgagattggccaagcaggtagccagagagcgccatcagccaagaaaccatccactggttctaggtaccagcctctggcttctacagcctcagacaatgactttgtcacaccagagccccgccgtactacccgtcggcatccaaacacccagcagcgagcttccaaaaagaaacccaaagttgtcttctcaagtgatgagtccagtgaggaagatctttcagcagagatgacagaagacgagacacccaagaaaacaactcccattctcagagcatcggctcgcaggcacagatcctaggaagtctgttcctgtcctccctgtgcagggtatcctgtagggtgacctggaattcgaattctgtttcccttgtaaaatatttgtctgtctctttttttaaaaaaaaaaaaaggccgggcactgtggctcacgcctgtaatcccagcactttgcgataccaaggcgggtggataacctgaggtagggagttcgagaccagcctgaccaacatggagaaaccccatctctactaaaaataaaaaattagccgggcgtattggcgtgcgcctgtaatcccagctactcaagaggctgaggcaggagaatcgcctgaacccagaggcggaggttgtagtgagccgaaatcacaccattgcactccagcttgggcaacaatagcgaacctccatctcaaattaaaaaaaaaatgcctacacgctctttaaaatgcaaggctttctcttaaattagcctaactgaactgcgttgagctgcttcaactttggaatatatgtttgccaatctccttgttttctaatgaataaatgtttttatatactttta

SEQ ID NO: 365165 - DNA, 429 bp, Homo sapiens
tgcaatctcggctcactgcaacctctgcctcccaggttcaagcgattctcctgcctcagccgaccaagtagctgggactacaggccctgaccaacatggagaaaccccatctctactaaaaataaaaaattagccgggcgtattggcgtgcgcctgtaatcccagctactcaagaggctgaggcaggagaatcgcctgaacccagaggcggaggttgtagtgagccgaaatcacaccattgcactccagcttgggcaacaatagcgaacctccatctcaaattaaaaaaaaaatgcctacacgctctttaaaatgcaaggctttctcttaaattagcctaactgaactgcgttgagctgcttcaactttggaatatatgtttgccaatctccttgttttctaatgaataaatgtttttatatactttta

SEQ ID NO: 365166 - DNA, 871 bp, Homo sapiens
tcttgtttgtttgtttttaatagtttttatttttcagagcagttttaggttcaaagcaaaattgagcagaaagtacagggagttcccttctaccccttgcccctacacatcacagccttccccaccttcaacatcctgcaccagggtggcacatttgttacagctgaacctacacttacacatcatctcctaaagtcatggtttaccttggagttcactgcacgtaatgacatgtacccaccattgcagtatcatacagaagagtttcactgccttacaaatcccctgcactccacctatttatccctctctccccacaacccctgatctttttactgttgccatcactttgtcttttccagaatgtatcattggaatgatccggtatggagccttctcaccttggcttcttagtaatgtgcgtttaaggcctccatgtcttccatggccttgtttctttttaatcagaagtaactgttttcaggcctgctctgaatctccttttctccctccaggctataatagatgaatttgagcagaagcttcgggcctgtcataccagaggtttggatggaatcaaggagcttgagattggccaagcaggtagccagagagcgccatcagccaagaaaccatccactggttctaggtaccagcctctggcttctacagcctcagacaatgactttgtcacaccagagccccgccgtactacccgtcggcatccaaacacccagcagcgagcttccaaaaagaaacccaaagttgtcttctcaagtgatgagtccagtgaggaagatctttcagctgagttcttaaagactgaagacaggctattctctggagaaaaataaaatggaaattgtcctta

SEQ ID NO: 365167 - DNA, 360 bp, Homo sapiens
agagtctggctctgttgcccaggctggagtgcagtggtgcaatcttggctcactgcaacctccgcctccctggttcaagcaattctcctgccccagctactcaagaggctgaggcaggagaatcgcctgaacccagaggcggaggttgtagtgagccgaaatcacaccattgcactccagcttgggcaacaatagcgaacctccatctcaaattaaaaaaaaaatgcctacacgctctttaaaatgcaaggctttctcttaaattagcctaactgaactgcgttgagctgcttcaactttggaatatatgtttgccaatctccttgttttctaatgaataaatgtttttatatactttta

SEQ ID NO: 365168 - DNA, 4936 bp, Homo sapiens
aagttttggagcgccggacaagctgaggtccgcgactcgtcgctaagattccccaaaactgagatttcaagaaaattcaccctttccgctttctttggcgcccttcaaccgtgaaggaaatgaagcctgactgccggaatcagagccgcgggtgagatccccagccctgtgagcctgtaggagtagaatggctccccaaatgtatgagttccatctgccattatccccagaggagttgttgaaaagtggaggggtgaatcagtatgttgtgcaagaggtactgtccatcaaacatcttccaccacagcttagagcttttcaggctgcctttcgagctcaggggcccctggctatgctgcagcactttgatactatctacagcattttgcatcactttcgaagtatagatcctggcctcaaagaagatactctggaattcctgataaaagtggtatcccgccactcccaggagcttccagctatcctggatgatacaactttgagtggatcagatagaaacgcccatctaaatgccctcaaaatgaactgttatgctctgatacgtctcctggaatcctttgagaccatggccagccagacaaaccttgtggacctggaccttggtgggaagggtaagaaagctcggaccaaggcagcccatggctttgactgggaagaagagaggcaaccaattcttcagcttttaacacagctacttcagttggacatccgtcacctgtggaaccactcaataattgaagaagaatttgtcagtttggttactggctgttgctaccgccttctggagaatcccaccattaatcaccagaagaaccgccccactcgggaagccataacacacctgcttggtgtagccttgacccgttataaccatatgctcagtgctacagtgaagatcatccagatgctgcagcactttgaacacctggcacctgtactggttgcagccgtgagtctatgggcaactgactatggaatgaagagcatagtgggagagattgtaagagagattggacaaaagtgtccccaagagctgagtcgagacccttcagggacaaagggctttgcagcattcctgacagaactagcagaacgtgtcccagctatcctgatgtccagcatgtgcattttgctagatcacctggatggagaaaattacatgatgcgtaatgctgtgctggcagccatggcggagatggtgctgcaggttctcagtggcgatcaactggaagcagcagcccgagacaccagagaccagttcttggatactttacaagcccatggccatgatgtcaactcctttgtgcggagccgtgttttgcagctcttcacccgaattgtccagcagaaggctctccccctgacacgtttccaggcagtggtggctttagctgtgggacgtctggcagacaagtcagtgctagtatgtaaaaatgccatccagctgctggccagttttctagccaataatcctttctcctgcaagcttagtgatgctgaccttgccggaccactgcagaaggagacccagaaattacaagagatgagggcccagaggcgaactgcagcagcttctgcagtgctggacccagaggaggagtgggaagccatgctgccagagttgaagtctaccctgcagcagcttctacagcttccccagggagaggaggagattcctgagcaaattgccaatacagagacaactgaagatgtgaaaggacgcatctatcaactgcttgccaaagctagttacaaaaaggccatcattctcactcgagaagccacaggccacttccaggagtccgaacccttcagtcatatagacccagaggagtcagaggagaccaggctcttgaatatcttaggacttatcttcaaaggcccagcagcttccacacaagaaaagaatccccgggagtctacaggaaacatggtcacaggacagactgtctgtaaaaataaacccaatatgtcggatcctgaggaatccaggggaaatgatgaactagtgaagcaggagatgctggtacagtatctgcaggatgcctacagcttctcccggaagattacagaggccattggcataatcagcaagatgatgtatgaaaacacaactacagtggtgcaggaggtgattgaattctttgtgatggtcttccaatttggggtaccccaggccctgtttggggtgcgccgtatgctgcctctcatctggtctaaggagcctggtgtccgggaagccgtgcttaatgcctaccgccaactctacctcaaccccaaaggggactctgccagagccaaggcccaggctttgattcagaatctctctctgctgctagtggatgcctcggttgggaccattcagtgtcttgaggaaattctctgtgagtttgtgcagaaggatgagttgaaaccagcagtgacccagctgctgtgggagcgggccaccgagaaggtcgcctgctgtcctctggagcgctgttcctctgtcatgcttcttggcatgatggcacgaggaaagccagaaattgtgggaagcaatttagacacactggtgagcatagggctggatgagaagtttccacaggactacaggctggcccagcaggtgtgccatgccattgccaacatctcggacaggagaaagccttctctgggcaaacgtcacccccccttccggctgcctcaggaacacaggttgtttgagcgactgcgggagacagtcacaaaaggctttgtccacccagacccactctggatcccattcaaagaggtggcagtgaccctcatttaccaactggcagagggccccgaagtgatctgtgcccagatattgcagggctgtgcaaaacaggccctggagaagctagaagagaagagaaccagtcaggaggacccgaaggagtcccccgcaatgctccccactttcctgttgatgaacctgctgtccctggctggggatgtggctctgcagcagctggtccacttggagcaggcagtgagtggagagctctgccggcgccgagttctccgggaagaacaggagcacaagaccaaagatcccaaggagaagaatacgagctctgagaccaccatggaggaggagctggggctggttggggcaacagcagatgacacagaggcagaactaatccgtggcatctgcgagatggaactgttggatggcaaacagacactggctgcctttgttccactcttgcttaaagtctgtaacaacccaggcctctatagcaacccagacctctctgcagctgcttcacttgcccttggcaagttctgcatgatcagtgccactttctgcgactcccagcttcgtcttctgttcaccatgctggaaaagtctccacttcccattgtccggtctaacctcatggttgccactggggatctggccatccgctttcccaatctggtggacccctggactcctcatctgtatgctcgcctccgggaccctgctcagcaagtgcggaaaacagcggggctggtgatgacccacctgatcctcaaggacatggtgaaggtgaaggggcaggtcagcgagatggcggtgctgctcatcgaccccgagcctcagattgctgccctggccaagaacttcttcaatgagctctcccacaagggcaacgcaatctataatctccttccagatatcatcagccgcctgtcagaccccgagctgggggtggaggaagagcctttccacaccatcatgaaacagctcctctcctacatcaccaaggacaagcagacagagagcctggtggaaaagctgtgtcagcggttccgcacatcccgaactgagcggcagcagcgagacctggcctactgtgtgtcacagctgcccctcacagagcgaggcctccgtaagatgcttgacaattttgactgttttggagacaaactgtcagatgagtccatcttcagtgcttttttgtcagttgtgggcaagctgcgacgtggggccaagcctgagggcaaggctataatagatgaatttgagcagaagcttcgggcctgtcataccagaggtttggatggaatcaaggagcttgagattggccaagcaggtagccagagagcgccatcagccaagaaaccatccactggttctaggtaccagcctctggcttctacagcctcagacaatgactttgtcacaccagagccccgccgtactacccgtcggcatccaaacacccagcagcgagcttccaaaaagaaacccaaagttgtcttctcaagtgatgagtccagtgaggaagatctttcagcagagatgacagaagacgagacacccaagaaaacaactcccattctcagagcatcggctcgcaggcacagatcctaggaagtctgttcctgtcctccctgtgcagggtatcctgtagggtgacctggaattcgaattctgtttcccttgtaaaatatttgtctgtctctttttttaaaaaaaaaaaaaggccgggcactgtggctcacgcctgtaatcccagcactttgcgataccaaggcgggtggataacctgaggtagggagttcgagaccagcctgaccaacatggagaaaccccatctctactaaaaataaaaaattagccgggcgtattggcgtgcgcctgtaatcccagctactcaagaggctgaggcaggagaatcgcctgaacccagaggcggaggttgtagtgagccgaaatcacaccattgcactccagcttgggcaacaatagcgaacctccatctcaaattaaaaaaaaaatgcctacacgctctttaaaatgcaaggctttctcttaaattagcctaactgaactgcgttgagctgcttcaactttggaatatatgtttgccaatctccttgttttctaatgaataaatgtttttatatactttta

SEQ ID NO: 365169 - DNA, 5469 bp, Homo sapiens
aagttttggagcgccggacaagctgaggtccgcgactcgtcgctaagattccccaaaactgagatttcaagaaaattcaccctttccgctttctttggcgcccttcaaccgtgaaggaaatgaaggttgagaacctggaacccgcttccaaagaccaagccctttctctgtgcctcacaacagtcttgcgctgtagctgtttttattacccctattttactactggggaggagatttgaggtcctgaaagtgaagtgacttgctggacgtcacttagcagaggagatggcgaaacctggattagaggcgatgccttctaactcccagcgtggacttgcctcctttcctgggggtgactgaatgcccagccagggacgcgacgtctctggccagcagaaatacggcctcctccccgccgactgggcaaagggggaccttgcggccaaggagggattcgcaggcgggccgggggtgggagcgggggccggagccggagccttggcccgcccccgggcggcgctgtgattggccggccgctccggcgggcgtcgcgattggccgtcctgcagccgttgagatttgaactcggtatttgtggctttgcccgcgcgttgccagactcagaggcggccctttgcctctgcctgccggggattggccggattctccgccgacttgaaaactgccttgctaattgccctgtgagcctgtaggagtagaatggctccccaaatgtatgagttccatctgccattatccccagaggagttgttgaaaagtggaggggtgaatcagtatgttgtgcaagaggtactgtccatcaaacatcttccaccacagcttagagcttttcaggctgcctttcgagctcaggggcccctggctatgctgcagcactttgatactatctacagcattttgcatcactttcgaagtatagatcctggcctcaaagaagatactctggaattcctgataaaagtggtatcccgccactcccaggagcttccagctatcctggatgatacaactttgagtggatcagatagaaacgcccatctaaatgccctcaaaatgaactgttatgctctgatacgtctcctggaatcctttgagaccatggccagccagacaaaccttgtggacctggaccttggtgggaagggtaagaaagctcggaccaaggcagcccatggctttgactgggaagaagagaggcaaccaattcttcagcttttaacacagctacttcagttggacatccgtcacctgtggaaccactcaataattgaagaagaatttgtcagtttggttactggctgttgctaccgccttctggagaatcccaccattaatcaccagaagaaccgccccactcgggaagccataacacacctgcttggtgtagccttgacccgttataaccatatgctcagtgctacagtgaagatcatccagatgctgcagcactttgaacacctggcacctgtactggttgcagccgtgagtctatgggcaactgactatggaatgaagagcatagtgggagagattgtaagagagattggacaaaagtgtccccaagagctgagtcgagacccttcagggacaaagggctttgcagcattcctgacagaactagcagaacgtgtcccagctatcctgatgtccagcatgtgcattttgctagatcacctggatggagaaaattacatgatgcgtaatgctgtgctggcagccatggcggagatggtgctgcaggttctcagtggcgatcaactggaagcagcagcccgagacaccagagaccagttcttggatactttacaagcccatggccatgatgtcaactcctttgtgcggagccgtgttttgcagctcttcacccgaattgtccagcagaaggctctccccctgacacgtttccaggcagtggtggctttagctgtgggacgtctggcagacaagtcagtgctagtatgtaaaaatgccatccagctgctggccagttttctagccaataatcctttctcctgcaagcttagtgatgctgaccttgccggaccactgcagaaggagacccagaaattacaagagatgagggcccagaggcgaactgcagcagcttctgcagtgctggacccagaggaggagtgggaagccatgctgccagagttgaagtctaccctgcagcagcttctacagcttccccagggagaggaggagattcctgagcaaattgccaatacagagacaactgaagatgtgaaaggacgcatctatcaactgcttgccaaagctagttacaaaaaggccatcattctcactcgagaagccacaggccacttccaggagtccgaacccttcagtcatatagacccagaggagtcagaggagaccaggctcttgaatatcttaggacttatcttcaaaggcccagcagcttccacacaagaaaagaatccccgggagtctacaggaaacatggtcacaggacagactgtctgtaaaaataaacccaatatgtcggatcctgaggaatccaggggaaatgatgaactagtgaagcaggagatgctggtacagtatctgcaggatgcctacagcttctcccggaagattacagaggccattggcataatcagcaagatgatgtatgaaaacacaactacagtggtgcaggaggtgattgaattctttgtgatggtcttccaatttggggtaccccaggccctgtttggggtgcgccgtatgctgcctctcatctggtctaaggagcctggtgtccgggaagccgtgcttaatgcctaccgccaactctacctcaaccccaaaggggactctgccagagccaaggcccaggctttgattcagaatctctctctgctgctagtggatgcctcggttgggaccattcagtgtcttgaggaaattctctgtgagtttgtgcagaaggatgagttgaaaccagcagtgacccagctgctgtgggagcgggccaccgagaaggtcgcctgctgtcctctggagcgctgttcctctgtcatgcttcttggcatgatggcacgaggaaagccagaaattgtgggaagcaatttagacacactggtgagcatagggctggatgagaagtttccacaggactacaggctggcccagcaggtgtgccatgccattgccaacatctcggacaggagaaagccttctctgggcaaacgtcacccccccttccggctgcctcaggaacacaggttgtttgagcgactgcgggagacagtcacaaaaggctttgtccacccagacccactctggatcccattcaaagaggtggcagtgaccctcatttaccaactggcagagggccccgaagtgatctgtgcccagatattgcagggctgtgcaaaacaggccctggagaagctagaagagaagagaaccagtcaggaggacccgaaggagtcccccgcaatgctccccactttcctgttgatgaacctgctgtccctggctggggatgtggctctgcagcagctggtccacttggagcaggcagtgagtggagagctctgccggcgccgagttctccgggaagaacaggagcacaagaccaaagatcccaaggagaagaatacgagctctgagaccaccatggaggaggagctggggctggttggggcaacagcagatgacacagaggcagaactaatccgtggcatctgcgagatggaactgttggatggcaaacagacactggctgcctttgttccactcttgcttaaagtctgtaacaacccaggcctctatagcaacccagacctctctgcagctgcttcacttgcccttggcaagttctgcatgatcagtgccactttctgcgactcccagcttcgtcttctgttcaccatgctggaaaagtctccacttcccattgtccggtctaacctcatggttgccactggggatctggccatccgctttcccaatctggtggacccctggactcctcatctgtatgctcgcctccgggaccctgctcagcaagtgcggaaaacagcggggctggtgatgacccacctgatcctcaaggacatggtgaaggtgaaggggcaggtcagcgagatggcggtgctgctcatcgaccccgagcctcagattgctgccctggccaagaacttcttcaatgagctctcccacaagggcaacgcaatctataatctccttccagatatcatcagccgcctgtcagaccccgagctgggggtggaggaagagcctttccacaccatcatgaaacagctcctctcctacatcaccaaggacaagcagacagagagcctggtggaaaagctgtgtcagcggttccgcacatcccgaactgagcggcagcagcgagacctggcctactgtgtgtcacagctgcccctcacagagcgaggcctccgtaagatgcttgacaattttgactgttttggagacaaactgtcagatgagtccatcttcagtgcttttttgtcagttgtgggcaagctgcgacgtggggccaagcctgagggcaaggctataatagatgaatttgagcagaagcttcgggcctgtcataccagaggtttggatggaatcaaggagcttgagattggccaagcaggtagccagagagcgccatcagccaagaaaccatccactggttctaggtaccagcctctggcttctacagcctcagacaatgactttgtcacaccagagccccgccgtactacccgtcggcatccaaacacccagcagcgagcttccaaaaagaaacccaaagttgtcttctcaagtgatgagtccagtgaggaagatctttcagcagagatgacagaagacgagacacccaagaaaacaactcccattctcagagcatcggctcgcaggcacagatcctaggaagtctgttcctgtcctccctgtgcagggtatcctgtagggtgacctggaattcgaattctgtttcccttgtaaaatatttgtctgtctctttttttaaaaaaaaaaaaaggccgggcactgtggctcacgcctgtaatcccagcactttgcgataccaaggcgggtggataacctgaggtagggagttcgagaccagcctgaccaacatggagaaaccccatctctactaaaaataaaaaattagccgggcgtattggcgtgcgcctgtaatcccagctactcaagaggctgaggcaggagaatcgcctgaacccagaggcggaggttgtagtgagccgaaatcacaccattgcactccagcttgggcaacaatagcgaacctccatctcaaattaaaaaaaaaatgcctacacgctctttaaaatgcaaggctttctcttaaattagcctaactgaactgcgttgagctgcttcaactttggaatatatgtttgccaatctccttgttttctaatgaataaatgtttttatatactttta

SEQ ID NO: 365170 - DNA, 5258 bp, Homo sapiens
aagttttggagcgccggacaagctgaggtccgcgactcgtcgctaagattccccaaaactgagatttcaagaaaattcaccctttccgctttctttggcgcccttcaaccgtgaaggaaatgaaggttgagaacctggaacccgcttccaaagaccaagccctttctctgtgcctcacaacagtcttgcgctgtagctgtttttattacccctattttactactggggaggagatttgaggtcctgaaagtgaagtgacttgctggacgtcacttagcagaggagatggcgaaacctggattagaggcgatgccttctaactcccagcgtggacttgcctcctttcctgggggtgactgaatgcccagccagggacgcgacgtctctggccagcagaaatacggcctcctccccgccgactgggcaaagggggaccttgcggccaaggagggattcgcaggcgggccgggggtgggagcgggggccggagccggagccttggcccgcccccgggcggcgctgtgattggccggccgctccggcgggcgtcgcgattggccgtcctgcagccgttgagatttgaactcggtatttgtggctttgcccgcgcgttgccagactcagaggcggccctttgcctctgcctgccggggattggccggattctccgccgacttgaaaactgccttgctaattggtgcgtgttgtgcacgcgtgttttttccttttcatttcagcctgactgccggaatcagagccgcgggtgagatccccagccctgtgagcctgtaggagtagaatggctccccaaatgtatgagttccatctgccattatccccagaggagttgttgaaaagtggaggggtgaatcagtatgttgtgcaagaggtactgtccatcaaacatcttccaccacagcttagagcttttcaggctgcctttcgagctcaggggcccctggctatgctgcagcactttgatactatctacagcattttgcatcactttcgaagtatagatcctggcctcaaagaagatactctggaattcctgataaaagtggtatcccgccactcccaggagcttccagctatcctggatgatacaactttgagtggatcagatagaaacgcccatctaaatgccctcaaaatgaactgttatgctctgatacgtctcctggaatcctttgagaccatggccagccagacaaaccttgtggacctggaccttggtgggaagggtaagaaagctcggaccaaggcagcccatggctttgactgggaagaagagaggcaaccaattcttcagcttttaacacagctacttcagttggacatccgtcacctgtggaaccactcaataattgaagaagaatttgtcagtttggttactggctgttgctaccgccttctggagaatcccaccattaatcaccagaagaaccgccccactcgggaagccataacacacctgcttggtgtagccttgacccgttataaccatatgctcagtgctacagtgaagatcatccagatgctgcagcactttgaacacctggcacctgtactggttgcagccgtgagtctatgggcaactgactatggaatgaagagcatagtgggagagattgtaagagagattggacaaaagtgtccccaagagctgagtcgagacccttcagggacaaagggctttgcagcattcctgacagaactagcagaacgtgtcccagctatcctgatgtccagcatgtgcattttgctagatcacctggatggagaaaattacatgatgcgtaatgctgtgctggcagccatggcggagatggtgctgcaggttctcagtggcgatcaactggaagcagcagcccgagacaccagagaccagttcttggatactttacaagcccatggccatgatgtcaactcctttgtgcggagccgtgttttgcagctcttcacccgaattgtccagcagaaggctctccccctgacacgtttccaggcagtggtggctttagctgtgggacgtctggcagacaagtcagtgctagtatgtaaaaatgccatccagctgctggccagttttctagccaataatcctttctcctgcaagcttagtgatgctgaccttgccggaccactgcagaaggagacccagaaattacaagagatgagggcccagaggcgaactgcagcagcttctgcagtgctggacccagaggaggagtgggaagccatgctgccagagttgaagtctaccctgcagcagcttctacagcttccccagggagaggaggagattcctgagcaaattgccaatacagagacaactgaagatgtgaaaggacgcatctatcaactgcttgccaaagctagttacaaaaaggccatcattctcactcgagaagccacaggccacttccaggagtccgaacccttcagtcatatagacccagaggagtcagaggagaccaggctcttgaatatcttaggacttatcttcaaaggcccagcagcttccacacaagaaaagaatccccgggagtctacaggaaacatggtcacaggacagactgtctgtaaaaataaacccaatatgtcggatcctgaggaatccaggggaaatgatgaactagtgaagcaggagatgctggtacagtatctgcaggatgcctacagcttctcccggaagattacagaggccattggcataatcagcaagatgatgtatgaaaacacaactacagtggtgcaggaggtgattgaattctttgtgatggtcttccaatttggggtaccccaggccctgtttggggtgcgccgtatgctgcctctcatctggtctaaggagcctggtgtccgggaagccgtgcttaatgcctaccgccaactctacctcaaccccaaaggggactctgccagagccaaggcccaggctttgattcagaatctctctctgctgctagtggatgcctcggttgggaccattcagtgtcttgaggaaattctctgtgagtttgtgcagaaggatgagttgaaaccagcagtgacccagctgctgtgggagcgggccaccgagaaggtcgcctgctgtcctctggagcgctgttcctctgtcatgcttcttggcatgatggcacgaggaaagccagaaattgtgggaagcaatttagacacactggtgagcatagggctggatgagaagtttccacaggactacaggctggcccagcaggtgtgccatgccattgccaacatctcggacaggagaaagccttctctgggcaaacgtcacccccccttccggctgcctcaggaacacaggttgtttgagcgactgcgggagacagtcacaaaaggctttgtccacccagacccactctggatcccattcaaagaggtggcagtgaccctcatttaccaactggcagagggccccgaagtgatctgtgcccagatattgcagggctgtgcaaaacaggccctggagaagctagaagagaagagaaccagtcaggaggacccgaaggagtcccccgcaatgctccccactttcctgttgatgaacctgctgtccctggctggggatgtggctctgcagcagctggtccacttggagcaggcagtgagtggagagctctgccggcgccgagttctccgggaagaacaggagcacaagaccaaagatcccaaggagaagaatacgagctctgagaccaccatggaggaggagctggggctggttggggcaacagcagatgacacagaggcagaactaatccgtggcatctgcgagatggaactgttggatggcaaacagacactggctgcctttgttccactcttgcttaaagtctgtaacaacccaggcctctatagcaacccagacctctctgcagctgcttcacttgcccttggcaagttctgcatgatcagtgccactttctgcgactcccagcttcgtcttctgttcaccatgctggaaaagtctccacttcccattgtccggtctaacctcatggttgccactggggatctggccatccgctttcccaatctggtggacccctggactcctcatctgtatgctcgcctccgggaccctgctcagcaagtgcggaaaacagcggggctggtgatgacccacctgatcctcaaggacatggtgaaggtgaaggggcaggtcagcgagatggcggtgctgctcatcgaccccgagcctcagattgctgccctggccaagaacttcttcaatgagctctcccacaagggcaacgcaatctataatctccttccagatatcatcagccgcctgtcagaccccgagctgggggtggaggaagagcctttccacaccatcatgaaacagctcctctcctacatcaccaaggacaagcagacagagagcctggtggaaaagctgtgtcagcggttccgcacatcccgaactgagcggcagcagcgagacctggcctactgtgtgtcacagctgcccctcacagagcgaggcctccgtaagatgcttgacaattttgactgttttggagacaaactgtcagatgagtccatcttcagtgcttttttgtcagttgtgggcaagctgcgacgtggggccaagcctgagggcaaggctataatagatgaatttgagcagaagcttcgggcctgtcataccagaggtttggatggaatcaaggagcttgagattggccaagcaggtagccagagagcgccatcagccaagaaaccatccactggttctaggtaccagcctctggcttctacagcctcagacaatgactttgtcacaccagagccccgccgtactacccgtcggcatccaaacacccagcagcgagcttccaaaaagaaacccaaagttgtcttctcaagtgatgagtccagtgaggaagatctttcagcagagatgacagaagacgagacacccaagaaaacaactcccattctcagagcatcggctcgcaggcacagatcctaggaagtctgttcctgtcctccctgtgcagggtatcctgtagggtgacctggaattcgaattctgtttcccttgtaaaatatttgtctgtctctttttttaaaaaaaaaaaaaggccgggcactgtggctcacgcctgtaatcccagcactttgcgataccaaggcgggtggataacctgaggtagggagttcgagaccagctattaccctgaacactgtctggggtatacaaattgtttaaagtataaagtagg

SEQ ID NO: 365171 - DNA, 5492 bp, Homo sapiens
aagttttggagcgccggacaagctgaggtccgcgactcgtcgctaagattccccaaaactgagatttcaagaaaattcaccctttccgctttctttggcgcccttcaaccgtgaaggaaatgaaggttgagaacctggaacccgcttccaaagaccaagccctttctctgtgcctcacaacagtcttgcgctgtagctgtttttattacccctattttactactggggaggagatttgaggtcctgaaagtgaagtgacttgctggacgtcacttagcagaggagatggcgaaacctggattagaggcgatgccttctaactcccagcgtggacttgcctcctttcctgggggtgactgaatgcccagccagggacgcgacgtctctggccagcagaaatacggcctcctccccgccgactgggcaaagggggaccttgcggccaaggagggattcgcaggcgggccgggggtgggagcgggggccggagccggagccttggcccgcccccgggcggcgctgtgattggccggccgctccggcgggcgtcgcgattggccgtcctgcagccgttgagatttgaactcggtatttgtggctttgcccgcgcgttgccagactcagaggcggccctttgcctctgcctgccggggattggccggattctccgccgacttgaaaactgccttgctaattggtgcgtgttgtgcacgcgtgttttttccttttcatttcagcctgactgccggaatcagagccgcgggtgagatccccagccctgtgagcctgtaggagtagaatggctccccaaatgtatgagttccatctgccattatccccagaggagttgttgaaaagtggaggggtgaatcagtatgttgtgcaagaggtactgtccatcaaacatcttccaccacagcttagagcttttcaggctgcctttcgagctcaggggcccctggctatgctgcagcactttgatactatctacagcattttgcatcactttcgaagtatagatcctggcctcaaagaagatactctggaattcctgataaaagtggtatcccgccactcccaggagcttccagctatcctggatgatacaactttgagtggatcagatagaaacgcccatctaaatgccctcaaaatgaactgttatgctctgatacgtctcctggaatcctttgagaccatggccagccagacaaaccttgtggacctggaccttggtgggaagggtaagaaagctcggaccaaggcagcccatggctttgactgggaagaagagaggcaaccaattcttcagcttttaacacagctacttcagttggacatccgtcacctgtggaaccactcaataattgaagaagaatttgtcagtttggttactggctgttgctaccgccttctggagaatcccaccattaatcaccagaagaaccgccccactcgggaagccataacacacctgcttggtgtagccttgacccgttataaccatatgctcagtgctacagtgaagatcatccagatgctgcagcactttgaacacctggcacctgtactggttgcagccgtgagtctatgggcaactgactatggaatgaagagcatagtgggagagattgtaagagagattggacaaaagtgtccccaagagctgagtcgagacccttcagggacaaagggctttgcagcattcctgacagaactagcagaacgtgtcccagctatcctgatgtccagcatgtgcattttgctagatcacctggatggagaaaattacatgatgcgtaatgctgtgctggcagccatggcggagatggtgctgcaggttctcagtggcgatcaactggaagcagcagcccgagacaccagagaccagttcttggatactttacaagcccatggccatgatgtcaactcctttgtgcggagccgtgttttgcagctcttcacccgaattgtccagcagaaggctctccccctgacacgtttccaggcagtggtggctttagctgtgggacgtctggcagacaagtcagtgctagtatgtaaaaatgccatccagctgctggccagttttctagccaataatcctttctcctgcaagcttagtgatgctgaccttgccggaccactgcagaaggagacccagaaattacaagagatgagggcccagaggcgaactgcagcagcttctgcagtgctggacccagaggaggagtgggaagccatgctgccagagttgaagtctaccctgcagcagcttctacagcttccccagggagaggaggagattcctgagcaaattgccaatacagagacaactgaagatgtgaaaggacgcatctatcaactgcttgccaaagctagttacaaaaaggccatcattctcactcgagaagccacaggccacttccaggagtccgaacccttcagtcatatagacccagaggagtcagaggagaccaggctcttgaatatcttaggacttatcttcaaaggcccagcagcttccacacaagaaaagaatccccgggagtctacaggaaacatggtcacaggacagactgtctgtaaaaataaacccaatatgtcggatcctgaggaatccaggggaaatgatgaactagtgaagcaggagatgctggtacagtatctgcaggatgcctacagcttctcccggaagattacagaggccattggcataatcagcaagatgatgtatgaaaacacaactacaggccctgtttggggtgcgccgtatgctgcctctcatctggtctaaggagcctggtgtccgggaagccgtgcttaatgcctaccgccaactctacctcaaccccaaaggggactctgccagagccaaggcccaggctttgattcagaatctctctctgctgctagtggatgcctcggttgggaccattcagtgtcttgaggaaattctctgtgagtttgtgcagaaggatgagttgaaaccagcagtgacccagctgctgtgggagcgggccaccgagaaggtcgcctgctgtcctctggagcgctgttcctctgtcatgcttcttggcatgatggcacgaggaaagccagaaattgtgggaagcaatttagacacactggtgagcatagggctggatgagaagtttccacaggactacaggctggcccagcaggtgtgccatgccattgccaacatctcggacaggagaaagccttctctgggcaaacgtcacccccccttccggctgcctcaggaacacaggttgtttgagcgactgcgggagacagtcacaaaaggctttgtccacccagacccactctggatcccattcaaagaggtggcagtgaccctcatttaccaactggcagagggccccgaagtgatctgtgcccagatattgcagggctgtgcaaaacaggccctggagaagctagaagagaagagaaccagtcaggaggacccgaaggagtcccccgcaatgctccccactttcctgttgatgaacctgctgtccctggctggggatgtggctctgcagcagctggtccacttggagcaggcagtgagtggagagctctgccggcgccgagttctccgggaagaacaggagcacaagaccaaagatcccaaggagaagaatacgagctctgagaccaccatggaggaggagctggggctggttggggcaacagcagatgacacagaggcagaactaatccgtggcatctgcgagatggaactgttggatggcaaacagacactggctgcctttgttccactcttgcttaaagtctgtaacaacccaggcctctatagcaacccagacctctctgcagctgcttcacttgcccttggcaagttctgcatgatcagtgccactttctgcgactcccagcttcgtcttctgttcaccatgctggaaaagtctccacttcccattgtccggtctaacctcatggttgccactggggatctggccatccgctttcccaatctggtggacccctggactcctcatctgtatgctcgcctccgggaccctgctcagcaagtgcggaaaacagcggggctggtgatgacccacctgatcctcaaggacatggtgaaggtgaaggggcaggtcagcgagatggcggtgctgctcatcgaccccgagcctcagattgctgccctggccaagaacttcttcaatgagctctcccacaagggcaacgcaatctataatctccttccagatatcatcagccgcctgtcagaccccgagctgggggtggaggaagagcctttccacaccatcatgaaacagctcctctcctacatcaccaaggacaagcagacagagagcctggtggaaaagctgtgtcagcggttccgcacatcccgaactgagcggcagcagcgagacctggcctactgtgtgtcacagctgcccctcacagagcgaggcctccgtaagatgcttgacaattttgactgttttggagacaaactgtcagatgagtccatcttcagtgcttttttgtcagttgtgggcaagctgcgacgtggggccaagcctgagggcaaggctataatagatgaatttgagcagaagcttcgggcctgtcataccagaggtttggatggaatcaaggagcttgagattggccaagcaggtagccagagagcgccatcagccaagaaaccatccactggttctaggtaccagcctctggcttctacagcctcagacaatgactttgtcacaccagagccccgccgtactacccgtcggcatccaaacacccagcagcgagcttccaaaaagaaacccaaagttgtcttctcaagtgatgagtccagtgaggaagatctttcagcagagatgacagaagacgagacacccaagaaaacaactcccattctcagagcatcggctcgcaggcacagatcctaggaagtctgttcctgtcctccctgtgcagggtatcctgtagggtgacctggaattcgaattctgtttcccttgtaaaatatttgtctgtctctttttttaaaaaaaaaaaaaggccgggcactgtggctcacgcctgtaatcccagcactttgcgataccaaggcgggtggataacctgaggtagggagttcgagaccagcctgaccaacatggagaaaccccatctctactaaaaataaaaaattagccgggcgtattggcgtgcgcctgtaatcccagctactcaagaggctgaggcaggagaatcgcctgaacccagaggcggaggttgtagtgagccgaaatcacaccattgcactccagcttgggcaacaatagcgaacctccatctcaaattaaaaaaaaaatgcctacacgctctttaaaatgcaaggctttctcttaaattagcctaactgaactgcgttgagctgcttcaactttggaatatatgtttgccaatctccttgttttctaatgaataaatgtttttatatactttta

SEQ ID NO: 365172 - DNA, 5651 bp, Homo sapiens
aagttttggagcgccggacaagctgaggtccgcgactcgtcgctaagattccccaaaactgagatttcaagaaaattcaccctttccgctttctttggcgcccttcaaccgtgaaggaaatgaaggttgagaacctggaacccgcttccaaagaccaagccctttctctgtgcctcacaacagtcttgcgctgtagctgtttttattacccctattttactactggggaggagatttgaggtcctgaaagtgaagtgacttgctggacgtcacttagcagaggagatggcgaaacctggattagaggcgatgccttctaactcccagcgtggacttgcctcctttcctgggggtgactgaatgcccagccagggacgcgacgtctctggccagcagaaatacggcctcctccccgccgactgggcaaagggggaccttgcggccaaggagggattcgcaggcgggccgggggtgggagcgggggccggagccggagccttggcccgcccccgggcggcgctgtgattggccggccgctccggcgggcgtcgcgattggccgtcctgcagccgttgagatttgaactcggtatttgtggctttgcccgcgcgttgccagactcagaggcggccctttgcctctgcctgccggggattggccggattctccgccgacttgaaaactgccttgctaattggtgcgtgttgtgcacgcgtgttttttccttttcatttcagcctgactgccggaatcagagccgcgggtgagatccccagccctgtgagcctgtaggagtagaatggctccccaaatgtatgagttccatctgccattatccccagaggagttgttgaaaagtggaggggtgaatcagtatgttgtgcaagaggtactgtccatcaaacatcttccaccacagcttagagcttttcaggctgcctttcgagctcaggggcccctggctatgctgcagcactttgatactatctacagcattttgcatcactttcgaagtatagatcctggcctcaaagaagatactctggaattcctgataaaagtggtatcccgccactcccaggagcttccagctatcctggatgatacaactttgagtggatcagatagaaacgcccatctaaatgccctcaaaatgaactgttatgctctgatacgtctcctggaatcctttgagaccatggccagccagacaaaccttgtggacctggaccttggtgggaagggtaagaaagctcggaccaaggcagcccatggctttgactgggaagaagagaggcaaccaattcttcagcttttaacacagctacttcagttggacatccgtcacctgtggaaccactcaataattgaagaagaatttgtcagtttggttactggctgttgctaccgccttctggagaatcccaccattaatcaccagaagaaccgccccactcgggaagccataacacacctgcttggtgtagccttgacccgttataaccatatgctcagtgctacagtgaagatcatccagatgctgcagcactttgaacacctggcacctgtactggttgcagccgtgagtctatgggcaactgactatggaatgaagagcatagtgggagagattgtaagagagattggacaaaagtgtccccaagagctgagtcgagacccttcagggacaaagggctttgcagcattcctgacagaactagcagaacgtgtcccagctatcctgatgtccagcatgtgcattttgctagatcacctggatggagaaaattacatgatgcgtaatgctgtgctggcagccatggcggagatggtgctgcaggttctcagtggcgatcaactggaagcagcagcccgagacaccagagaccagttcttggatactttacaagcccatggccatgatgtcaactcctttgtgcggagccgtgttttgcagctcttcacccgaattgtccagcagaaggctctccccctgacacgtttccaggcagtggtggctttagctgtgggacgtctggcagacaagtcagtgctagtatgtaaaaatgccatccagctgctggccagttttctagccaataatcctttctcctgcaagcttagtgatgctgaccttgccggaccactgcagaaggagacccagaaattacaagagatgagggcccagaggcgaactgcagcagcttctgcagtgctggacccagaggaggagtgggaagccatgctgccagagttgaagtctaccctgcagcagcttctacagcttccccagggagaggaggagattcctgagcaaattgccaatacagagacaactgaagatgtgaaaggacgcatctatcaactgcttgccaaagctagttacaaaaaggccatcattctcactcgagaagccacaggccacttccaggagtccgaacccttcagtcatatagacccagaggagtcagaggagaccaggctcttgaatatcttaggacttatcttcaaaggcccagcagcttccacacaagaaaagaatccccgggagtctacaggaaacatggtcacaggacagactgtctgtaaaaataaacccaatatgtcggatcctgaggaatccaggggaaatgatgaactagtgaagcaggagatgctggtacagtatctgcaggatgcctacagcttctcccggaagattacagaggccattggcataatcagcaagatgatgtatgaaaacacaactacagtggtgcaggaggtgattgaattctttgtgatggtcttccaatttggggtaccccaggccctgtttggggtgcgccgtatgctgcctctcatctggtctaaggagcctggtgtccgggaagccgtgcttaatgcctaccgccaactctacctcaaccccaaaggggactctgccagagccaaggcccaggctttgattcagaatctctctctgctgctagtggatgcctcggttgggaccattcagtgtcttgaggaaattctctgtgagtttgtgcagaaggatgagttgaaaccagcagtgacccagctgctgtgggagcgggccaccgagaaggtcgcctgctgtcctctggagcgctgttcctctgtcatgcttcttggcatgatggcacgaggaaagccagaaattgtgggaagcaatttagacacactggtgagcatagggctggatgagaagtttccacaggactacaggctggcccagcaggtgtgccatgccattgccaacatctcggacaggagaaagccttctctgggcaaacgtcacccccccttccggctgcctcaggaacacaggttgtttgagcgactgcgggagacagtcacaaaaggctttgtccacccagacccactctggatcccattcaaagaggtggcagtgaccctcatttaccaactggcagagggccccgaagtgatctgtgcccagatattgcagggctgtgcaaaacaggccctggagaagctagaagagaagagaaccagtcaggaggacccgaaggagtcccccgcaatgctccccactttcctgttgatgaacctgctgtccctggctggggatgtggctctgcagcagctggtccacttggagcaggcagtgagtggagagctctgccggcgccgagttctccgggaagaacaggagcacaagaccaaagatcccaaggagaagaatacgagctctgagaccaccatggaggaggagctggggctggttggggcaacagcagatgacacagaggcagaactaatccgtggcatctgcgagatggaactgttggatggcaaacagacactggctgcctttgttccactcttgcttaaagtctgtaacaacccaggcctctatagcaacccagacctctctgcagctgcttcacttgcccttggcaagttctgcatgatcagtgccactttctgcgactcccagcttcgtcttctgttcaccatgctggaaaagtctccacttcccattgtccggtctaacctcatggttgccactggggatctggccatccgctttcccaatctggtggacccctggactcctcatctgtatgctcgcctccgggaccctgctcagcaagtgcggaaaacagcggggctggtgatgacccacctgatcctcaaggacatggtgaaggtgaaggggcaggtcagcgagatggcggtgctgctcatcgaccccgagcctcagattgctgccctggccaagaacttcttcaatgagctctcccacaagggcaacgcaatctataatctccttccagatatcatcagccgcctgtcagaccccgagctgggggtggaggaagagcctttccacaccatcatgaaacagctcctctcctacatcaccaaggacaagcagacagagagcctggtggaaaagctgtgtcagcggttccgcacatcccgaactgagcggcagcagcgagacctggcctactgtgtgtcacagctgcccctcacagagcgaggcctccgtaagatgcttgacaattttgactgttttggagacaaactgtcagatgagtccatcttcagtgcttttttgtcagttgtgggcaagctgcgacgtggggccaagcctgagggcaaggctataatagatgaatttgagcagaagcttcgggcctgtcataccagaggtttggatggaatcaaggagcttgagattggccaagcaggtagccagagagcgccatcagccaagaaaccatccactggtacgtaaggcagcctgtgcgggcgagaccagactgggccctcccctcctgcagtgatttgtttcttcttcttttttaaatcacgttttcctgccttttctaggttctaggtaccagcctctggcttctacagcctcagacaatgactttgtcacaccagagccccgccgtactacccgtcggcatccaaacacccagcagcgagcttccaaaaagaaacccaaagttgtcttctcaagtgatgagtccagtgaggaagatctttcagcagagatgacagaagacgagacacccaagaaaacaactcccattctcagagcatcggctcgcaggcacagatcctaggaagtctgttcctgtcctccctgtgcagggtatcctgtagggtgacctggaattcgaattctgtttcccttgtaaaatatttgtctgtctctttttttaaaaaaaaaaaaaggccgggcactgtggctcacgcctgtaatcccagcactttgcgataccaaggcgggtggataacctgaggtagggagttcgagaccagcctgaccaacatggagaaaccccatctctactaaaaataaaaaattagccgggcgtattggcgtgcgcctgtaatcccagctactcaagaggctgaggcaggagaatcgcctgaacccagaggcggaggttgtagtgagccgaaatcacaccattgcactccagcttgggcaacaatagcgaacctccatctcaaattaaaaaaaaaatgcctacacgctctttaaaatgcaaggctttctcttaaattagcctaactgaactgcgttgagctgcttcaactttggaatatatgtttgccaatctccttgttttctaatgaataaatgtttttatatactttta

SEQ ID NO: 365173 - DNA, 4184 bp, Homo sapiens
aagttttggagcgccggacaagctgaggtccgcgactcgtcgctaagattccccaaaactgagatttcaagaaaattcaccctttccgctttctttggcgcccttcaaccgtgaaggaaatgaaggttgagaacctggaacccgcttccaaagaccaagccctttctctgtgcctcacaacagtcttgcgctgtagctgtttttattacccctattttactactggggaggagatttgaggtcctgaaagtgaagtgacttgctggacgtcacttagcagaggagatggcgaaacctggattagaggcgatgccttctaactcccagcgtggacttgcctcctttcctgggggtgactgaatgcccagccagggacgcgacgtctctggccagcagaaatacggcctcctccccgccgactgggcaaagggggaccttgcggccaaggagggattcgcaggcgggccgggggtgggagcgggggccggagccggagccttggcccgcccccgggcggcgctgtgattggccggccgctccggcgggcgtcgcgattggccgtcctgcagccgttgagatttgaactcggtatttgtggctttgcccgcgcgttgccagactcagaggcggccctttgcctctgcctgccggggattggccggattctccgccgacttgaaaactgccttgctaattggtgcgtgttgtgcacgcgtgttttttccttttcatttcagcctgactgccggaatcagagccgcgggtgagatccccagccctgtgagcctgtaggagtagaatggctccccaaatgtatgagttccatctgccattatccccagaggagttgttgaaaagtggaggggtgaatcagtatgttgtgcaagaggtactgtccatcaaacatcttccaccacagcttagagcttttcaggctgcctttcgagctcaggggcccctggctatgctgcagcactttgatactatctacagcattttgcatcactttcgaagtatagatcctggcctcaaagaagatactctggaattcctgataaaagtggtatcccgccactcccaggagcttccagctatcctggatgatacaactttgagtggatcagatagaaacgcccatctaaatgccctcaaaatgaactgttatgctctgatacgtctcctggaatcctttgagaccatggccagccagacaaaccttgtggacctggaccttggtgggaagggtaagaaagctcggaccaaggcagcccatggctttgactgggaagaagagaggcaaccaattcttcagcttttaacacagctacttcagttggacatccgtcacctgtggaaccactcaataattgaagaagaatttgtcagtttggttactggctgttgctaccgccttctggagaatcccaccattaatcaccagaagaaccgccccactcgggaagccataacacacctgcttggtgtagccttgacccgttataaccatatgctcagtgctacagtgaagatcatccagatgctgcagcactttgaacacctggcacctgtactggttgcagccgtgagtctatgggcaactgactatggaatgaagagcatagtgggagagattgtaagagagattggacaaaagtgtccccaagagctgagtcgagacccttcagggacaaagggctttgcagcattcctgacagaactagcagaacgtgtcccagctatcctgatgtccagcatgtgcattttgctagatcacctggatggagaaaattacatgatgcgtaatgctgtgctggcagccatggcggagatggtgctgcaggttctcagtggcgatcaactggaagcagcagcccgagacaccagagaccagttcttggatactttacaagcccatggccatgatgtcaactcctttgtgcggagccgtgttttgcagctcttcacccgaattgtccagcagaaggctctccccctgacacgtttccaggcagtggtggctttagctgtgggacgtctggcagacaagtcagtgctagtatgtaaaaatgccatccagctgctggccagttttctagccaataatcctttctcctgcaagcttagtgatgctgaccttgccggaccactgcagaaggagacccagaaattacaagagatgagggcccagaggcgaactgcagcagcttctgcagtgctggacccagaggaggagtgggaagccatgctgccagagttgaagtctaccctgcagcagcttctacagcttccccagggagaggaggagattcctgagcaaattgccaatacagagacaactgaagatgtgaaaggacgcatctatcaactgcttgccaaagctagttacaaaaaggccatcattctcactcgagaagccacaggccacttccaggagtccgaacccttcagtcatatagacccagaggagtcagaggagaccaggctcttgaatatcttaggacttatcttcaaaggcccagcagcttccacacaagaaaagaatccccgggagtctacaggaaacatggtcacaggacagactgtctgtaaaaataaacccaatatgtcggatcctgaggaatccaggggaaatgatgaactagtgaagcaggagatgctggtacagtatctgcaggatgcctacagcttctcccggaagattacagaggccattggcataatcagcaagatgatgtatgaaaacacaactacagtggtgcaggaggtgattgaattctttgtgatggtcttccaatttggggtaccccaggccctgtttggggtgcgccgtatgctgcctctcatctggtctaaggagcctggtgtccgggaagccgtgcttaatgcctaccgccaactctacctcaaccccaaaggggactctgccagagccaaggcccaggctttgattcagaatctctctctgctgctagtggatgcctcggttgggaccattcagtgtcttgaggaaattctctgtgagtttgtgcagaaggatgagttgaaaccagcagtgacccagctgctgtgggagcgggccaccgagaaggtcgcctgctgtcctctggagcgctgttcctctgtcatgcttcttggcatgatggcacgaggaaagccagaaattgtgggaagcaatttagacacactggtgagcatagggctggatgagaagtttccacaggactacaggctggcccagcaggtgtgccatgccattgccaacatctcggacaggagaaagccttctctgggcaaacgtcacccccccttccggctgcctcaggaacacaggttgtttgagcgactgcgggagacagtcacaaaaggctttgtccacccagacccactctggatcccattcaaagaggtggcagtgaccctcatttaccaactggcagagggccccgaagtgatctgtgcccagatattgcagggctgtgcaaaacaggccctggagaagctagaagagaagagaaccagtcaggaggacccgaaggagtcccccgcaatgctccccactttcctgttgatgaacctgctgtccctggctggggatgtggctctgcagcagctggtccacttggagcaggcagtgagtggagagctctgccggcgccgagttctccgggaagaacaggagcacaagaccaaagatcccaaggagaagaatacgagctctgagaccaccatggaggaggagctggggctggttggggcaacagcagatgacacagaggcagaactaatccgtggcatctgcgagatggaactgttggatggcaaacagacactggctgcctttgttccactcttgcttaaagtctgtaacaacccaggcctctatagcaacccagacctctctgcagctgcttcacttgcccttggcaagttctgcatgatcagtgccactttctgcgactcccagcttcgtcttctgttcaccatgctggaaaagtctccacttcccattgtccggtctaacctcatggttgccactggggatctggccatccgctttcccaatctggtggacccctggactcctcatctgtatgctcgcctccgggaccctgctcagcaagtgccactgtgttcttaagaggcttccagagaaaacggcacaccaatcaataaagaactgagca

SEQ ID NO: 365174 - DNA, 4015 bp, Homo sapiens
aagttttggagcgccggacaagctgaggtccgcgactcgtcgctaagattccccaaaactgagatttcaagaaaattcaccctttccgctttctttggcgcccttcaaccgtgaaggaaatgaaggttgagaacctggaacccgcttccaaagaccaagccctttctctgtgcctcacaacagtcttgcgctgtagctgtttttattacccctattttactactggggaggagatttgaggtcctgaaagtgaagtgacttgctggacgtcacttagcagaggagatggcgaaacctggattagaggcgatgccttctaactcccagcgtggacttgcctcctttcctgggggtgactgaatgcccagccagggacgcgacgtctctggccagcagaaatacggcctcctccccgccgactgggcaaagggggaccttgcggccaaggagggattcgcaggcgggccgggggtgggagcgggggccggagccggagccttggcccgcccccgggcggcgctgtgattggccggccgctccggcgggcgtcgcgattggccgtcctgcagccgttgagatttgaactcggtatttgtggctttgcccgcgcgttgccagactcagaggcggccctttgcctctgcctgccggggattggccggattctccgccgacttgaaaactgccttgctaattggtgcgtgttgtgcacgcgtgttttttccttttcatttcagcctgactgccggaatcagagccgcgggtgagatccccagccctgtgagcctgtaggagtagaatggctccccaaatgtatgagttccatctgccattatccccagaggagttgttgaaaagtggaggggtgaatcagtatgttgtgcaagaggtactgtccatcaaacatcttccaccacagcttagagcttttcaggctgcctttcgagctcaggggcccctggctatgctgcagcactttgatactatctacagcattttgcatcactttcgaagtatagatcctggcctcaaagaagatactctggaattcctgataaaagtggtatcccgccactcccaggagcttccagctatcctggatgatacaactttgagtggatcagatagaaacgcccatctaaatgccctcaaaatgaactgttatgctctgatacgtctcctggaatcctttgagaccatggccagccagacaaaccttgtggacctggaccttggtgggaagggtaagaaagctcggaccaaggcagcccatggctttgactgggaagaagagaggcaaccaattcttcagcttttaacacagctacttcagttggacatccgtcacctgtggaaccactcaataattgaagaagaatttgtcagtttggttactggctgttgctaccgccttctggagaatcccaccattaatcaccagaagaaccgccccactcgggaagccataacacacctgcttggtgtagccttgacccgttataaccatatgctcagtgctacagtgaagatcatccagatgctgcagcactttgaacacctggcacctgtactggttgcagccgtgagtctatgggcaactgactatggaatgaagagcatagtgggagagattgtaagagagattggacaaaagtgtccccaagagctgagtcgagacccttcagggacaaagggctttgcagcattcctgacagaactagcagaacgtgtcccagctatcctgatgtccagcatgtgcattttgctagatcacctggatggagaaaattacatgatgcgtaatgctgtgctggcagccatggcggagatggtgctgcaggttctcagtggcgatcaactggaagcagcagcccgagacaccagagaccagttcttggatactttacaagcccatggccatgatgtcaactcctttgtgcggagccgtgttttgcagctcttcacccgaattgtccagcagaaggctctccccctgacacgtttccaggcagtggtggctttagctgtgggacgtctggcagacaagtcagtgctagtatgtaaaaatgccatccagctgctggccagttttctagccaataatcctttctcctgcaagcttagtgatgctgaccttgccggaccactgcagaaggagacccagaaattacaagagatgagggcccagaggcgaactgcagcagcttctgcagtgctggacccagaggaggagtgggaagccatgctgccagagttgaagtctaccctgcagcagcttctacagcttccccagggagaggaggagattcctgagcaaattgccaatacagagacaactgaagatgtgaaaggacgcatctatcaactgcttgccaaagctagttacaaaaaggccatcattctcactcgagaagccacaggccacttccaggagtccgaacccttcagtcatatagacccagaggagtcagaggagaccaggctcttgaatatcttaggacttatcttcaaaggcccagcagcttccacacaagaaaagaatccccgggagtctacaggaaacatggtcacaggacagactgtctgtaaaaataaacccaatatgtcggatcctgaggaatccaggggaaatgatgaactagtgaagcaggagatgctggtacagtatctgcaggatgcctacagcttctcccggaagattacagaggccattggcataatcagcaagatgatgtatgaaaacacaactacagtggtgcaggaggtgattgaattctttgtgatggtcttccaatttggggtaccccaggccctgtttggggtgcgccgtatgctgcctctcatctggtctaaggagcctggtgtccgggaagccgtgcttaatgcctaccgccaactctacctcaaccccaaaggggactctgccagagccaaggcccaggctttgattcagaatctctctctgctgctagtggatgcctcggttgggaccattcagtgtcttgaggaaattctctgtgagtttgtgcagaaggatgagttgaaaccagcagtgacccagctgctgtgggagcgggccaccgagaaggtcgcctgctgtcctctggagcgctgttcctctgtcatgcttcttggcatgatggcacgcagaggtttggatggaatcaaggagcttgagattggccaagcaggtagccagagagcgccatcagccaagaaaccatccactggttctaggtaccagcctctggcttctacagcctcagacaatgactttgtcacaccagagccccgccgtactacccgtcggcatccaaacacccagcagcgagcttccaaaaagaaacccaaagttgtcttctcaagtgatgagtccagtgaggaagatctttcagcagagatgacagaagacgagacacccaagaaaacaactcccattctcagagcatcggctcgcaggcacagatcctaggaagtctgttcctgtcctccctgtgcagggtatcctgtagggtgacctggaattcgaattctgtttcccttgtaaaatatttgtctgtctctttttttaaaaaaaaaaaaaggccgggcactgtggctcacgcctgtaatcccagcactttgcgataccaaggcgggtggataacctgaggtagggagttcgagaccagcctgaccaacatggagaaaccccatctctactaaaaataaaaaattagccgggcgtattggcgtgcgcctgtaatcccagctactcaagaggctgaggcaggagaatcgcctgaacccagaggcggaggttgtagtgagccgaaatcacaccattgcactccagcttgggcaacaatagcgaacctccatctcaaattaaaaaaaaaatgcctacacgctctttaaaatgcaaggctttctcttaaattagcctaactgaactgcgttgagctgcttcaactttggaatatatgtttgccaatctccttgttttctaatgaataaatgtttttatatactttta

SEQ ID NO: 365175 - DNA, 3427 bp, Homo sapiens
aagttttggagcgccggacaagctgaggtccgcgactcgtcgctaagattccccaaaactgagatttcaagaaaattcaccctttccgctttctttggcgcccttcaaccgtgaaggaaatgaaggttgagaacctggaacccgcttccaaagaccaagccctttctctgtgcctcacaacagtcttgcgctgtagctgtttttattacccctattttactactggggaggagatttgaggtcctgaaagtgaagtgacttgctggacgtcacttagcagaggagatggcgaaacctggattagaggcgatgccttctaactcccagcgtggacttgcctcctttcctgggggtgactgaatgcccagccagggacgcgacgtctctggccagcagaaatacggcctcctccccgccgactgggcaaagggggaccttgcggccaaggagggattcgcaggcgggccgggggtgggagcgggggccggagccggagccttggcccgcccccgggcggcgctgtgattggccggccgctccggcgggcgtcgcgattggccgtcctgcagccgttgagatttgaactcggtatttgtggctttgcccgcgcgttgccagactcagaggcggccctttgcctctgcctgccggggattggccggattctccgccgacttgaaaactgccttgctaattggtgcgtgttgtgcacgcgtgttttttccttttcatttcagcctgactgccggaatcagagccgcgggtgagatccccagccctgtgagcctgtaggagtagaatggctccccaaatgtatgagttccatctgccattatccccagaggagttgttgaaaagtggaggggtgaatcagtatgttgtgcaagaggtactgtccatcaaacatcttccaccacagcttagagcttttcaggctgcctttcgagctcaggggcccctggctatgctgcagcactttgatactatctacagcattttgcatcactttcgaagtatagatcctggcctcaaagaagatactctggaattcctgataaaagtggtatcccgccactcccaggagcttccagctatcctggatgatacaactttgagtggatcagatagaaacgcccatctaaatgccctcaaaatgaactgttatgctctgatacgtctcctggaatcctttgagaccatggccagccagacaaaccttgtggacctggaccttggtgggaagggtaagaaagctcggaccaaggcagcccatggctttgactgggaagaagagaggcaaccaattcttcagcttttaacacagctacttcagttggacatccgtcacctgtggaaccactcaataattgaagaagaatttgtcagtttggttactggctgttgctaccgccttctggagaatcccaccattaatcaccagaagaaccgccccactcgggaagccataacacacctgcttggtgtagccttgacccgttataaccatatgctcagtgctacagtgaagatcatccagatgctgcagcactttgaacacctggcacctgtactggttgcagccgtgagtctatgggcaactgactatggaatgaagagcatagtgggagagattgtaagagagattggacaaaagtgtccccaagagctgagtcgagacccttcagggacaaagggctttgcagcattcctgacagaactagcagaacgtgtcccagctatcctgatgtccagcatgtgcattttgctagatcacctggatggagaaaattacatgatgcgtaatgctgtgctggcagccatggcggagatggtgctgcaggttctcagtggcgatcaactggaagcagcagcccgagacaccagagaccagttcttggatactttacaagcccatggccatgatgtcaactcctttgtgcggagccgtgttttgcagctcttcacccgaattgtccagcagaaggctctccccctgacacgtttccaggcagtggtggctttagctgtgggacgtctggcagacaagtcagtgctagtatgtaaaaatgccatccagctgctggccagttttctagccaataatcctttctcctgcaagcttagtgatgctgaccttgccggaccactgcagaaggagacccagaaattacaagagatgagggcccagaggcgaactgcagcagcttctgcagtgctggacccagaggaggagtgggaagccatgctgccagagttgaagtctaccctgcagcagcttctacagcttccccagggagaggaggagattcctgagcaaattgccaatacagagacaactgaagatgtgaaaggacgcatctatcaactgcttgccaaagctagttacaaaaaggccatcattctcactcgagaagccacaggccacttccaggagtccgaacccttcagtcatatagacccagaggagtcagaggagaccaggctcttgaatatcttaggacttatcttcaaaggcccagcagcttccacacaagaaaagaatccccgggagtctacaggaaacatggtcacaggacagactgtctgtaaaaataaacccaatatgtcggatcctgaggaatccaggggaaatgatgaactagtgaagcaggagatgctggtacagtatctgcaggatgcctacagcttctcccggaagattacagaggccattggcataatcagcaagatgatgtatgaaaacacaactacagtggtgcaggaggtgattgaattctttgtgatggtcttccaatttggggtaccccaggccctgtttggggtgcgccgtatgctgcctctcatctggtctaaggagcctggtgtccgggaagccgtgcttaatgcctaccgccaactctacctcaaccccaaaggggactctgccagagccaaggcccaggctttgattcagaatctctctctgctgctagtggatgcctcggttgggaccattcagtgtcttgaggaaattctctgtgagtttgtgcagaaggatgagttgaaaccagcagtgacccagctgctgtgggagcgggccaccgagaaggtcgcctgctgtcctctggagcgctgttcctctgtcatgcttcttggcatgatggcacgaggaaagccagaaattgtgggaagcaatttagacacactggtgagcatagggctggatgagaagtttccacaggactacaggctggcccagcaggtgtgccatgccattgccaacatctcggacaggagaaagccttctctgggcaaacgtcacccccccttccggctgcctcaggaacacaggttgtttgagcgactgcgggagacagtcacaaaaggcttttggtcccaaccccaagaacccaacttcttggaatccccaatttcaaaaggaaggttg

SEQ ID NO: 365176 - DNA, 1427 bp, Homo sapiens
tcttgtttgtttgtttttaatagtttttatttttcagagcagttttaggttcaaagcaaaattgagcagaaagtacagggagttcccttctaccccttgcccctacacatcacagccttccccaccttcaacatcctgcaccagggtggcacatttgttacagctgaacctacacttacacatcatctcctaaagtcatggtttaccttggagttcactgcacgtaatgacatgtacccaccattgcagtatcatacagaagagtttcactgccttacaaatcccctgcactccacctatttatccctctctccccacaacccctgatctttttactgttgccatcactttgtcttttccagaatgtatcattggaatgatccggtatggagccttctcaccttggcttcttagtaatgtgcgtttaaggcctccatgtcttccatggccttgtttctttttaatcagaagtaactgttttcaggcctgctctgaatctccttttctccctccaggctataatagatgaatttgagcagaagcttcgggcctgtcataccagaggtttggatggaatcaaggagcttgagattggccaagcaggtagccagagagcgccatcagccaagaaaccatccactggttctaggtaccagcctctggcttctacagcctcagacaatgactttgtcacaccagagccccgccgtactacccgtcggcatccaaacacccagcagcgagcttccaaaaagaaacccaaagttgtcttctcaagtgatgagtccagtgaggaagatctttcagcagagatgacagaagacgagacacccaagaaaacaactcccattctcagagcatcggctcgcaggcacagatcctaggaagtctgttcctgtcctccctgtgcagggtatcctgtagggtgacctggaattcgaattctgtttcccttgtaaaatatttgtctgtctctttttttaaaaaaaaaaaaaggccgggcactgtggctcacgcctgtaatcccagcactttgcgataccaaggcgggtggataacctgaggtagggagttcgagaccagcctgaccaacatggagaaaccccatctctactaaaaataaaaaattagccgggcgtattggcgtgcgcctgtaatcccagctactcaagaggctgaggcaggagaatcgcctgaacccagaggcggaggttgtagtgagccgaaatcacaccattgcactccagcttgggcaacaatagcgaacctccatctcaaattaaaaaaaaaatgcctacacgctctttaaaatgcaaggctttctcttaaattagcctaactgaactgcgttgagctgcttcaactttggaatatatgtttgccaatctccttgttttctaatgaataaatgtttttatatactttta

SEQ ID NO: 365177 - DNA, 1530 bp, Homo sapiens
tcttgtttgtttgtttttaatagtttttatttttcagagcagttttaggttcaaagcaaaattgagcagaaagtacagggagttcccttctaccccttgcccctacacatcacagccttccccaccttcaacatcctgcaccagggtggcacatttgttacagctgaacctacacttacacatcatctcctaaagtcatggtttaccttggagttcactgcacgtaatgacatgtacccaccattgcagtatcatacagaagagtttcactgccttacaaatcccctgcactccacctatttatccctctctccccacaacccctgatctttttactgttgccatcactttgtcttttccagaatgtatcattggaatgatccggtatggagccttctcaccttggcttcttagtaatgtgcgtttaaggcctccatgtcttccatggccttgtttctttttaatcagaagtaactgttttcaggcctgctctgaatctccttttctccctccaggctataatagatgaatttgagcagaagcttcgggcctgtcataccagaggtttggatggaatcaaggagcttgagattggccaagcaggtagccagagagcgccatcagccaagaaaccatccactggtacgtaaggcagcctgtgcgggcgagaccagactgggccctcccctcctgcagtgatttgtttcttcttcttttttaaatcacgttttcctgccttttctaggttctaggtaccagcctctggcttctacagcctcagacaatgactttgtcacaccagagccccgccgtactacccgtcggcatccaaacacccagcagcgagcttccaaaaagaaacccaaagttgtcttctcaagtgatgagtccagtgaggaagatctttcagcagagatgacagaagacgagacacccaagaaaacaactcccattctcagagcatcggctcgcaggcacagatcctaggaagtctgttcctgtcctccctgtgcagggtatcctgtagggtgacctggaattcgaattctgtttcccttgtaaaatatttgtctgtctctttttttaaaaaaaaaaaaaggccgggcactgtggctcacgcctgtaatcccagcactttgcgataccaaggcgggtggataacctgaggtagggagttcgagaccagcctgaccaacatggagaaaccccatctctactaaaaataaaaaattagccgggcgtattggcgtgcgcctgtaatcccagctactcaagaggctgaggcaggagaatcgcctgaacccagaggcggaggttgtagtgagccgaaatcacaccattgcactccagcttgggcaacaatagcgaacctccatctcaaattaaaaaaaaaatgcctacacgctctttaaaatgcaaggctttctcttaaattagcctaactgaactgcgttgagctgcttcaactttggaatatatgtttgccaatctccttgttttctaatgaataaatgtttttatatactttta

SEQ ID NO: 365178 - DNA, 1487 bp, Homo sapiens
  misc_feature (1381)..(1381): n is a, c, g, or t
  misc_feature (1441)..(1441): n is a, c, g, or t
  misc_feature (1476)..(1476): n is a, c, g, or t
aagttttggagcgccggacaagctgaggtccgcgactcgtcgctaagattccccaaaactgagatttcaagaaaattcaccctttccgctttctttggcgcccttcaaccgtgaaggaaatgaaggttgagaacctggaacccgcttccaaagaccaagccctttctctgtgcctcacaacagtcttgcgctgtagctgtttttattacccctattttactactggggaggagatttgaggtcctgaaagtgaagtgacttgctggacgtcacttagcagaggagatggcgaaacctggattagaggcgatgccttctaactcccagcgtggacttgcctcctttcctgggggtgactgaatgcccagccagggacgcgacgtctctggccagcagaaatacggcctcctccccgccgactgggcaaagggggaccttgcggccaaggagggattcgcaggcgggccgggggtgggagcgggggccggagccggagccttggcccgcccccgggcggcgctgtgattggccggccgctccggcgggcgtcgcgattggccgtcctgcagccgttgagatttgaactcggtatttgtggctttgcccgcgcgttgccagactcagaggcggccctttgcctctgcctgccggggattggccggattctccgccgacttgaaaactgccttgctaattggtgcgtgttgtgcacgcgtgttttttccttttcatttcagcctgactgccggaatcagagccgcgggtgagatccccagccctgtgagcctgtaggagtagaatggctccccaaatgtatgagttccatctgccattatccccagaggagttgttgaaaagtggaggggtgaatcagtatgttgtgcaagaggtactgtccatcaaacatcttccaccacagcttagagcttttcaggctgcctttcgagctcaggggcccctggctatgctgcagcactttgatactatctacagcattttgcatcactttcgaagtatagatcctggcctcaaagaagatactctggaattcctgataaaagtggtatcccgccactcccaggagcttccagctatcctggatgatacaactttgagtggatcagatagaaacgcccatctaaatgccctcaaaatgaactgttatgctctgatacgtctcctggaatcctttgagaccatggccagccagacaaaccttgtggacctggaccttggtgggaagggtaagaaagctcggaccaaggcagcccatggctttgactgggaagaagagaggcaaccaattcttcagcttttaacacagctacttcagttggacatccgtcacctgtggaaccactcaataaatttggaaagaaanaaatttgttcagtttgggttactggggctgtttggcttaacccggcccttccttgggaanaaatccccacccattttaaattcaccccagaaaanaaaaccggccc

SEQ ID NO: 365179 - DNA, 1120 bp, Homo sapiens
aagttttggagcgccggacaagctgaggtccgcgactcgtcgctaagattccccaaaactgagatttcaagaaaattcaccctttccgctttctttggcgcccttcaaccgtgaaggaaatgaaggttgagaacctggaacccgcttccaaagaccaagccctttctctgtgcctcacaacagtcttgcgctgtagctgtttttattacccctattttactactggggaggagatttgaggtcctgaaagtgaagtgacttgctggacgtcacttagcagaggagatggcgaaacctggattagaggcgatgccttctaactcccagcgtggacttgcctcctttcctgggggtgactgaatgcccagccagggacgcgacgtctctggccagcagaaatacggcctcctccccgccgactgggcaaagggggaccttgcggccaaggagggattcgcaggcgggccgggggtgggagcgggggccggagccggagccttggcccgcccccgggcggcgctgtgattggccggccgctccggcgggcgtcgcgattggccgtcctgcagccgttgagatttgaactcggtatttgtggctttgcccgcgcgttgccagactcagaggcggccctttgcctctgcctgccggggattggccggattctccgccgacttgaaaactgccttgctaattggtgcgtgttgtgcacgcgtgttttttccttttcatttcagcctgactgccggaatcagagccgcgggtgagatccccagcctgaccaacatggagaaaccccatctctactaaaaataaaaaattagccgggcgtattggcgtgcgcctgtaatcccagctactcaagaggctgaggcaggagaatcgcctgaacccagaggcggaggttgtagtgagccgaaatcacaccattgcactccagcttgggcaacaatagcgaacctccatctcaaattaaaaaaaaaatgcctacacgctctttaaaatgcaaggctttctcttaaattagcctaactgaactgcgttgagctgcttcaactttggaatatatgtttgccaatctccttgttttctaatgaataaatgtttttatatactttta

SEQ ID NO: 365180 - DNA, 420 bp, Homo sapiens
aaatcacgttttcctgccttttctaggttctaggtaccagcctctggcttctacagcctcagacaatgactttgtcacaccagagccccgccgtactacccgtcggcatccaaacacccagcagcgagcttccaaaaagaaacccaaagttgtcttctcaagtgatgagtccagtgaggaaggtatgatgctcccgcctgttcccggccgagaaggcacacagctagggtgcagagggctggtttccataggacctgctgcgggggcctgagtgtagatgctctgccccactgccgcagaagggcctctcctgtacagcttggattttatttcttctgtgcggtgtgggattgtctcacttgttctctgatatctattttttcaccatctttgtgactcagctttttcttattcctttaa

SEQ ID NO: 365181 - DNA, 306 bp, Homo sapiens
ggtaagctcccttacaaacggctgcagtgacattcttctgggtactgacaggctggtgttctttcagaaaggccatcattctcactcgagaagccacaggccacttccaggagtccgaacccttcagtcatatagacccagaggagtcagaggagaccaggctcttgaatatcttaggacttatcttcaaaggtaatcattttccttcttcagtcaataaataacacatgtcaactggtatttactgagcattaactttatgccatcattggcctggttaacagaacctggtgctgaagagcccag

SEQ ID NO: 365182 - DNA, 5475 bp, Homo sapiens
aagttttggagcgccggacaagctgaggtccgcgactcgtcgctaagattccccaaaactgagatttcaagaaaattcaccctttccgctttctttggcgcccttcaaccgtgaaggaaatgaaggttgagaacctggaacccgcttccaaagaccaagccctttctctgtgcctcacaacagtcttgcgctgtagctgtttttattacccctattttactactggggaggagatttgaggtcctgaaagtgaagtgacttgctggacgtcacttagcagaggagatggcgaaacctggattagaggcgatgccttctaactcccagcgtggacttgcctcctttcctgggggtgactgaatgcccagccagggacgcgacgtctctggccagcagaaatacggcctcctccccgccgactgggcaaagggggaccttgcggccaaggagggattcgcaggcgggccgggggtgggagcgggggccggagccggagccttggcccgcccccgggcggcgctgtgattggccggccgctccggcgggcgtcgcgattggccgtcctgcagccgttgagatttgaactcggtatttgtggctttgcccgcgcgttgccagactcagaggcggccctttgcctctgcctgccggggattggccggattctccgccgacttgaaaactgccttgctaattggtgcgtgttgtgcacgcgtgttttttccttttcatttcagcctgactgccggaatcagagccgcgggtgagatccccagccctgtgagcctgtaggagtagaatggctccccaaatgtatgagttccatctgccattatccccagaggagttgttgaaaagtggaggggtgaatcagtatgttgtgcaagaggtactgtccatcaaacatcttccaccacagcttagagcttttcaggctgcctttcgagctcaggggcccctggctatgctgcagcactttgatactatctacagcattttgcatcactttcgaagtatagatcctggcctcaaagaagatactctggaattcctgataaaagtggtatcccgccactcccaggagcttccagctatcctggatgatacaactttgagtggatcagatagaaacgcccatctaaatgccctcaaaatgaactgttatgctctgatacgtctcctggaatcctttgagaccatggccagccagacaaaccttgtggacctggaccttggtgggaagggtaagaaagctcggaccaaggcagcccatggctttgactgggaagaagagaggcaaccaattcttcagcttttaacacagctacttcagttggacatccgtcacctgtggaaccactcaataattgaagaagaatttgtcagtttggttactggctgttgctaccgccttctggagaatcccaccattaatcaccagaagaaccgccccactcgggaagccataacacacctgcttggtgtagccttgacccgttataaccatatgctcagtgctacagtgaagatcatccagatgctgcagcactttgaacacctggcacctgtactggttgcagccgtgagtctatgggcaactgactatggaatgaagagcatagtgggagagattgtaagagagattggacaaaagtgtccccaagagctgagtcgagacccttcagggacaaagggctttgcagcattcctgacagaactagcagaacgtgtcccagctatcctgatatggcggagatggtgctgcaggttctcagtggcgatcaactggaagcagcagcccgagacaccagagaccagttcttggatactttacaagcccatggccatgatgtcaactcctttgtgcggagccgtgttttgcagctcttcacccgaattgtccagcagaaggctctccccctgacacgtttccaggcagtggtggctttagctgtgggacgtctggcagacaagtcagtgctagtatgtaaaaatgccatccagctgctggccagttttctagccaataatcctttctcctgcaagcttagtgatgctgaccttgccggaccactgcagaaggagacccagaaattacaagagatgagggcccagaggcgaactgcagcagcttctgcagtgctggacccagaggaggagtgggaagccatgctgccagagttgaagtctaccctgcagcagcttctacagcttccccagggagaggaggagattcctgagcaaattgccaatacagagacaactgaagatgtgaaaggacgcatctatcaactgcttgccaaagctagttacaaaaaggccatcattctcactcgagaagccacaggccacttccaggagtccgaacccttcagtcatatagacccagaggagtcagaggagaccaggctcttgaatatcttaggacttatcttcaaaggcccagcagcttccacacaagaaaagaatccccgggagtctacaggaaacatggtcacaggacagactgtctgtaaaaataaacccaatatgtcggatcctgaggaatccaggggaaatgatgaactagtgaagcaggagatgctggtacagtatctgcaggatgcctacagcttctcccggaagattacagaggccattggcataatcagcaagatgatgtatgaaaacacaactacagtggtgcaggaggtgattgaattctttgtgatggtcttccaatttggggtaccccaggccctgtttggggtgcgccgtatgctgcctctcatctggtctaaggagcctggtgtccgggaagccgtgcttaatgcctaccgccaactctacctcaaccccaaaggggactctgccagagccaaggcccaggctttgattcagaatctctctctgctgctagtggatgcctcggttgggaccattcagtgtcttgaggaaattctctgtgagtttgtgcagaaggatgagttgaaaccagcagtgacccagctgctgtgggagcgggccaccgagaaggtcgcctgctgtcctctggagcgctgttcctctgtcatgcttcttggcatgatggcacgaggaaagccagaaattgtgggaagcaatttagacacactggtgagcatagggctggatgagaagtttccacaggactacaggctggcccagcaggtgtgccatgccattgccaacatctcggacaggagaaagccttctctgggcaaacgtcacccccccttccggctgcctcaggaacacaggttgtttgagcgactgcgggagacagtcacaaaaggctttgtccacccagacccactctggatcccattcaaagaggtggcagtgaccctcatttaccaactggcagagggccccgaagtgatctgtgcccagatattgcagggctgtgcaaaacaggccctggagaagctagaagagaagagaaccagtcaggaggacccgaaggagtcccccgcaatgctccccactttcctgttgatgaacctgctgtccctggctggggatgtggctctgcagcagctggtccacttggagcaggcagtgagtggagagctctgccggcgccgagttctccgggaagaacaggagcacaagaccaaagatcccaaggagaagaatacgagctctgagaccaccatggaggaggagctggggctggttggggcaacagcagatgacacagaggcagaactaatccgtggcatctgcgagatggaactgttggatggcaaacagacactggctgcctttgttccactcttgcttaaagtctgtaacaacccaggcctctatagcaacccagacctctctgcagctgcttcacttgcccttggcaagttctgcatgatcagtgccactttctgcgactcccagcttcgtcttctgttcaccatgctggaaaagtctccacttcccattgtccggtctaacctcatggttgccactggggatctggccatccgctttcccaatctggtggacccctggactcctcatctgtatgctcgcctccgggaccctgctcagcaagtgcggaaaacagcggggctggtgatgacccacctgatcctcaaggacatggtgaaggtgaaggggcaggtcagcgagatggcggtgctgctcatcgaccccgagcctcagattgctgccctggccaagaacttcttcaatgagctctcccacaagggcaacgcaatctataatctccttccagatatcatcagccgcctgtcagaccccgagctgggggtggaggaagagcctttccacaccatcatgaaacagctcctctcctacatcaccaaggacaagcagacagagagcctggtggaaaagctgtgtcagcggttccgcacatcccgaactgagcggcagcagcgagacctggcctactgtgtgtcacagctgcccctcacagagcgaggcctccgtaagatgcttgacaattttgactgttttggagacaaactgtcagatgagtccatcttcagtgcttttttgtcagttgtgggcaagctgcgacgtggggccaagcctgagggcaaggctataatagatgaatttgagcagaagcttcgggcctgtcataccagaggtttggatggaatcaaggagcttgagattggccaagcaggtagccagagagcgccatcagccaagaaaccatccactggttctaggtaccagcctctggcttctacagcctcagacaatgactttgtcacaccagagccccgccgtactacccgtcggcatccaaacacccagcagcgagcttccaaaaagaaacccaaagttgtcttctcaagtgatgagtccagtgaggaagatctttcagcagagatgacagaagacgagacacccaagaaaacaactcccattctcagagcatcggctcgcaggcacagatcctaggaagtctgttcctgtcctccctgtgcagggtatcctgtagggtgacctggaattcgaattctgtttcccttgtaaaatatttgtctgtctctttttttaaaaaaaaaaaaaggccgggcactgtggctcacgcctgtaatcccagcactttgcgataccaaggcgggtggataacctgaggtagggagttcgagaccagcctgaccaacatggagaaaccccatctctactaaaaataaaaaattagccgggcgtattggcgtgcgcctgtaatcccagctactcaagaggctgaggcaggagaatcgcctgaacccagaggcggaggttgtagtgagccgaaatcacaccattgcactccagcttgggcaacaatagcgaacctccatctcaaattaaaaaaaaaatgcctacacgctctttaaaatgcaaggctttctcttaaattagcctaactgaactgcgttgagctgcttcaactttggaatatatgtttgccaatctccttgttttctaatgaataaatgtttttatatactttta

SEQ ID NO: 365183 - DNA, 5503 bp, Homo sapiens
aagttttggagcgccggacaagctgaggtccgcgactcgtcgctaagattccccaaaactgagatttcaagaaaattcaccctttccgctttctttggcgcccttcaaccgtgaaggaaatgaaggttgagaacctggaacccgcttccaaagaccaagccctttctctgtgcctcacaacagtcttgcgctgtagctgtttttattacccctattttactactggggaggagatttgaggtcctgaaagtgaagtgacttgctggacgtcacttagcagaggagatggcgaaacctggattagaggcgatgccttctaactcccagcgtggacttgcctcctttcctgggggtgactgaatgcccagccagggacgcgacgtctctggccagcagaaatacggcctcctccccgccgactgggcaaagggggaccttgcggccaaggagggattcgcaggcgggccgggggtgggagcgggggccggagccggagccttggcccgcccccgggcggcgctgtgattggccggccgctccggcgggcgtcgcgattggccgtcctgcagccgttgagatttgaactcggtatttgtggctttgcccgcgcgttgccagactcagaggcggccctttgcctctgcctgccggggattggccggattctccgccgacttgaaaactgccttgctaattggtgcgtgttgtgcacgcgtgttttttccttttcatttcagcctgactgccggaatcagagccgcgggtgagatccccagccctgtgagcctgtaggagtagaatggctccccaaatgtatgagttccatctgccattatccccagaggagttgttgaaaagtggaggggtgaatcagtatgttgtgcaagaggtactgtccatcaaacatcttccaccacagcttagagcttttcaggctgcctttcgagctcaggggcccctggctatgctgcagcactttgatactatctacagcattttgcatcactttcgaagtatagatcctggcctcaaagaagatactctggaattcctgataaaagtggtatcccgccactcccaggagcttccagctatcctggatgatacaactttgagtggatcagatagaaacgcccatctaaatgccctcaaaatgaactgttatgctctgatacgtctcctggaatcctttgagaccatggccagccagacaaaccttgtggacctggaccttggtgggaagggtaagaaagctcggaccaaggcagcccatggctttgactgggaagaagagaggcaaccaattcttcagcttttaacacagctacttcagttggacatccgtcacctgtggaaccactcaataattgaagaagaatttgtcagtttggttactggctgttgctaccgccttctggagaatcccaccattaatcaccagaagaaccgccccactcgggaagccataacacacctgcttggtgtagccttgacccgttataaccatatgctcagtgctacagtgaagatcatccagatgctgcagcactttgaacacctggcacctgtactggttgcagccgtgagtctatgggcaactgactatggaatgaagagcatagtgggagagattgtaagagagattggacaaaagtgtccccaagagctgagtcgagacccttcagggacaaagggctttgcagcattcctgacagaactagcagaacgtgtcccagctatcctgatgtccagcatgtgcattttgctagatcacctggatggagaaaattacatgatgcgtaatgctgtgctggcagccatggcggagatggtgctgcaggttctcagtggcgatcaactggaagcagcagcccgagacaccagagaccagttcttggatactttacaagcccatggccatgatgtcaactcctttgtgcggagccgtgttttgcagctcttcacccgaattgtccagcagaaggctctccccctgacacgtttccaggcagtggtggctttagctgtgggacgtctggcagacaagtcagtgctagtatgtaaaaatgccatccagctgctggccagttttctagccaataatcctttctcctgcaagcttagtgatgctgaccttgccggaccactgcagaaggagacccagaaattacaagagatgagggcccagaggcgaactgcagcagcttctgcagtgctggacccagaggaggagtgggaagccatgctgccagagttgaagtctaccctgcagcagcttctacagcttccccagggagaggaggagattcctgagcaaattgccaatacagagacaactgaagatgtgaaaggacgcatctatcaactgcttgccaaagctagttacaaaaaggccatcattctcactcgagaagccacaggccacttccaggagtccgaacccttcagtcatatagacccagaggagtcagaggagaccaggctcttgaatatcttaggacttatcttcaaaggcccagcagcttccacacaagaaaagaatccccgggagtctacaggaaacatggtcacaggacagactgtctgtaaaaataaacccaatatgtcggatcctgaggaatccaggggaaatgatgaactagtgaagcaggagatgctggtacagtatctgcaggatgcctacagcttctcccggaagattacagaggccattggcataatcagcaagatgatgtatgaaaacacaactacagtggtgcaggaggtgattgaattctttgtgatggtcttccaatttggggtaccccaggccctgtttggggtgcgccgtatgctgcctctcatctggtctaaggagcctggtgtccgggaagccgtgcttaatgcctaccgccaactctacctcaaccccaaaggggactctgccagagccaaggcccaggctttgattcagaatctctctctgctgctagtggatgcctcggttgggaccattcagtgtcttgaggaaattctctgtgagtttgtgcagaaggatgagttgaaaccagcagtgacccagctgctgtgggagcgggccaccgagaaggtcgcctgctgtcctctggagcgctgttcctctgtcatgcttcttggcatgatggcacgaggaaagccagaaattgtgggaagcaatttagacacactggtgagcatagggctggatgagaagtttccacaggactacaggctggcccagcaggtgtgccatgccattgccaacatctcggacaggagaaagccttctctgggcaaacgtcacccccccttccggctgcctcaggaacacaggttgtttgagcgactgcgggagacagtcacaaaaggctttgtccacccagacccactctggatcccattcaaagaggtggcagtgaccctcatttaccaactggcagagggccccgaagtgatctgtgcccagatattgcagggctgtgcaaaacaggccctggagaagctagaagagaagagaaccagtcaggaggacccgaaggagtcccccgcaatgctccccactttcctgttgatgaacctgctgtccctggctggggatgtggctctgcagcagctggtccacttggagcaggcagtgagtggagagctctgccggcgccgagttctccgggaagaacaggagcacaagaccaaagatcccaaggagaagaatacgagctctgagaccaccatggaggaggagctggggctggttggggcaacagcagatgacacagaggcagaactaatccgtggcatctgcgagatggaactgttggatggcaaacagacactggctgcctttgttccactcttgcttaaagtctgtaacaacccaggcctctatagcaacccagacctctctgcagctgcttcacttgcccttggcaagttctgcatgatcagtgccactttctgcgactcccagcttcgtcttctgttcaccatgctggaaaagtctccacttcccattgtccgcaatctggtggacccctggactcctcatctgtatgctcgcctccgggaccctgctcagcaagtgcggaaaacagcggggctggtgatgacccacctgatcctcaaggacatggtgaaggtgaaggggcaggtcagcgagatggcggtgctgctcatcgaccccgagcctcagattgctgccctggccaagaacttcttcaatgagctctcccacaagggcaacgcaatctataatctccttccagatatcatcagccgcctgtcagaccccgagctgggggtggaggaagagcctttccacaccatcatgaaacagctcctctcctacatcaccaaggacaagcagacagagagcctggtggaaaagctgtgtcagcggttccgcacatcccgaactgagcggcagcagcgagacctggcctactgtgtgtcacagctgcccctcacagagcgaggcctccgtaagatgcttgacaattttgactgttttggagacaaactgtcagatgagtccatcttcagtgcttttttgtcagttgtgggcaagctgcgacgtggggccaagcctgagggcaaggctataatagatgaatttgagcagaagcttcgggcctgtcataccagaggtttggatggaatcaaggagcttgagattggccaagcaggtagccagagagcgccatcagccaagaaaccatccactggttctaggtaccagcctctggcttctacagcctcagacaatgactttgtcacaccagagccccgccgtactacccgtcggcatccaaacacccagcagcgagcttccaaaaagaaacccaaagttgtcttctcaagtgatgagtccagtgaggaagatctttcagcagagatgacagaagacgagacacccaagaaaacaactcccattctcagagcatcggctcgcaggcacagatcctaggaagtctgttcctgtcctccctgtgcagggtatcctgtagggtgacctggaattcgaattctgtttcccttgtaaaatatttgtctgtctctttttttaaaaaaaaaaaaaggccgggcactgtggctcacgcctgtaatcccagcactttgcgataccaaggcgggtggataacctgaggtagggagttcgagaccagcctgaccaacatggagaaaccccatctctactaaaaataaaaaattagccgggcgtattggcgtgcgcctgtaatcccagctactcaagaggctgaggcaggagaatcgcctgaacccagaggcggaggttgtagtgagccgaaatcacaccattgcactccagcttgggcaacaatagcgaacctccatctcaaattaaaaaaaaaatgcctacacgctctttaaaatgcaaggctttctcttaaattagcctaactgaactgcgttgagctgcttcaactttggaatatatgtttgccaatctccttgttttctaatgaataaatgtttttatatactttta

SEQ ID NO: 365184 - DNA, 5364 bp, Homo sapiens
aagttttggagcgccggacaagctgaggtccgcgactcgtcgctaagattccccaaaactgagatttcaagaaaattcaccctttccgctttctttggcgcccttcaaccgtgaaggaaatgaaggttgagaacctggaacccgcttccaaagaccaagccctttctctgtgcctcacaacagtcttgcgctgtagctgtttttattacccctattttactactggggaggagatttgaggtcctgaaagtgaagtgacttgctggacgtcacttagcagaggagatggcgaaacctggattagaggcgatgccttctaactcccagcgtggacttgcctcctttcctgggggtgactgaatgcccagccagggacgcgacgtctctggccagcagaaatacggcctcctccccgccgactgggcaaagggggaccttgcggccaaggagggattcgcaggcgggccgggggtgggagcgggggccggagccggagccttggcccgcccccgggcggcgctgtgattggccggccgctccggcgggcgtcgcgattggccgtcctgcagccgttgagatttgaactcggtatttgtggctttgcccgcgcgttgccagactcagaggcggccctttgcctctgcctgccggggattggccggattctccgccgacttgaaaactgccttgctaattggtgcgtgttgtgcacgcgtgttttttccttttcatttcagcctgactgccggaatcagagccgcgggtgagatccccagccctgtgagcctgtaggagtagaatggctccccaaatgtatgagttccatctgccattatccccagaggagttgttgaaaagtggaggggtgaatcagtatgttgtgcaagaggtactgtccatcaaacatcttccaccacagcttagagcttttcaggctgcctttcgagctcaggggcccctggctatgctgcagcactttgatactatctacagcattttgcatcactttcgaagtatagatcctggcctcaaagaagatactctggaattcctgataaaagtggtatcccgccactcccaggagcttccagctatcctggatgatacaactttgagtggatcagatagaaacgcccatctaaatgccctcaaaatgaactgttatgctctgatacgtctcctggaatcctttgagaccatggccagccagacaaaccttgtggacctggaccttggtgggaagggtaagaaagctcggaccaaggcagcccatggctttgactgggaagaagagaggcaaccaattcttcagcttttaacacagctacttcagttggacatccgtcacctgtggaaccactcaataattgaagaagaatttgtcagtttggttactggctgttgctaccgccttctggagaatcccaccattaatcaccagaagaaccgccccactcgggaagccataacacacctgcttggtgtagccttgacccgttataaccatatgctcagtgctacagtgaagatcatccagatgctgcagcactttgaacacctggcacctgtactggttgcagccgtgagtctatgggcaactgactatggaatgaagagcatagtgggagagattgtaagagagattggacaaaagtgtccccaagagctgagtcgagacccttcagggacaaagggctttgcagcattcctgacagaactagcagaacgtgtcccagctatcctgatgtccagcatgtgcattttgctagatcacctggatggagaaaattacatgatgcgtaatgctgtgctggcagccatggcggagatggtgctgcaggttctcagtggcgatcaactggaagcagcagcccgagacaccagagaccagttcttggatactttacaagcccatggccatgatgtcaactcctttgtgcggagccgtgttttgcagctcttcacccgaattgtccagcagaaggctctccccctgacacgtttccaggcagtggtggctttagctgtgggacgtctggcagacaagtcagtgctagtatgtaaaaatgccatccagctgctggccagttttctagccaataatcctttctcctgcaagcttagtgatgctgaccttgccggaccactgcagaaggagacccagaaattacaagagatgagggcccagaggcgaactgcagcagcttctgcagtgctggacccagaggaggagtgggaagccatgctgccagagttgaagtctaccctgcagcagcttctacagcttccccagggagaggaggagattcctgagcaaattgccaatacagagacaactgaagatgtgaaaggacgcatctatcaactgcttgccaaagctagttacaaaaaggccatcattctcactcgagaagccacaggccacttccaggagtccgaacccttcagtcatatagacccagaggagtcagaggagaccaggctcttgaatatcttaggacttatcttcaaaggcccagcagcttccacacaagaaaagaatccccgggagtctacaggaaacatggtcacaggacagactgtctgtaaaaataaacccaatatgtcggatcctgaggaatccaggggaaatgatgaactagtgaagcaggagatgctggtacagtatctgcaggatgcctacagcttctcccggaagattacagaggccattggcataatcagcaagatgatgtatgaaaacacaactacagtggtgcaggaggtgattgaattctttgtgatggtcttccaatttggggtaccccaggccctgtttggggtgcgccgtatgctgcctctcatctggtctaaggagcctggtgtccgggaagccgtgcttaatgcctaccgccaactctacctcaaccccaaaggggactctgccagagccaaggcccaggctttgattcagaatctctctctgctgctagtggatgcctcggttgggaccattcagtgtcttgaggaaattctctgtgagtttgtgcagaaggatgagttgaaaccagcagtgacccagctgctgtgggagcgggccaccgagaaggtcgcctgctgtcctctggagcgctgttcctctgtcatgcttcttggcatgatggcacgaggaaagccagaaattgtgggaagcaatttagacacactggtgagcatagggctggatgagaagtttccacaggactacaggctggcccagcaggtgtgccatgccattgccaacatctcggacaggagaaagccttctctgggcaaacgtcacccccccttccggctgcctcaggaacacaggttgtttgagcgactgcgggagacagtcacaaaaggctttgtccacccagacccactctggatcccattcaaagaggtggcagtgaccctcatttaccaactggcagagggccccgaagtgatctgtgcccagatattgcagggctgtgcaaaacaggccctggagaagctagaagagaagagaaccagtcaggaggacccgaaggagtcccccgcaatgctccccactttcctgttgatgaacctgctgtccctggctggggatgtggctctgcagcagctggtccacttggagcaggcagtgagtggagagctctgccggcgccgagttctccgggaagaacaggagcacaagaccaaagatcccaaggagaagaatacgagctctgagaccaccatggaggaggagctggggctggttggggcaacagcagatgacacagaggcagaactaatccgtggcatctgcgagatggaactgttggatggcaaacagacactggctgcctttgttccactcttgcttaaagtctgtaacaacccaggcctctatagcaacccagacctctctgcagctgcttcacttgcccttggcaagttctgcatgatcagtgccactttctgcgactcccagcttcgtcttctgttcaccatgctggaaaagtctccacttcccattgtccggtctaacctcatggttgccactggggatctggccatccgctttcccaatctggtggacccctggactcctcatctgtatgctcgcctccgggaccctgctcagcaagtgcggaaaacagcggggctggtgatgacccacctgatcctcaaggacatggtgaaggtgaaggggcaggtcagcgagatggcggtgctgctcatcgaccccgagcctcagattgctgccctggccaagaacttcttcaatgagctctcccacaagggcaacgcaatctataatctccttccagatatcatcagccgcctgtcagaccccgagctgggggtggaggaagagcctttccacaccatcatgaaacagctcctctcctacatcaccaaggacaagcagacagagagcctggtggaaaagctgtgtcagcggttccgcacatcccggctataatagatgaatttgagcagaagcttcgggcctgtcataccagaggtttggatggaatcaaggagcttgagattggccaagcaggtagccagagagcgccatcagccaagaaaccatccactggttctaggtaccagcctctggcttctacagcctcagacaatgactttgtcacaccagagccccgccgtactacccgtcggcatccaaacacccagcagcgagcttccaaaaagaaacccaaagttgtcttctcaagtgatgagtccagtgaggaagatctttcagcagagatgacagaagacgagacacccaagaaaacaactcccattctcagagcatcggctcgcaggcacagatcctaggaagtctgttcctgtcctccctgtgcagggtatcctgtagggtgacctggaattcgaattctgtttcccttgtaaaatatttgtctgtctctttttttaaaaaaaaaaaaaggccgggcactgtggctcacgcctgtaatcccagcactttgcgataccaaggcgggtggataacctgaggtagggagttcgagaccagcctgaccaacatggagaaaccccatctctactaaaaataaaaaattagccgggcgtattggcgtgcgcctgtaatcccagctactcaagaggctgaggcaggagaatcgcctgaacccagaggcggaggttgtagtgagccgaaatcacaccattgcactccagcttgggcaacaatagcgaacctccatctcaaattaaaaaaaaaatgcctacacgctctttaaaatgcaaggctttctcttaaattagcctaactgaactgcgttgagctgcttcaactttggaatatatgtttgccaatctccttgttttctaatgaataaatgtttttatatactttta

SEQ ID NO: 365185 - DNA, 4023 bp, Homo sapiens
  misc_feature (3971)..(3971): n is a, c, g, or t
  misc_feature (3984)..(3984): n is a, c, g, or t
  misc_feature (3997)..(3997): n is a, c, g, or t
aagttttggagcgccggacaagctgaggtccgcgactcgtcgctaagattccccaaaactgagatttcaagaaaattcaccctttccgctttctttggcgcccttcaaccgtgaaggaaatgaaggttgagaacctggaacccgcttccaaagaccaagccctttctctgtgcctcacaacagtcttgcgctgtagctgtttttattacccctattttactactggggaggagatttgaggtcctgaaagtgaagtgacttgctggacgtcacttagcagaggagatggcgaaacctggattagaggcgatgccttctaactcccagcgtggacttgcctcctttcctgggggtgactgaatgcccagccagggacgcgacgtctctggccagcagaaatacggcctcctccccgccgactgggcaaagggggaccttgcggccaaggagggattcgcaggcgggccgggggtgggagcgggggccggagccggagccttggcccgcccccgggcggcgctgtgattggccggccgctccggcgggcgtcgcgattggccgtcctgcagccgttgagatttgaactcggtatttgtggctttgcccgcgcgttgccagactcagaggcggccctttgcctctgcctgccggggattggccggattctccgccgacttgaaaactgccttgctaattggtgcgtgttgtgcacgcgtgttttttccttttcatttcagcctgactgccggaatcagagccgcgggtgagatccccagccctgtgagcctgtaggagtagaatggctccccaaatgtatgagttccatctgccattatccccagaggagttgttgaaaagtggaggggtgaatcagtatgttgtgcaagaggtactgtccatcaaacatcttccaccacagcttagagcttttcaggctgcctttcgagctcaggggcccctggctatgctgcagcactttgatactatctacagcattttgcatcactttcgaagtatagatcctggcctcaaagaagatactctggaattcctgataaaagtggtatcccgccactcccaggagcttccagctatcctggatgatacaactttgagtggatcagatagaaacgcccatctaaatgccctcaaaatgaactgttatgctctgatacgtctcctggaatcctttgagaccatggccagccagacaaaccttgtggacctggaccttggtgggaagggtaagaaagctcggaccaaggcagcccatggctttgactgggaagaagagaggcaaccaattcttcagcttttaacacagctacttcagttggacatccgtcacctgtggaaccactcaataattgaagaagaatttgtcagtttggttactggctgttgctaccgccttctggagaatcccaccattaatcaccagaagaaccgccccactcgggaagccataacacacctgcttggtgtagccttgacccgttataaccatatgctcagtgctacagtgaagatcatccagatgctgcagcactttgaacacctggcacctgtactggttgcagccgtgagtctatgggcaactgactatggaatgaagagcatagtgggagagattgtaagagagattggacaaaagtgtccccaagagctgagtcgagacccttcagggacaaagggctttgcagcattcctgacagaactagcagaacgtgtcccagctatcctgatgtccagcatgtgcattttgctagatcacctggatggagaaaattacatgatgcgtaatgctgtgctggcagccatggcggagatggtgctgcaggttctcagtggcgatcaactggaagcagcagcccgagacaccagagaccagttcttggatactttacaagcccatggccatgatgtcaactcctttgtgcggagccgtgttttgcagctcttcacccgaattgtccagcagaaggctctccccctgacacgtttccaggcagtggtggctttagctgtgggacgtctggcagacaagtcagtgctagtatgtaaaaatgccatccagctgctggccagttttctagccaataatcctttctcctgcaagcttagtgatgctgaccttgccggaccactgcagaaggagacccagaaattacaagagatgagggcccagaggcgaactgcagcagcttctgcagtgctggacccagaggaggagtgggaagccatgctgccagagttgaagtctaccctgcagcagcttctacagcttccccagggagaggaggagattcctgagcaaattgccaatacagagacaactgaagatgtgaaaggacgcatctatcaactgcttgccaaagctagttacaaaaaggccatcattctcactcgagaagccacaggccacttccaggagtccgaacccttcagtcatatagacccagaggagtcagaggagaccaggctcttgaatatcttaggacttatcttcaaaggcccagcagcttccacacaagaaaagaatccccgggagtctacaggaaacatggtcacaggacagactgtctgtaaaaataaacccaatatgtcggatcctgaggaatccaggggaaatgatgaactagtgaagcaggagatgctggtacagtatctgcaggatgcctacagcttctcccggaagattacagaggccattggcataatcagcaagatgatgtatgaaaacacaactacagtggtgcaggaggtgattgaattctttgtgatggtcttccaatttggggtaccccaggccctgtttggggtgcgccgtatgctgcctctcatctggtctaaggagcctggtgtccgggaagccgtgcttaatgcctaccgccaactctacctcaaccccaaaggggactctgccagagccaaggcccaggctttgattcagaatctctctctgctgctagtggatgcctcggttgggaccattcagtgtcttgaggaaattctctgtgagtttgtgcagaaggatgagttgaaaccagcagtgacccagctgctgtgggagcgggccaccgagaaggtcgcctgctgtcctctggagcgctgttcctctgtcatgcttcttggcatgatggcacgaggaaagccagaaattgtgggaagcaatttagacacactggtgagcatagggctggatgagaagtttccacaggactacaggctggcccagcaggtgtgccatgccattgccaacatctcggacaggagaaagccttctctgggcaaacgtcacccccccttccggctgcctcaggaacacaggttgtttgagcgactgcgggagacagtcacaaaaggctttgtccacccagacccactctggatcccattcaaagaggtggcagtgaccctcatttaccaactggcagagggccccgaagtgatctgtgcccagatattgcagggctgtgcaaaacaggccctggagaagctagaagagaagagaaccagtcaggaggacccgaaggagtcccccgcaatgctccccactttcctgttgatgaacctgctgtccctggctggggatgtggctctgcagcagctggtccacttggagcaggcagtgagtggagagctctgccggcgccgagttctccgggaagaacaggagcacaagaccaaagatcccaaggagaagaatacgagctctgagaccaccatggaggaggagctggggctggttggggcaacagcagatgacacagaggcagaactaatccgtggcatctgcgagatggaactgttggatggcaaacagacactggctgcctttgttccactcttgcttaaagtctgtaacaacccaggcctctatagcaacccagacctctctgcagctgcttcacttgcccttggcaagttctgcatgatcagtgcccttttttggggaattccaaattttngcctttttgtttnaccattgcctggnaaaaaggtcttccactttccatttgg

SEQ ID NO: 365186 - DNA, 4102 bp, Homo sapiens
aagttttggagcgccggacaagctgaggtccgcgactcgtcgctaagattccccaaaactgagatttcaagaaaattcaccctttccgctttctttggcgcccttcaaccgtgaaggaaatgaaggttgagaacctggaacccgcttccaaagaccaagccctttctctgtgcctcacaacagtcttgcgctgtagctgtttttattacccctattttactactggggaggagatttgaggtcctgaaagtgaagtgacttgctggacgtcacttagcagaggagatggcgaaacctggattagaggcgatgccttctaactcccagcgtggacttgcctcctttcctgggggtgactgaatgcccagccagggacgcgacgtctctggccagcagaaatacggcctcctccccgccgactgggcaaagggggaccttgcggccaaggagggattcgcaggcgggccgggggtgggagcgggggccggagccggagccttggcccgcccccgggcggcgctgtgattggccggccgctccggcgggcgtcgcgattggccgtcctgcagccgttgagatttgaactcggtatttgtggctttgcccgcgcgttgccagactcagaggcggccctttgcctctgcctgccggggattggccggattctccgccgacttgaaaactgccttgctaattggtgcgtgttgtgcacgcgtgttttttccttttcatttcagcctgactgccggaatcagagccgcgggtgagatccccagccctgtgagcctgtaggagtagaatggctccccaaatgtatgagttccatctgccattatccccagaggagttgttgaaaagtggaggggtgaatcagtatgttgtgcaagaggtactgtccatcaaacatcttccaccacagcttagagcttttcaggctgcctttcgagctcaggggcccctggctatgctgcagcactttgatactatctacagcattttgcatcactttcgaagtatagatcctggcctcaaagaagatactctggaattcctgataaaagtggtatcccgccactcccaggagcttccagctatcctggatgatacaactttgagtggatcagatagaaacgcccatctaaatgccctcaaaatgaactgttatgctctgatacgtctcctggaatcctttgagaccatggccagccagacaaaccttgtggacctggaccttggtgggaagggtaagaaagctcggaccaaggcagcccatggctttgactgggaagaagagaggcaaccaattcttcagcttttaacacagctacttcagttggacatccgtcacctgtggaaccactcaataattgaagaagaatttgtcagtttggttactggctgttgctaccgccttctggagaatcccaccattaatcaccagaagaaccgccccactcgggaagccataacacacctgcttggtgtagccttgacccgttataaccatatgctcagtgctacagtgaagatcatccagatgctgcagcactttgaacacctggcacctgtactggttgcagccgtgagtctatgggcaactgactatggaatgaagagcatagtgggagagattgtaagagagattggacaaaagtgtccccaagagctgagtcgagacccttcagggacaaagggctttgcagcattcctgacagaactagcagaacgtgtcccagctatcctgatgtccagcatgtgcattttgctagatcacctggatggagaaaattacatgatgcgtaatgctgtgctggcagccatggcggagatggtgctgcaggttctcagtggcgatcaactggaagcagcagcccgagacaccagagaccagttcttggatactttacaagcccatggccatgatgtcaactcctttgtgcggagccgtgttttgcagctcttcacccgaattgtccagcagaaggctctccccctgacacgtttccaggcagtggtggctttagctgtgggacgtctggcagacaagtcagtgctagtatgtaaaaatgccatccagctgctggccagttttctagccaataatcctttctcctgcaagcttagtgatgctgaccttgccggaccactgcagaaggagacccagaaattacaagagatgagggcccagaggcgaactgcagcagcttctgcagtgctggacccagaggaggagtgggaagccatgctgccagagttgaagtctaccctgcagcagcttctacagcttccccagggagaggaggagattcctgagcaaattgccaatacagagacaactgaagatgtgaaaggacgcatctatcaactgcttgccaaagctagttacaaaaaggccatcattctcactcgagaagccacaggccacttccaggagtccgaacccttcagtcatatagacccagaggagtcagaggagaccaggctcttgaatatcttaggacttatcttcaaaggcccagcagcttccacacaagaaaagaatccccgggagtctacaggaaacatggtcacaggacagactgtctgtaaaaataaacccaatatgtcggatcctgaggaatccaggggaaatgatgaactagtgaagcaggagatgctggtacagtatctgcaggatgcctacagcttctcccggaagattacagaggccattggcataatcagcaagatgatgtatgaaaacacaactacagtggtgcaggaggtgattgaattctttgtgatggtcttccaatttggggtaccccaggccctgtttggggtgcgccgtatgctgcctctcatctggtctaaggagcctggtgtccgggaagccgtgcttaatgcctaccgccaactctacctcaaccccaaaggggactctgccagagccaaggcccaggctttgattcagaatctctctctgctgctagtggatgcctcggttgggaccattcagtgtcttgaggaaattctctgtgagtttgtgcagaaggatgagttgaaaccagcagtgacccagctgctgtgggagcgggccaccgagaaggtcgcctgctgtcctctggagcgctgttcctctgtcatgcttcttggcatgatggcacgaggaaagccagaaattgtgggaagcaatttagacacactggtgagcatagggctggatgagaagtttccacaggactacaggctggcccagcaggtgtgccatgccattgccaacatctcggacaggagaaagccttctctgggcaaacgtcacccccccttccggctgcctcaggaacacaggttgtttgagcgactgcgggagacagtcacaaaaggctttgtccacccagacccactctggatcccattcaaagaggtggcagtgaccctcatttaccaactggcagagggccccgaagtgatctgtgcccagatattgcagggctgtgcaaaacaggccctggagaagctagaagagaagagaaccagtcaggaggacccgaaggagtcccccgcaatgctccccactttcctgttgatgaacctgctgtccctggctggggatgtggctctgcagcagctggtccacttggagcaggcagtgagtggagagctctgccggcgccgagttctccgggaagaacaggagcacaagaccaaagatcccaaggagaagaatacgagctctgagaccaccatggaggaggagctggggctggttggggcaacagcagatgacacagaggcagaactaatccgtggcatctgcgagatggaactgttggatggcaaacagatgttactttaagccaccgacgaaagagagacccacaaagtacccagtgtgttaaagcccaaatctcttcttgcgtttgtttgtttttgctgtgcgagttccacccctatgaaaaagaaattgatccaaagttccaggttttcttgggtctctagtcaattttcacattagtatagattttttggacaaaggcacttgttcccatgtacccaatcgctccacacatcatcaccaggctgtgctaataccgccaatatcccaggcgcacgggatact

SEQ ID NO: 365187 - DNA, 289 bp, Homo sapiens
agtgtacactgtgtcgtttttgtctaagttgaagttgggccagttcccacccccaactcttactacttcactagtttgaatagcacgtgagcaaggggaagatcagtaaaaatcggattcaggtttgatgggacttaaaaatgtctctttgccccaccttccctctccctctcctccagaggagtcccccgcaatgctccccactttcctgttgatgaacctgctgtccctggctggggatgtggctctgcagcagctggtccacttggagcaggcagtgagtggagag

SEQ ID NO: 365188 - DNA, 2519 bp, Homo sapiens
  misc_feature (24)..(24): n is a, c, g, or t
  misc_feature (58)..(58): n is a, c, g, or t
  misc_feature (368)..(368): n is a, c, g, or t
  misc_feature (1235)..(1235): n is a, c, g, or t
gcactgtggctactggtatgttcntcattgatttaacaacttcaaccttcatcccagntgatatccattttacaaatgagaaagcaggctcaatgctatcactgaagtttccaaactactaatagagtaaatgggacctgagtatgtgtgggactcaggatgctctggttcccctcctccaccctggacacagctgtttcctctggttccttagctgggggctgtacggagcattccagcgagcaagcaggagctgagggctgaaggaagatgatgaggagtggaaaaataaagacagctaaaccttcaagatcgtattgacaagggcgtgtgtgtttgtgagaatgtgggtgtgatcattcttgttngttgattgccatcccctcctttcctttcatagatctggacatctgtcccttacttagcatcctacgtcagtcccgtgttaaaagaaaacaaggcgattccgcagtccccccgttccctggaggtcctgtggaatggtaagtaatcagcacaaagggggttaatcttaggcctgaggtttggggccgggtgacaaggaagttaaactcgtcctccctgccagattctaccccctttcggagctgagctccagccaaacctgtggagttttctttgaccattttaggacatgttactgcttctgagttggctcccccagctgcttaaacaagacctttctcctgggttcctagtagtgaaaaggagcagcagagcaactgaggaggagggcgggtgggaggcatgggactggggcttggggaggtcaggcgagaccggggtgagagctcagagaagctcctgtgacttccatgctaagatcttgccagagaactctggtcagtcctcgggtgtctggatgaagtaaaggagttaggcatttcttcctttgattctctggcttacctaatagagagagtcagatgtggtctgctggggatggacagagggtttgtagaagtctcctaggctttagtgacccatcctctgcctccgcctccatggtggccagcatgaaccaggattgtctgaaggggttgtatcctctaagccagcgacctggttttatgttgagcgaagaggcggacgccctccctagaggagagtgcagctggatcaggatgcttgtgcagaggatgccctgtctgcacatttaccagcgttttccctacccccagctccttgggggattctttttcctggagtcattnactactttttgcaaaggaagtatgctatgcttagtgcccaaaccaaaactgtcttcactttttctgtcctcctagaaagtgatcaattgagagccatggcaggagaaggaatggccagagaaggttactcagaagggaggatgaggggtggcttccctcaggtgaaggtttcacagagaagaattgagttttctcctcctaaccacatccagcacttgcccaatttccctcaatgtggaatgaaacccctgggccagtcactgcatttcccataaaaggaatgttatcttggaaagggcataaagcgtcagccaagtcagagaagttcagaaacatttccaggaatgcagttcatttggaagcccctggctttgcacttgcgtgtcttagagatagtgtgccttcaactttaccttctatccagggctatttcctgttgcatctgtcaaatgagggcagtgacttaaaagagtaatatggtcttcccagcttcgtcatcctctgcttcctgctgaccaggggacgttgccacggaatgtctaccctaggcattgaggcatctggcaactgcttgcttgtcactaaaaagtaagagaaagaaggacagattgcctgggtggagaagagtgggaggtggcctagtggagaaagcaggattaagagaagggagggaaagatttagggagtttggctaatggagccctttacctgttggaagggcagcaagcaaaagttttaccagagttttccctacccccagctccttgggggattttttgttttgtttcatttttgtttttgtttttttgccttgagtaattttgacatgcagagttattcacaactttttgcaaagtactattttcattggcttttcagagccagtgaagttgccttctcctccaacatgaccacattttcctctgagcagacaaaaacagaacaaataagtttgtgggcttgcttggaggttgaaagaaataagtccagttaaaatgagagttgagccaggtgccctggctcatgcctgtaatcccagcactttgggaactttgggaggcagataacctgaggtcaggagtttgagaccaacctgaccaacatggtgataccccatctccactaaaaatacaaaattagctgggtgtggtggctcatgcctgtagtcccagctacttgggaggctgaggcaggagaacccgggaggcagaggttgcagtgagctgagatcgcaccattgcactccagcctgggcaagaagagggaaactccatctcaaaaaaa

SEQ ID NO: 365189 - DNA, 927 bp, Homo sapiens
gattcttatattgtgtcttgggtatgtgtcgtcttcccaactgcactcgaagctacgttgtaaacttgagagcagcagctccattccatttactagtataggcgaggtcccagttagggttgccgtagatgtttgtatgtggcttcagtgagcgtgtgtctttgtgtacgtgggggtgaagtgaaggcgtgtttgtgggctggtttcccagctgcccagcctgactttctacagtcagcaggatggacctggagatgtcagggctgaagaccctggagcatgtggcagtgacagtctccatcactcacccacggcgcggcagcttggagctgaagctgttctgccccagtggcatgatgtccctcatcggcgccccccgcagcatggactcgtatgtacacccgcccgaggcctgagcaaccttttcagcaagggcctttccagggaaaagaaatggaagaagtggatcctggcactgtcctaaactactgtggcactggctatccctggcggctggaagcctttcgtcacataccttcttcaagcgctaggccctgcacctcacatacatgttctctaatccttctaagaaccccctagattagactttgtaacctccttttacaaatgaggaaactggctgggtgtggtggctcacacctgtaatcccagcactttgggaggtcaaggcaggagaatcacttgaactcaggagttcaagaccagcctgggcaacaaagtgagaccctgtctctacaaaaaatttaaagattagctgagcatggtggtacatgcctgtagtcccagctactcaggagactgaggtgggaggatcacttgaacccaggaagtcaaggctgcagtgagctgtgatcatgccactgcactccagcttggataacagagtgagaccctgtctccaaaaaa

SEQ ID NO: 365190 - DNA, 338 bp, Homo sapiens
atttcagtgggttttggggcatagggattgtcctgagttgtctggtacctgcctgggggtgattagggcggggaaataaaagctctgtgtgtcagagtctgatagaggaggtggtgggggcatgggctctggattgctcagggaaatggccttcccgccggaggccagctatctgcctgacaggctgtgactcttctctcaaccttggccttctcccctcttctgagctagttggttgaattttttttaatgcttaagatttgtttttctcttttcacagcaacattttcttgaatttttttctgcacagcttttccaaaataaaaaccttccaaaca

SEQ ID NO: 365191 - DNA, 3470 bp, Homo sapiens
ccaggctggtaccggcccgggggttaagtgatgcggcggcagctgcggcggggccggtctgtagcctttgctgagtcaacactactcacagtgaaagtgatgccttttctccatttgcacaacatgagtgtgacgtggttagccagaccaggagctcaacctcatgtagaatccagtccactgctctgatgccgaaggggaggcagaaagtgccacacttggatgcccccctgggcctgcccacctgcctctggctggaattagccgggctcttcttactggttccctgggtcatgggcctggcagggacaggtgggcctgatggccagggcacaggggggccgagctgggctgtgcacctggaaagcctggaaggtgacggggaggaagagactctggagcagcaggcggatgccttggcccaggcagcagggctggtgaatgctggacgcatcggagagcttcaggggcactacctctttgtccagcctgctgggcacaggccggccctggaggtggaggccatccggcagcaggtggaggctgtgttggctgggcatgaagctgtgcgctggcactcagagcagaggctgctaaggcgggccaagcgcagcgtccacttcaacgaccccaagtacccgcagcaatggcacctgaataaccgacggagcccgggcagggacatcaacgtgacgggtgtgtgggaacgcaatgtgactgggcgaggggtgacggtggtggtagtggatgacggagtggaacacaccatccaggacattgcacccaactatagccctgagggtagctatgacctcaactctaatgaccctgaccccatgccccacccggatgtggagaatggcaaccaccatggcacgcgatgtgcaggagagatcgcggctgtgcccaacaacagcttctgtgccgtgggcgtggcctacgggagccgcatcgcaggtatccgggtactggatggacctctcacagacagcatggaggcagtggcgttcaacaagcactatcagatcaatgacatctacagctgcagctggggaccagatgacgatgggaagacagtggatggcccccatcagcttggaaaggctgccttacaacatggggtgattgctggtcgccagggctttgggagcatctttgtggtagccagtggcaacggaggccaacacaacgacaactgcaactacgatggctacgccaactccatctacaccgtcaccataggagctgtggatgaggagggacgcatgcctttctatgcagaagaatgtgcctccatgctggcagtcaccttcagtggtggggacaagatgcttcggagcattgtgaccactgactgggaccttcagaagggcactggctgcactgagggccacacagggacctcagctgcagcgcctctggcagctggcatgatagccttaatgctgcaggtgcggccctgcctcacgtggcgtgacgtccagcacatcattgtcttcacagccacccggtatgaggatcgccgtgcagagtgggtcaccaacgaggcaggcttcagccatagccaccagcacggtttcggcctcctcaacgcctggaggctcgtgaatgcagccaagatctggacatctgtcccttacttagcatcctacgtcagtcccgtgttaaaagaaaacaaggcgattccgcagtccccccgttccctggaggtcctgtggaatgtcagcaggatggacctggagatgtcagggctgaagaccctggagcatgtggcagtgacagtctccatcactcacccacggcgcggcagcttggagctgaagctgttctgccccagtggcatgatgtccctcatcggcgccccccgcagcatggactcggatcccaacggcttcaatgactggaccttctccactgtgcgatgctggggggagagagcccgagggacctacaggctggtcatcagggatgtcggggatgagtcattccaggtcggcatcctccggcaatggcagctgaccctatatggctctgtgtggagtgcagtagacatcagggacagacaaaggctgttagagagtgccatgagtggaaaatacctgcacgatgacttcgccctgccctgcccaccggggctgaaaattcctgaggaagatggttacaccatcacccccaacaccctcaagaccctggtgctggtaggctgtttcaccgtcttctggactgtttactacatgctggaagtatatttgagccagaggaatgtggcttccaatcaagtttgtaggagtggaccctgccactggccccatcggagccggaaagccaaggaggaagggacagagctagaatcagtgccactttgcagcagcaaggatccagacgaagtggaaacagagagcaggggccctcccaccacctctgacctccttgccccagacctgctggagcaaggggactggagcctgtcccagaacaagagcgccctggactgccctcatcagcacctagacgtaccgcacgggaaggaggagcagatctgctgacctcagggcctgacagtgtgggacaggctcttctttcccaaaattagggagctcttgacagaaagcagttctgatgcttacatctggaatctgaggcatcctctgactccactcaaagagggtgagggccttcttaagatacaaatggtggaggattgctgccagagaagtctggtcagagccacagggtctgcctccagccaaacgggagcttttggtgagaaggtgttggacaggggattggcgcccccctttggtttggcctccatcctcatctctcttgggccaagccagctgcctaggtcccccaagcatgggggaccccttcccacatataagttgagaaggtgcctgccatagccaggagcgcatctcaatggaaacatcactggggtcacttgggaagaggacttcggggtagaggctgggaggagcccctggacatgcctgtcctgaaagcggctgcctccattatccattcccaagatgcctgatcagaaaccaaccatgaatgaacccctggctccttcaccacccccacgattggtatgatgctgccggcacagctgggatacacacggctcccccaggcctgagctgcttcactagggaatcctgcggcaggactgcagagcagatggcagatgcacatgttggaggagagagccttgggagccactgccactccagtcctgccaccaccctgtcttcctctgcaagtgctcagggaaatggccttcccgccggaggccagctatctgcctgacaggctgtgactcttctctcaaccttggccttctcccctcttctgagctagttggttgaattttttttaatgcttaagatttgtttttctcttttcacagcaacattttcttgaatttttttctgcacagcttttccaaaataaaaaccttccaaaca

SEQ ID NO: 365192 - DNA, 4104 bp, Homo sapiens
agaggccgcggtggcgccgcgccgcccccgacggcgccctctggcggcgacagctggcgccgccggggcacggggatgctgcgggagacccctgagatacaagtggactctcccggggcgcggggaagaagggagagccgactgcgagaaggaaggcgacctgggtgggcaggatcccctctgggaagattacagggacagtcggggccatggcggtcagaaggagaagagcaacgagtggcttttaaaggtcggaaccgaaatgccctttacagaggacgccatgaaggagagccttctgaagagggaccatgtggaagatgccccgaggactcggggaggcggagcccgcgggttcagcccccagcgcccgcacggcccctgcctgcgtaggccgcccgcgggagccggaccccgggcgccggttgctgtggcccgcgggggtcgccgggccgcaggcgccgcgctgattggctgcgccgcgggcggaagtgatgctgctgtcactgctcctccggctcccgggaagccgcgagtttccgcagggaggcggcggcagctgcggcggggccggtctgtagcctttgctgagtcaacactactcacagtgaaagtgatgccttttctccatttgcacaacatgagtgtgacgtggttagccagaccaggagctcaacctcatgtagaatccagtccactgctctgatgccgaaggggaggcagaaagtgccacacttggatgcccccctgggcctgcccacctgcctctggctggaattagccgggctcttcttactggttccctgggtcatgggcctggcagggacaggtgggcctgatggccagggcacaggggggccgagctgggctgtgcacctggaaagcctggaaggtgacggggaggaagagactctggagcagcaggcggatgccttggcccaggcagcagggctggtgaatgctggacgcatcggagagcttcaggggcactacctctttgtccagcctgctgggcacaggccggccctggaggtggaggccatccggcagcaggtggaggctgtgttggctgggcatgaagctgtgcgctggcactcagagcagaggctgctaaggcgggccaagcgcagcgtccacttcaacgaccccaagtacccgcagcaatggcacctgaataaccgacggagcccgggcagggacatcaacgtgacgggtgtgtgggaacgcaatgtgactgggcgaggggtgacggtggtggtagtggatgacggagtggaacacaccatccaggacattgcacccaactatagccctgagggtagctatgacctcaactctaatgaccctgaccccatgccccacccggatgtggagaatggcaaccaccatggcacgcgatgtgcaggagagatcgcggctgtgcccaacaacagcttctgtgccgtgggcgtggcctacgggagccgcatcgcaggtatccgggtactggatggacctctcacagacagcatggaggcagtggcgttcaacaagcactatcagatcaatgacatctacagctgcagctggggaccagatgacgatgggaagacagtggatggcccccatcagcttggaaaggctgccttacaacatggggtgattgctggtcgccagggctttgggagcatctttgtggtagccagtggcaacggaggccaacacaacgacaactgcaactacgatggctacgccaactccatctacaccgtcaccatagataggactagccctgcttgcagaggaccttgggacttcttagatgtcagcataccctgggaacaccttcaagccatcatctggagatcaccgagctgcctccaccccaccacagctggagctgtggatgaggagggacgcatgcctttctatgcagaagaatgtgcctccatgctggcagtcaccttcagtggtggggacaagatgcttcggagcattgtgaccactgactgggaccttcagaagggcactggctgcactgagggccacacagggacctcagctgcagcgcctctggcagctggcatgatagccttaatgctgcaggtgcggccctgcctcacgtggcgtgacgtccagcacatcattgtcttcacagccacccggtatgaggatcgccgtgcagagtgggtcaccaacgaggcaggcttcagccatagccaccagcacggtttcggcctcctcaacgcctggaggctcgtgaatgcagccaagatctggacatctgtcccttacttagcatcctacgtcagtcccgtgttaaaagaaaacaaggcgattccgcagtccccccgttccctggaggtcctgtggaatgtcagcaggatggacctggagatgtcagggctgaagaccctggagcatgtggcagtgacagtctccatcactcacccacggcgcggcagcttggagctgaagctgttctgccccagtggcatgatgtccctcatcggcgccccccgcagcatggactcggatcccaacggcttcaatgactggaccttctccactgtgcgatgctggggggagagagcccgagggacctacaggctggtcatcagggatgtcggggatgagtcattccaggtcggcatcctccggcaatggcagctgaccctatatggctctgtgtggagtgcagtagacatcagggacagacaaaggctgttagagagtgccatgagtggaaaatacctgcacgatgacttcgccctgccctgcccaccggggctgaaaattcctgaggaagatggttacaccatcacccccaacaccctcaagaccctggtgctggtaggctgtttcaccgtcttctggactgtttactacatgctggaagtatatttgagccagaggaatgtggcttccaatcaagtttgtaggagtggaccctgccactggccccatcggagccggaaagccaaggaggaagggacagagctagaatcagtgccactttgcagcagcaaggatccagacgaagtggaaacagagagcaggggccctcccaccacctctgacctccttgccccagacctgctggagcaaggggactggagcctgtcccagaacaagagcgccctggactgccctcatcagcacctagacgtaccgcacgggaaggaggagcagatctgctgacctcagggcctgacagtgtgggacaggctcttctttcccaaaattagggagctcttgacagaaagcagttctgatgcttacatctggaatctgaggcatcctctgactccactcaaagagggtgagggccttcttaagatacaaatggtggaggattgctgccagagaagtctggtcagagccacagggtctgcctccagccaaacgggagcttttggtgagaaggtgttggacaggggattggcgcccccctttggtttggcctccatcctcatctctcttgggccaagccagctgcctaggtcccccaagcatgggggaccccttcccacatataagttgagaaggtgcctgccatagccaggagcgcatctcaatggaaacatcactggggtcacttgggaagaggacttcggggtagaggctgggaggagcccctggacatgcctgtcctgaaagcggctgcctccattatccattcccaagatgcctgatcagaaaccaaccatgaatgaacccctggctccttcaccacccccacgattggtatgatgctgccggcacagctgggatacacacggctcccccaggcctgagctgcttcactagggaatcctgcggcaggactgcagagcagatggcagatgcacatgttggaggagagagccttgggagccactgccactccagtcctgccaccaccctgtcttcctctgcaagtgctcagggaaatggccttcccgccggaggccagctatctgcctgacaggctgtgactcttctctcaaccttggccttctcccctcttctgagctagttggttgaattttttttaatgcttaagatttgtttttctcttttcacagcaacattttcttgaatttttttctgcacagcttttccaaaataaaaaccttccaaaca

SEQ ID NO: 365193 - DNA, 4215 bp, Homo sapiens
agaggccgcggtggcgccgcgccgcccccgacggcgccctctggcggcgacagctggcgccgccggggcacggggatgctgcgggagacccctgagatacaagtggactctcccggggcgcggggaagaagggagagccgactgcgagaaggaaggcgacctgggtgggcaggatcccctctgggaagattacagggacagtcggggccatggcggtcagaaggagaagagcaacgagtggcttttaaaggtcggaaccgaaatgccctttacagaggacgccatgaaggagagccttctgaagagggaccatgtggaagatgccccgaggactcggggaggcggagcccgcgggttcagcccccagcgcccgcacggcccctgcctgcgtaggccgcccgcgggagccggaccccgggcgccggttgctgtggcccgcgggggtcgccgggccgcaggcgccgcgctgattggctgcgccgcgggcggaagtgatgctgctgtcactgctcctccggctcccgggaagccgcgagtttccgcagggaggcggcggcagctgcggcggggccggtctgtagcctttgctgagtcaacactactcacagtgaaagtgatgccttttctccatttgcacaacatgagtgtgacgtggttagccagaccaggagctcaacctcatgtagaatccagtccactgctctgatgccgaaggggaggcagaaagtgccacacttggatgcccccctgggcctgcccacctgcctctggctggaattagccgggctcttcttactggttccctgggtcatgggcctggcagggacaggtgggcctgatggccagggcacaggggggccgagctgggctgtgcacctggaaagcctggaaggtgacggggaggaagagactctggagcagcaggcggatgccttggcccaggcagcagggctggtgaatgctggacgcatcggagagcttcaggggcactacctctttgtccagcctgctgggcacaggccggccctggaggtggaggccatccggcagcaggtggaggctgtgttggctgggcatgaagctgtgcgctggcactcagagcagaggctgctaaggcgggccaagcgcagcgtccacttcaacgaccccaagtacccgcagcaatggcacctgaataaccgacggagcccgggcagggacatcaacgtgacgggtgtgtgggaacgcaatgtgactgggcgaggggtgacggtggtggtagtggatgacggagtggaacacaccatccaggacattgcacccaactatagccctgagggtagctatgacctcaactctaatgaccctgaccccatgccccacccggatgtggagaatggcaaccaccatggcacgcgatgtgcaggagagatcgcggctgtgcccaacaacagcttctgtgccgtgggcgtggcctacgggagccgcatcgcaggtatccgggtactggatggacctctcacagacagcatggaggcagtggcgttcaacaagcactatcagatcaatgacatctacagctgcagctggggaccagatgacgatgggaagacagtggatggcccccatcagcttggaaaggctgccttacaacatggggtgattgctggtcgccagggctttgggagcatctttgtggtagccagtggcaacggaggccaacacaacgacaactgcaactacgatggctacgccaactccatctacaccgtcaccataggagctgtggatgaggagggacgcatgcctttctatgcagaagaatgtgcctccatgctggcagtcaccttcagtggtggggacaagatgcttcggagcattgtgaccactgactgggaccttcagaagggcactggctgcactgagggccacacagggacctcagctgcagcgcctctggcagctggcatgatagccttaatgctgcaggtgcggccctgcctcacgtggcgtgacgtccagcacatcattgtcttcacagccacccggtatgaggatcgccgtgcagagtgggtcaccaacgaggcaggcttcagccatagccaccagcacggtttcggcctcctcaacgcctggaggctcgtgaatgcagccaagatctggacatctgtcccttacttagcatcctacgtcagtcccgtgttaaaagaaaacaaggcgattccgcagtccccccgttccctggaggtcctgtggaatgtcagcaggatggacctggagatgtcagggctgaagaccctggagcatgtggcagtgacagtctccatcactcacccacggcgcggcagcttggagctgaagctgttctgccccagtggcatgatgtccctcatcggcgccccccgcagcatggactcggatcccaacggcttcaatgactggaccttctccactgtgcgatgctggggggagagagcccgagggacctacaggctggtcatcagggatgtcggggatgagtcattccaggtcggcatcctccggcaatggcagctgaccctatatggctctgtgtggagtgcagtagacatcagggacagacaaaggctgttagagagtgccatgagtggaaaatacctgcacgatgacttcgccctgccctgcccaccggggctgaaaattcctgaggaagatggttacaccatcacccccaacaccctcaagaccctggtgctggtaggctgtttcaccgtcttctggactgtttactacatgctggaagtatatttgagccagaggaatgtggcttccaatcaagtttgtaggagtggaccctgccactggccccatcggagccggaaagccaaggaggaagggacagagctagaatcagtgccactttgcagcagcaaggatccagacgaagtggaaacagagagcaggggccctcccaccacctctgacctccttgccccagacctgctggagcaaggggactggagcctgtcccagaacaagagcgccctggactgccctcatcagcacctagacgtaccgcacgggaaggaggagcagatctgctgacctcagggcctgacagtgtgggacaggctcttctttcccaaaattagggagctcttgacagaaagcagttctgatgcttacatctggaatctgaggcatcctctgactccactcaaagagggtgagggccttcttaagatacaaatggtggaggattgctgccagagaagtctggtcagagccacagggtctgcctccagccaaacgggagcttttggtgagaaggtgttggacaggggattggcgcccccctttggtttggcctccatcctcatctctcttgggccaagccagctgcctaggtcccccaagcatgggggaccccttcccacatataagttgagaaggtgcctgccatagccaggagcgcatctcaatggaaacatcactggggtcacttgggaagaggacttcggggtagaggctgggaggagcccctggacatgcctgtcctgaaagcggctgcctccattatccattcccaagatgcctgatcagaaaccaaccatgaatgaacccctggctccttcaccacccccacgattggtatgatgctgccggcacagctgggatacacacggctcccccaggcctgagctgcttcactagggaatcctgcggcaggactgcagagcagatggcagatgcacatgttggaggagagagccttgggagccactgccactccagtcctgccaccaccctgtcttcctctgcaagtgctcagggaaatggccttcccgccggaggccagctatctgcctgacaggctgtgactcttctctcaaccttggccttctcccctcttctgagctagttggttgaattttttttaatgcttaagatttgtttttctcttttcacagcaacattttcttgaatttttttctgcacagcttttccaaaataaaaaccttccaaacaattctgccactcgcaatctctcctttcctctgtctccccaaagccactgcatgctgctgagtggctcctttttcccttcggtccccaagattcactctcctgttctatggcctgtttcctctgaaagaatctgactgtcctggaatcttggcacatgaagggtccttcagaggacggcagccaggaacacatacaagcccgagatgcctgcctgtcccctgcgcagat

SEQ ID NO: 365194 - DNA, 2357 bp, Homo sapiens
agaggccgcggtggcgccgcgccgcccccgacggcgccctctggcggcgacagctggcgccgccggggcacggggatgctgcgggagacccctgagatacaagtggactctcccggggcgcggggaagaagggagagccgactgcgagaaggaaggcgacctgggtgggcaggatcccctctgggaagattacagggacagtcggggccatggcggtcagaaggagaagagcaacgagtggcttttaaaggtcggaaccgaaatgccctttacagaggacgccatgaaggagagccttctgaagagggaccatgtggaagatgccccgaggactcggggaggcggagcccgcgggttcagcccccagcgcccgcacggcccctgcctgcgtaggccgcccgcgggagccggaccccgggcgccggttgctgtggcccgcgggggtcgccgggccgcaggcgccgcgctgattggctgcgccgcgggcggaagtgatgctgctgtcactgctcctccggctcccgggaagccgcgagtttccgcagggaggcggcggcagctgcggcggggccggtctgtagcctttgctgagtcaacactactcacagtgaaagtgatgccttttctccatttgcacaacatgagtgtgacgtggttagccagaccaggagctcaacctcatgtagaatccagtccactgctctgatgccgaaggggaggcagaaagtgccacacttggatgcccccctgggcctgcccacctgcctctggctggaattagccgggctcttcttactggttccctgggtcatgggcctggcagggacaggtgggcctgatggccagggcacaggggggccgagctgggctgtgcacctggaaagcctggaaggtgacggggaggaagagactctggagcagcaggcggatgccttggcccaggcagcagggctggtgaatgctggacgcatcggagagcttcaggggcactacctctttgtccagcctgctgggcacaggccggccctggaggtggaggccatccggcagcaggtggaggctgtgttggctgggcatgaagctgtgcgctggcactcagagcagaggctgctaattactacatgctggaagtatatttgagccagaggaatgtggcttccaatcaagtttgtaggagtggaccctgccactggccccatcggagccggaaagccaaggaggaagggacagagctagaatcagtgccactttgcagcagcaaggatccagacgaagtggaaacagagagcaggggccctcccaccacctctgacctccttgccccagacctgctggagcaaggggactggagcctgtcccagaacaagagcgccctggactgccctcatcagcacctagacgtaccgcacgggaaggaggagcagatctgctgacctcagggcctgacagtgtgggacaggctcttctttcccaaaattagggagctcttgacagaaagcagttctgatgcttacatctggaatctgaggcatcctctgactccactcaaagagggtgagggccttcttaagatacaaatggtggaggattgctgccagagaagtctggtcagagccacagggtctgcctccagccaaacgggagcttttggtgagaaggtgttggacaggggattggcgcccccctttggtttggcctccatcctcatctctcttgggccaagccagctgcctaggtcccccaagcatgggggaccccttcccacatataagttgagaaggtgcctgccatagccaggagcgcatctcaatggaaacatcactggggtcacttgggaagaggacttcggggtagaggctgggaggagcccctggacatgcctgtcctgaaagcggctgcctccattatccattcccaagatgcctgatcagaaaccaaccatgaatgaacccctggctccttcaccacccccacgattggtatgatgctgccggcacagctgggatacacacggctcccccaggcctgagctgcttcactagggaatcctgcggcaggactgcagagcagatggcagatgcacatgttggaggagagagccttgggagccactgccactccagtcctgccaccaccctgtcttcctctgcaagtgctcagggaaatggccttcccgccggaggccagctatctgcctgacaggctgtgactcttctctcaaccttggccttctcccctcttctgagctagttggttgaattttttttaatgcttaagatttgtttttctcttttcacagcaacattttcttgaatttttttctgcacagcttttccaaaataaaaaccttccaaaca

SEQ ID NO: 365195 - DNA, 3879 bp, Homo sapiens
agaggccgcggtggcgccgcgccgcccccgacggcgccctctggcggcgacagctggcgccgccggggcacggggatgctgcgggagacccctgagatacaagtggactctcccggggcgcggggaagaagggagagccgactgcgagaaggaaggcgacctgggtgggcaggatcccctctgggaagattacagggacagtcggggccatggcggtcagaaggagaagagcaacgagtggcttttaaaggtcggaaccgaaatgccctttacagaggacgccatgaaggagagccttctgaagagggaccatgtggaagatgccccgaggactcggggaggcggagcccgcgggttcagcccccagcgcccgcacggcccctgcctgcgtaggccgcccgcgggagccggaccccgggcgccggttgctgtggcccgcgggggtcgccgggccgcaggcgccgcgctgattggctgcgccgcgggcggaagtgatgctgctgtcactgctcctccggctcccgggaagccgcgagtttccgcagggaggcggcggcagctgcggcggggccggtctgtagcctttgctgagtcaacactactcacagtgaaagtgatgccttttctccatttgcacaacatgagtgtgacgtggttagccagaccaggagctcaacctcatgtagaatccagtccactgctctgatgccgaaggggaggcagaaagtgccacacttggatgcccccctgggcctgcccacctgcctctggctggaattagccgggctcttcttactggttccctgggtcatgggcctggcagggacaggtgggcctgatggccagggcacaggggggccgagctgggctgtgcacctggaaagcctggaaggtgacggggaggaagagactctggagcagcaggcggatgccttggcccaggcagcagggctggtgaatgctggacgcatcggagagcttcaggggcactacctctttgtccagcctgctgggcacaggccggccctggaggtggaggccatccggcagcaggtggaggctgtgttggctgggcatgaagctgtgcgctggcactcagagcagaggctgctaaggcgggccaagcgcagcgtccacttcaacgaccccaagtacccgcagcaatggcacctgaataaccgacggagcccgggcagggacatcaacgtgacgggtgtgtgggaacgcaatgtgactgggcgaggggtgacggtggtggtagtggatgacggagtggaacacaccatccaggacattgcacccaactatagccctgagggtagctatgacctcaactctaatgaccctgaccccatgccccacccggatgtggagaatggcaaccaccatggcacgcgatgtgcaggagagatcgcggctgtgcccaacaacagcttctgtgccgtgggcgtggcctacgggagccgcatcgcaggtatccgggtactggatggacctctcacagacagcatggaggcagtggcgttcaacaagcactatcagatcaatgacatctacagctgcagctggggaccagatgacgatgggaagacagtggatggcccccatcagcttggaaaggctgccttacaacatggggtgattgctggtcgccagggctttgggagcatctttgtggtagccagtggcaacggaggccaacacaacgacaactgcaactacgatggctacgccaactccatctacaccgtcaccataggagctgtggatgaggagggacgcatgcctttctatgcagaagaatgtgcctccatgctggcagtcaccttcagtggtggggacaagatgcttcggagcattgtgaccactgactgggaccttcagaagggcactggctgcactgagggccacacagggacctcagctgcagcgcctctggcagctggcatgatagccttaatgctgcaggtgcggccctgcctcacgtggcgtgacgtccagcacatcattgtcttcacagccacccggtatgaggatcgccgtgcagagtgggtcaccaacgaggcaggcttcagccatagccaccagcacggtttcggcctcctcaacgcctggaggctcgtgaatgcagccaagatctggacatctgtcccttacttagcatcctacgtcagtcccgtgttaaaagaaaacaaggcgattccgcagtccccccgttccctggaggtcctgtggaatgtcagcaggatggacctggagatgtcagggctgaagaccctggagcatgtggcagtgacagtctccatcactcacccacggcgcggcagcttggagctgaagctgttctgccccagtggcatgatgtccctcatcggcgccccccgcagcatggactcggatcccaacggcttcaatgactggaccttctccactgtgcgatgctggggggagagagcccgagggacctacaggctggtcatcagggatgtcggggatgagtcattccaggtcggcatcctccggcaatggcagctgaccctatatggctctgtgtggagtgcagtagacatcagggacagacaaaggctgttagagagtgccatgagtggaaaatacctgcacgatgacttcgccctgccctgcccaccggggctgaaaattcctgaggaagatggttacaccatcacccccaacaccctcaagaccctggtgctggtaggctgtttcaccgtcttctggactgtttactacatgctggaagtatatttgagccagaggaatgtggcttccaatcaagtttgtaggagtggaccctgccactggccccatcggagccggaaagccaaggaggaagggacagagctagaatcagtgccactttgcagcagcaaggatccagacgaagtggaaacagagagcaggggccctcccaccacctctgacctccttgccccagacctgctggagcaaggggactggagcctgtcccagaacaagagcgccctggactgccctcatcagcacctagacgtaccgcacgggaaggaggagcagatctgctgacctcagggcctgacagtgtgggacaggctcttctttcccaaaattagggagctcttgacagaaagcagttctgatgcttacatctggaatctgaggcatcctctgactccactcaaagagggtgagggccttcttaagatacaaatggtggaggattgctgccagagaagtctggtcagagccacagggtctgcctccagccaaacgggagcttttggtgagaaggtgttggacaggggattggcgcccccctttggtttggcctccatcctcatctctcttgggccaagccagctgcctaggtcccccaagcatgggggaccccttcccacatataagttgagaaggtgcctgccatagccaggagcgcatctcaatggaaacatcactggggtcacttgggaagaggacttcggggtagaggctgggaggagcccctggacatgcctgtcctgaaagcggctgcctccattatccattcccaagatgcctgatcagaaaccaaccatgaatgaacccctggctccttcaccacccccacgattggtatgatgctgccggcacagctgggatacacacggctcccccaggcctcctgtcttcctctgcaagtgctcagggaaatggccttcccgccggaggccagctatctgcctgacaggctgtgactcttctctcaaccttggccttctcccctcttctgagctagttggttgaattttttttaatgcttaagatttgtttttctcttttcacagcaacattttcttgaatttttttctgcacagcttttccaaaataaaaaccttccaaaca

SEQ ID NO: 365196 - DNA, 2131 bp, Homo sapiens
agaggccgcggtggcgccgcgccgcccccgacggcgccctctggcggcgacagctggcgccgccggggcacggggatgctgcgggagacccctgagatacaagtggactctcccggggcgcggggaagaagggagagccgactgcgagaaggaaggcgacctgggtgggcaggatcccctctgggaagattacagggacagtcggggccatggcggtcagaaggagaagagcaacgagtggcttttaaaggtcggaaccgaaatgccctttacagaggacgccatgaaggagagccttctgaagagggaccatgtggaagatgccccgaggactcggggaggcggagcccgcgggttcagcccccagcgcccgcacggcccctgcctgcgtaggccgcccgcgggagccggaccccgggcgccggttgctgtggcccgcgggggtcgccgggccgcaggcgccgcgctgattggctgcgccgcgggcggaagtgatgctgctgtcactgctcctccggctcccgggaagccgcgagtttccgcagggaggcggcggcagctgcggcggggccggtctgtagcctttgctgagtcaacactactcacagtgaaagtgatgccttttctccatttgcacaacatgagtgtgacgtggttagccagaccaggagctcaacctcatgtagaatccagtccactgctctgatgccgaaggggaggcagaaagtgccacacttggatgcccccctgggcctgcccacctgcctctggctggaattagccgggctcttcttactggttccctgggtcatgggcctggcagggacaggtgggcctgatggccagggcacaggggggccgagctgggctgtgcacctggaaagcctggaaggtgacggggaggaagagactctggagcagcaggcggatgccttggcccaggcagcagggctggtgaatgctggacgcatcggagagcttcaggggcactacctctttgtccagcctgctgggcacaggccggccctggaggtggaggccatccggcagcaggtggaggctgtgttggctgggcatgaagctgtgcgctggcactcagagcagaggctgctaaggcgggccaagcgcagcgtccacttcaacgaccccaagtacccgcagcaatggcacctgaataaccgacggagcccgggcagggacatcaacgtgacgggtgtgtgggaacgcaatgtgactgggcgaggggtgacggtggtggtagtggatgacggagtggaacacaccatccaggacattgcacccaactatagccctgagggtagctatgacctcaactctaatgaccctgaccccatgccccacccggatgtggagaatggcaaccaccatggcacgcgatgtgcaggagagatcgcggctgtgcccaacaacagcttctgtgccgtgggcgtggcctacgggagccgcatcgcaggtatccgggtactggatggacctctcacagacagcatggaggcagtggcgttcaacaagcactatcagatcaatgacatctacagctgcagctggggaccagatgacgatgggaagacagtggatggcccccatcagcttggaaaggctgccttacaacatggggtgattgctggtcgccagggctttgggagcatctttgtggtagccagtggcaacggaggccaacacaacgacaactgcaactacgatggctacgccaactccatctacaccgtcaccataggtagtcacccaatgtttctgtgctcctgtgtgtgtgtcaccgaagggttagggcatcacacgtcttgtcctagcttctgtgtgtgtctaaatgtgtgagcacaataatctctttgggctcagataggactagccctgcttgcagaggaccttgggacttcttagatgtcagcataccctgggaacaccttcaagccatcatctggagatcaccgagctgcctccaccccaccacagctggttaggcctctgctctggcctgtctttctgtgggccaccttctgcctgctggaagcctcccctgactccccacaggcctaaattaagtgccctttgcctgtgctcccagttagcatgtgtttatttacttacc

SEQ ID NO: 365197 - DNA, 1873 bp, Homo sapiens
agaggccgcggtggcgccgcgccgcccccgacggcgccctctggcggcgacagctggcgccgccggggcacggggatgctgcgggagacccctgagatacaagtggactctcccggggcgcggggaagaagggagagccgactgcgagaaggaaggcgacctgggtgggcaggatcccctctgggaagattacagggacagtcggggccatggcggtcagaaggagaagagcaacgagtggcttttaaaggtcggaaccgaaatgccctttacagaggacgccatgaaggagagccttctgaagagggaccatgtggaagatgccccgaggactcggggaggcggagcccgcgggttcagcccccagcgcccgcacggcccctgcctgcgtaggccgcccgcgggagccggaccccgggcgccggttgctgtggcccgcgggggtcgccgggccgcaggcgccgcgctgattggctgcgccgcgggcggaagtgatgctgctgtcactgctcctccggctcccgggaagccgcgagtttccgcagggaggcggcggcagctgcggcggggccggtctgtagcctttgctgagtcaacactactcacagtgaaagtgatgccttttctccatttgcacaacatgagtgtgacgtggttagccagaccaggagctcaacctcatgtagaatccagtccactgctctgatgccgaaggggaggcagaaagtgccacacttggatgcccccctgggcctgcccacctgcctctggctggaattagccgggctcttcttactggttccctgggtcatgggcctggcagggacaggtgggcctgatggccagggcacaggggggccgagctgggctgtgcacctggaaagcctggaaggtgacggggaggaagagactctggagcagcaggcggatgccttggcccaggcagcagggctggtgaatgctggacgcatcggagagcttcaggggcactacctctttgtccagcctgctgggcacaggccggccctggaggtggaggccatccggcagcaggtggaggctgtgttggctgggcatgaagctgtgcgctggcactcagagcagaggctgctaaggcgggccaagcgcagcgtccacttcaacgaccccaagtacccgcagcaatggcacctgaataaccgacggagcccgggcagggacatcaacgtgacgggtgtgtgggaacgcaatgtgactgggcgaggggtgacggtggtggtagtggatgacggagtggaacacaccatccaggacattgcacccaactatagccctgagggtagctatgacctcaactctaatgaccctgaccccatgccccacccggatgtggagaatggcaaccaccatggcacgcgatgtgcaggagagatcgcggctgtgcccaacaacagcttctgtgccgtgggcgtggcctacgggagccgcatcgcaggtatccgggtactggatggacctctcacagacagcatggaggcagtggcgttcaacaagcactatcagatcaatgacatctacagctgcagccttctagctctgtgcaggatacccggccatcctagacacttgtcacagcactgcccatccaggccaggctcagcccctactccagacacctctctgaacttgaacaccaggaaagaggataccaggtctttggaggtctagagcaggggtcagtaaactgtttttgtaaaggataagacagaacatattttaggctttgcaggacacatggtctctgctgttgcagtgtgaaagcagccatagacaatatgtaacaaatgaacatggctttgttccaataaaactttacttacaaaagcagacagca

SEQ ID NO: 365198 - DNA, 1944 bp, Homo sapiens
gcccatgagctgtagtttgacaacccttggtctagaacattctttgccaagaccagctacagagccactggagagaccttccagaagccacattgcccccacagaatacagccagctggtgcctttgtccagctgcgggtgtgagggtttactgcctctgcctcaagcaaccattacctcccactctcacccagaagcaggccctggcctggaagcccgaactccagaactccagctcttttcaggtcagctcagcttctggtctgcagctgaagagactaaaactcgcccaccccaggcaagggcgacgaagccaccaaagcccaagagttcttggcaaagaagctgcatttcctcagagaaatcagagacacctggtctacccatcgacttcccctcatgcccttacgctctcgtaaggctacccttacggagtagcctgagtaaccaagaagtcagagtcccccagggatcttccagagccaagagtctgcctgccagggaatgggaagcctggccccatccagcaactgccaccctgagggcctgggcctggcactgctcaggagtcccactcatggagaggggtggcagcaggagtgggccaggcaggtaggtccctgggcagacagacaggggtggctgggaacaggaacaggaaactgacctgtccactgatgtcaccctagggtgctgtgccttctctccagtgtttgtctgaagagacttccaaaagaggtaccaaaggaagccgaacccatcccctggcctcagaggggtcagaggttgggagggacacgctggtctgaggatggacgcaggagcgcactcccccggctccctctctgggctatcgctgctgctcaggccctggggacccgccagagtgggacaccgtgctccaacacagatgaggaaactgaggccccgagtgcgtcttcctcaaggccacatggtgaatggaacagtccctaccagcctggaaaacagaccagcctctgtcactccagagataacccactctcatcttgctcgtacctggcttcagggatcctggggagagataagaggttaaaaaagggacatatcaaaactccctcctcttggagcctgcccagctttcatcaccctcctgcctcggcctgcacgctgagcggattataaacgccgcatcagggagcactgcttgggcctgtggcctgaaaacggaaatgcaaccatagcatggagacgctctgagaaaagatccagacccacctcatctcccagcccttcaagcagagctataaaaacaagtttgggagaaaaacacattcccatccccaaagcagaggccccgcctgagctcccccatcctcagcatctggggtggaccaggtatgtgtgtgcatgactaacacagaacttgcctgaagactggacggaaacttagaagccagccctgggtcctagagcgaggctaggactgggcacgtagagggaaacagcacatcccttcctgaagcccctttctaagtatccaggtcgtcatccagtgtcagcaacacctggggtgtggacgccagatcagccacagagaaggaggcagctgctaccttcacgtacccacccggctcggccgggaggcccgcttaccaggaaggacccgaacatggcgatggaggagaggaagtgccagatgtcgtggtcgtcaaagaagtcgaggaggatgcagtcccggttgtgctccctcgactctgcaggggttttcttggggagcaacaagaaaaactgccgaatgaccctgctctggcagggcaagggccagacccatctgccatcttgctcctgggcacccctctctccagccccaggcaggacagcagcaattctgacctgtcccttgtccttgtccctaccccttcccgatctaacaaatggcctttggttacaaacttaaaatga

SEQ ID NO: 365199 - DNA, 1205 bp, Homo sapiens
aggggtttgtggggacaaaccagccaccctctcctcctggggcttttagctctgatgggacatgggatccaacctttcctgaggacctactccacaccaggccctttgcagtgctctcattgaatactcacagctacagtgtgagggtgtaattacatccccattttatagatgaggaaactgaggccccgagtgcgtcttcctcaaggccacatggtgaatggaacagtccctaccagcctggaaaacagaccagcctctgtcactccagagataacccactctcatcttgctcgtacctggcttcagggatcctggggagagataagaggttaaaaaagggacatatcaaaactccctcctcttggagcctgcccagctttcatcaccctcctgcctcggcctgcacgctgagcggattataaacgccgcatcagggagcactgcttgggcctgtggcctgaaaacggaaatgcaaccatagcatggagacgctctgagaaaagatccagacccacctcatctcccagcccttcaagcagagctataaaaacaagtttgggagaaaaacacattcccatccccaaagcagaggccccgcctgagctcccccatcctcagcatctggggtggaccaggtatgtgtgtgcatgactaacacagaacttgcctgaagactggacggaaacttagaagccagccctgggtcctagagcgaggctaggactgggcacgtagagggaaacagcacatcccttcctgaagcccctttctaagtatccaggtcgtcatccagtgtcagcaacacctggggtgtggacgccagatcagccacagagaaggaggcagctgctaccttcacgtacccacccggctcggccgggaggcccgcttaccaggaaggacccgaacatggcgatggaggagaggaagtgccagatgtcgtggtcgtcaaagaagtcgaggaggatgcagtcccggttgtgctccctcgactctgcaggggttttcttggggagcaacaagaaaaactgccgaatgaccctgctctggcagggcaagggccagacccatctgccatcttgctcctgggcacccctctctccagccccaggcaggacagcagcaattctgacctgtcccttgtccttgtccctaccccttcccgatctaacaaatggcctttggttacaaacttaaaatga

SEQ ID NO: 365200 - DNA, 1215 bp, Homo sapiens
ggtgacctcccactgtcagacagtggaaggggctgcttgtcagaaggacaggccttccgtctccactctttgcccctgactggaatacaagagttctgtggcccttcacattgtcacagggctatcgctgctgctcaggccctggggacccgccagagtgggacaccgtgctccaacacagatgaggaaactgaggccccgagtgcgtcttcctcaaggccacatggtgaatggaacagtccctaccagcctggaaaacagaccagcctctgtcactccagagataacccactctcatcttgctcgtacctggcttcagggatcctggggagagataagaggttaaaaaagggacatatcaaaactccctcctcttggagcctgcccagctttcatcaccctcctgcctcggcctgcacgctgagcggattataaacgccgcatcagggagcactgcttgggcctgtggcctgaaaacggaaatgcaaccatagcatggagacgctctgagaaaagatccagacccacctcatctcccagcccttcaagcagagctataaaaacaagtttgggagaaaaacacattcccatccccaaagcagaggccccgcctgagctcccccatcctcagcatctggggtggaccaggtatgtgtgtgcatgactaacacagaacttgcctgaagactggacggaaacttagaagccagccctgggtcctagagcgaggctaggactgggcacgtagagggaaacagcacatcccttcctgaagcccctttctaagtatccaggtcgtcatccagtgtcagcaacacctggggtgtggacgccagatcagccacagagaaggaggcagctgctaccttcacgtacccacccggctcggccgggaggcccgcttaccaggaaggacccgaacatggcgatggaggagaggaagtgccagatgtcgtggtcgtcaaagaagtcgaggaggatgcagtcccggttgtgctccctcgactctgcaggggttttcttggggagcaacaagaaaaactgccgaatgaccctgctctggcagggcaagggccagacccatctgccatcttgctcctgggcacccctctctccagccccaggcaggacagcagcaattctgacctgtcccttgtccttgtccctaccccttcccgatctaacaaatggcctttggttacaaacttaaaatga

SEQ ID NO: 365201 - DNA, 1539 bp, Homo sapiens
gcccatgagctgtagtttgacaacccttggtctagaacattctttgccaagaccagctacagagccactggagagaccttccagaagccacattgcccccacagaatacagccagctggtgcctttgtccagctgcgggtgtgagggtttactgcctctgcctcaagcaaccattacctcccactctcacccagaagcaggccctggcctggaagcccgaactccagaactccagctcttttcaggtcagctcagcttctggtctgcagctgaagagactaaaactcgcccaccccaggcaagggcgacgaagccaccaaagcccaagagttcttggcaaagaagctgcatttcctcagagaaatcagagacacctggtctacccatcgacttcccctcatgcccttacgctctcgtaaggctacccttacggagtagcctgagtaaccaagaagtcagagtcccccagggatcttccagagccaagagtctgcctgccagggaatgggaagcctggccccatccagcaactgccaccctgagggcctgggcctggcactgctcaggagtcccactcatggagaggggtggcagcaggagtgggccaggcaggtaggtccctgggcagacagacaggggtggctgggaacaggaacaggaaactgacctgtccactgatgtcaccctagggtgctgtgccttctctccagtgtttgtctgaagagacttccaaaagaggtaccaaaggaagccgaacccatcccctggcctcagaggggtcagaggttgggagggacacgctggtctgaggatggacgcaggagcgcactcccccggctccctctctggtgagacccctccccactggcaccccacccgcgggaagcagagccaacactatcacaccccactggtcccaggccagctgcccagcccgatgccctgcccttcctttctcagggctgacaggctttctgggctggagttcctcatctgtgaagtgggggttatgttaccaacctcagagggctgtgaaaatgggacggtgtctgtgaactccctcacatactgcctggcccttagcagagctccctcgaaatgtcagttctttgctgcccggagccaggctcctggtaatgaccagggagagagcctgcccttgaccaaggagtgaaaaactgacctcaaaatgtcagttctttgctgcccactccagcctccacccgcttctcacaatcattccctgagcgcgcagcagctcacacggaacagagttcacacggactcatcgaagtgcccgtcattgggcatccctctcctccttgcgtctgtttccttatgtgtaaagtgggggcgggaccacttctgaggacccagttctctgagcactggggatgaggtgggctcctggcccagccacccctctccctgccagtgatgccagagaccccaaaggcagacaattctgacctgtcccttgtccttgtccctaccccttcccgatctaacaaatggcctttggttacaaacttaaaatga

SEQ ID NO: 365202 - DNA, 428 bp, Homo sapiens
tgagttatatgctttagttggggctgggatttgagggttcggcagaagctgagtccaactccggtccccatccagtgggcagtgtcaataagagggtctataaggcctggcagggcctgagacactaacgcaggagaaggaggctcaggaggctggtatcatcccttcctccctttaggaacagtccctaccagcctggaaaacagaccagcctctgtcactccagagataacccactctcatcttgctcgtacctggcttcagggatcctggggagagataagaggttaaaaaaggtgagactaacagtgggatccctggactgactgctgtggcactcccctgcaagggcacctggtagggaagacctaacactctccactacacacacactgccacacccggcaccacccctagccaaacaaggc

SEQ ID NO: 365203 - DNA, 273 bp, Homo sapiens
ctgtcttgctgtgggaggccatccgctggtgttagtgctggcccacactccacctgggggcttatccctgttggtcagggataaatgtgaacaaaaagagaagatcaaatgtttcacaatttaaaaggcatggcttagggacttccagggggaacacatggatggctcagcatctccctctcagattcctgcagttaccagctctttgatctcttccatatcctttttctttgtctgcagtccactgctctgatgccgaaggggaggcagaaa

SEQ ID NO: 365204 - DNA, 277 bp, Homo sapiens
cttcaggggcactacctctttgtccagcctgctgggcacaggccggccctggaggtggaggccatccggcagcaggtggaggctgtgttggctgggcatgaagctgtgcgctggcactcagagcagaggctgctaaggcgggccaagcgcagcgtccacttcaacgaccccaagtacccgcagcaatggcacctggtgagtccagtcctgcagtttgcagtttcaggtgggtaggttccagtccagttctttaatgggcttttgactatatcactct

SEQ ID NO: 365205 - DNA, 1962 bp, Homo sapiens
ccaggggcaaggggcacctgagaagccctcgtggcaccctcccaggttgtttccacggctactacagtaagaaagtgttgctgggggaaggtcagctctctggcccacgccttccacctgtttctgctgtgttctttcctcagggatcccaacggcttcaatgactggaccttctccactgtgcgatgctggggggagagagcccgagggacctacaggctggtcatcagggatgtcggggatgagtcattccaggtcggcatcctccggcaatggcagctgaccctatatggctctgtgtggagtgcagtagacatcagggacagacaaaggctgttagagagtgccatgagtggaaaatacctgcacgatgacttcgccctgccctgcccaccggggctgaaaattcctgaggaagatggttacaccatcacccccaacaccctcaagaccctggtgctggtaggctgtttcaccgtcttctggactgtttactacatgctggaagtatatttgagccagaggaatgtggcttccaatcaagtttgtaggagtggaccctgccactggccccatcggagccggaaagccaaggaggaagggacagagctagaatcagtgccactttgcagcagcaaggatccagacgaagtggaaacagagagcaggggccctcccaccacctctgacctccttgccccagacctgctggagcaaggggactggagcctgtcccagaacaagagcgccctggactgccctcatcagcacctagacgtaccgcacgggaaggaggagcagatctgctgacctcagggcctgacagtgtgggacaggctcttctttcccaaaattagggagctcttgacagaaagcagttctgatgcttacatctggaatctgaggcatcctctgactccactcaaagagggtgagggccttcttaagatacaaatggtggaggattgctgccagagaagtctggtcagagccacagggtctgcctccagccaaacgggagcttttggtgagaaggtgttggacaggggattggcgcccccctttggtttggcctccatcctcatctctcttgggccaagccagctgcctaggtcccccaagcatgggggaccccttcccacatataagttgagaaggtgcctgccatagccaggagcgcatctcaatggaaacatcactggggtcacttgggaagaggacttcggggtagaggctgggaggagcccctggacatgcctgtcctgaaagcggctgcctccattatccattcccaagatgcctgatcagaaaccaaccatgaatgaacccctggctccttcaccacccccacgattggtatgatgctgccggcacagctgggatacacacggctcccccaggcctgagctgcttcactagggaatcctgcggcaggactgcagagcagatggcagatgcacatgttggaggagagagccttgggagccactgccactccagtcctgccaccaccctgtcttcctctgcaagtgctcagggaaatggccttcccgccggaggccagctatctgcctgacaggctgtgactcttctctcaaccttggccttctcccctcttctgagctagttggttgaattttttttaatgcttaagatttgtttttctcttttcacagcaacattttcttgaatttttttctgcacagcttttccaaaataaaaaccttccaaacaattctgccactcgcaatctctcctttcctctgtctccccaaagccactgcatgctgctgagtggctcctttttcccttcggtccccaagattcactctcctgttctatggcctgtttcctctgaaagaatctgactgtcctggaatcttggcacatgaagggtccttcagaggacggcagccaggaacacatacaagcccgagatgcctgcctgtcccctgcgcagat

SEQ ID NO: 365206 - DNA, 3987 bp, Homo sapiens
agaggccgcggtggcgccgcgccgcccccgacggcgccctctggcggcgacagctggcgccgccggggcacggggatgctgcgggagacccctgagatacaagtggactctcccggggcgcggggaagaagggagagccgactgcgagaaggaaggcgacctgggtgggcaggatcccctctgggaagattacagggacagtcggggccatggcggtcagaaggagaagagcaacgagtggcttttaaaggtcggaaccgaaatgccctttacagaggacgccatgaaggagagccttctgaagagggaccatgtggaagatgccccgaggactcggggaggcggagcccgcgggttcagcccccagcgcccgcacggcccctgcctgcgtaggccgcccgcgggagccggaccccgggcgccggttgctgtggcccgcgggggtcgccgggccgcaggcgccgcgctgattggctgcgccgcgggcggaagtgatgctgctgtcactgctcctccggctcccgggaagccgcgagtttccgcagggaggcggcggcagctgcggcggggccggtctgtagcctttgctgagtcaacactactcacagtgaaagtgatgccttttctccatttgcacaacatgagtgtgacgtggttagccagaccaggagctcaacctcatgtagaatccagtccactgctctgatgccgaaggggaggcagaaagtgccacacttggatgcccccctgggcctgcccacctgcctctggctggaattagccgggctcttcttactggttccctgggtcatgggcctggcagggacaggtgggcctgatggccagggcacaggggggccgagctgggctgtgcacctggaaagcctggaaggtgacggggaggaagagactctggagcagcaggcggatgccttggcccaggcagcagggctggtgaatgctggacgcatcggagagcttcaggggcactacctctttgtccagcctgctgggcacaggccggccctggaggtggaggccatccggcagcaggtggaggctgtgttggctgggcatgaagctgtgcgctggcactcagagcagaggctgctaaggcgggccaagcgcagcgtccacttcaacgaccccaagtacccgcagcaatggcacctgaataaccgacggagcccgggcagggacatcaacgtgacgggtgtgtgggaacgcaatgtgactgggcgaggggtgacggtggtggtagtggatgacggagtggaacacaccatccaggacattgcacccaactatagccctgagggtagctatgacctcaactctaatgaccctgaccccatgccccacccggatgtggagaatggcaaccaccatggcacgcgatgtgcaggagagatcgcggctgtgcccaacaacagcttctgtgccgtgggcgtggcctacgggagccgcatcgcaggtatccgggtactggatggacctctcacagacagcatggaggcagtggcgttcaacaagcactatcagatcaatgacatctacagctgcagctggggaccagatgacgatgggaagacagtggatggcccccatcagcttggaaaggctgccttacaacatggggtgattgctggtcgccagggctttgggagcatctttgtggtagccagtggcaacggaggccaacacaacgacaactgcaactacgatggctacgccaactccatctacaccgtcaccataggagctgtggatgaggagggacgcatgcctttctatgcagaagaatgtgcctccatgctggcagtcaccttcagtggtggggacaagatgcttcggagcattgtgaccactgactgggaccttcagaagggcactggctgcactgagggccacacagggacctcagctgcagcgcctctggcagctggcatgatagccttaatgctgcaggtgcggccctgcctcacgtggcgtgacgtccagcacatcattgtcttcacagccacccggtatgaggatcgccgtgcagagtgggtcaccaacgaggcaggcttcagccatagccaccagcacggtttcggcctcctcaacgcctggaggctcgtgaatgcagccaagatctggacatctgtcccttacttagcatcctacgtcagtcccgtgttaaaagaaaacaaggcgattccgcagtccccccgttccctggaggtcctgtggaatgtcagcaggatggacctggagatgtcagggctgaagaccctggagcatgtggcagtgacagtctccatcactcacccacggcgcggcagcttggagctgaagctgttctgccccagtggcatgatgtccctcatcggcgccccccgcagcatggactcggatcccaacggcttcaatgactggaccttctccactgtgcgatgctggggggagagagcccgagggacctacaggctggtcatcagggatgtcggggatgagtcattccaggtcggcatcctccggcaatggcagctgaccctatatggctctgtgtggagtgcagtagacatcagggacagacaaaggctgttagagagtgccatgagtggaaaatacctgcacgatgacttcgccctgccctgcccaccggggctgaaaattcctgaggaagatggttacaccatcacccccaacaccctcaagaccctggtgctggtaggctgtttcaccgtcttctggactgtttactacatgctggaagtatatttgagccagaggaatgtggcttccaatcaagtttgtaggagtggaccctgccactggccccatcggagccggaaagccaaggaggaagggacagagctagaatcagtgccactttgcagcagcaaggatccagacgaagtggaaacagagagcaggggccctcccaccacctctgacctccttgccccagacctgctggagcaaggggactggagcctgtcccagaacaagagcgccctggactgccctcatcagcacctagacgtaccgcacgggaaggaggagcagatctgctgacctcagggcctgacagtgtgggacaggctcttctttcccaaaattagggagctcttgacagaaagcagttctgatgcttacatctggaatctgaggcatcctctgactccactcaaagagggtgagggccttcttaagatacaaatggtggaggattgctgccagagaagtctggtcagagccacagggtctgcctccagccaaacgggagcttttggtgagaaggtgttggacaggggattggcgcccccctttggtttggcctccatcctcatctctcttgggccaagccagctgcctaggtcccccaagcatgggggaccccttcccacatataagttgagaaggtgcctgccatagccaggagcgcatctcaatggaaacatcactggggtcacttgggaagaggacttcggggtagaggctgggaggagcccctggacatgcctgtcctgaaagcggctgcctccattatccattcccaagatgcctgatcagaaaccaaccatgaatgaacccctggctccttcaccacccccacgattggtatgatgctgccggcacagctgggatacacacggctcccccaggcctgagctgcttcactagggaatcctgcggcaggactgcagagcagatggcagatgcacatgttggaggagagagccttgggagccactgccactccagtcctgccaccaccctgtcttcctctgcaagtgctcagggaaatggccttcccgccggaggccagctatctgcctgacaggctgtgactcttctctcaaccttggccttctcccctcttctgagctagttggttgaattttttttaatgcttaagatttgtttttctcttttcacagcaacattttcttgaatttttttctgcacagcttttccaaaataaaaaccttccaaaca

SEQ ID NO: 365207 - DNA, 549 bp, Homo sapiens
caacacaacgacaactgcaactacgatggctacgccaacaagcactatcagatcaatgacatctacagctgcctggggaccagatgacgatgggaagacagtggatggcccccatcagcttggaaaggctgccttacaacatggggtgattgctggtcgccagggctttgggagcatctttgtggtagccagtggcaacggaggccaacacaacgacaagagctgcttcactagggaatcctgcggcaggactgcagagcagatggcagatgcacatgttggaggagagagccttgggagccactgccactccagtcctgccaccaccctgtcttcctctgcaagtgctcagggaaatggccttcccgccggaggccagctatctgcctgacaggctgtgactcttctctcaaccttggccttctcccctcttctgagctagttggttgaattttttttaatgcttaagatttgtttttctcttttcacagcaacattttcttgaatttttttctgcacagcttttccaaaataaaaaccttccaaaca

SEQ ID NO: 365208 - DNA, 4313 bp, Homo sapiens
agaggccgcggtggcgccgcgccgcccccgacggcgccctctggcggcgacagctggcgccgccggggcacggggatgctgcgggagacccctgagatacaagtggactctcccggggcgcggggaagaagggagagccgactgcgagaaggaaggcgacctgggtgggcaggatcccctctgggaagattacagggacagtcggggccatggcggtcagaaggagaagagcaacgagtggcttttaaaggtcggaaccgaaatgccctttacagaggacgccatgaaggagagccttctgaagagggaccatgtggaagatgccccgaggactcggggaggcggagcccgcgggttcagcccccagcgcccgcacggcccctgcctgcgtaggccgcccgcgggagccggaccccgggcgccggttgctgtggcccgcgggggtcgccgggccgcaggcgccgcgctgattggctgcgccgcgggcggaagtgatgctgctgtcactgctcctccggctcccgggaagccgcgagtttccgcagggaggcggcggcagctgcggcggggccggtctgtagcctttgctgagtcaacactactcacagtgaaagtgatgccttttctccatttgcacaacatgagtgtgacgtggttagccagaccaggagctcaacctcatgtagaatccagtccactgctctgatgccgaaggggaggcagaaagtgccacacttggatgcccccctgggcctgcccacctgcctctggctggaattagccgggctcttcttactggttccctgggtcatgggcctggcagggacaggtgggcctgatggccagggcacaggggggccgagctgggctgtgcacctggaaagcctggaaggtgacggggaggaagagactctggagcagcaggcggatgccttggcccaggcagcagggctggtgaatgctggacgcatcggagagcttcaggggcactacctctttgtccagcctgctgggcacaggccggccctggaggtggaggccatccggcagcaggtggaggctgtgttggctgggcatgaagctgtgcgctggcactcagagcagaggctgctaaggcgggccaagcgcagcgtccacttcaacgaccccaagtacccgcagcaatggcacctgaataaccgacggagcccgggcagggacatcaacgtgacgggtgtgtgggaacgcaatgtgactgggcgaggggtgacggtggtggtagtggatgacggagtggaacacaccatccaggacattgcacccaactatagccctgagggtagctatgacctcaactctaatgaccctgaccccatgccccacccggatgtggagaatggcaaccaccatggcacgcgatgtgcaggagagatcgcggctgtgcccaacaacagcttctgtgccgtgggcgtggcctacgggagccgcatcgcaggtatccgggtactggatggacctctcacagacagcatggaggcagtggcgttcaacaagcactatcagatcaatgacatctacagctgcagctggggaccagatgacgatgggaagacagtggatggcccccatcagcttggaaaggctgccttacaacatggggtgattgctggtcgccagggctttgggagcatctttgtggtagccagtggcaacggaggccaacacaacgacaactgcaactacgatggctacgccaactccatctacaccgtcaccataggagctgtggatgaggagggacgcatgcctttctatgcagaagaatgtgcctccatgctggcagtcaccttcagtggtggggacaagatgcttcggagcattgtgaccactgactgggaccttcagaagggcactggctgcactgagggccacacagggacctcagctgcagcgcctctggcagctggcatgatagccttaatgctgcaggtgcggccctgcctcacgtggcgtgacgtccagcacatcattgtcttcacagccacccggtatgaggatcgccgtgcagagtgggtcaccaacgaggcaggcttcagccatagccaccagcacggtttcggcctcctcaacgcctggaggctcgtgaatgcagccaagatctggacatctgtcccttacttagcatcctacgtcagtcccgtgttaaaagaaaacaaggcgattccgcagtccccccgttccctggaggtcctgtggaatgtcagcaggatggacctggagatgtcagggctgaagaccctggagcatgtggcagtgacagtctccatcactcacccacggcgcggcagcttggagctgaagctgttctgccccagtggcatgatgtccctcatcggcgccccccgcagcatggactcggatcccaacggcttcaatgactggaccttctccactgtgcgatgctggggggagagagcccgagggacctacaggctggtcatcagggatgtcggggatgagtcattccaggtcggcatcctccggcaatggcagctgaccctatatggctctgtgtggagtgcagtagacatcagggacagacaaaggctgttagagagtgccatgagtggaaaatacctgcacgatgacttcgccctgccctgcccaccggggctgaaaattcctgaggaagatggttacaccatcacccccaacaccctcaaggtactacggcccgaagactcaagctgcgggtagatgggactgtcctgtctgggggatggagttcttagtgtgtttctcagggtgacctgcggggtgaaggactgggaagacctgggtcccagcagtggtttcatagcattgctcctaccctgctagcctaactcttacaggacaggccttgtcgggggagggggcagagggaacagtttgggtgaaaaaggcagtccctagaaggaaaaagactttctgagctcattgtcctgggctgagaaaggctgtaggcttcgggaaacagtgcctcacgtaggtgcttgcctcggccccagaccctggtgctggtaggctgtttcaccgtcttctggactgtttactacatgctggaagtatatttgagccagaggaatgtggcttccaatcaagtttgtaggagtggaccctgccactggccccatcggagccggaaagccaaggaggaagggacagagctagaatcagtgccactttgcagcagcaaggatccagacgaagtggaaacagagagcaggggccctcccaccacctctgacctccttgccccagacctgctggagcaaggggactggagcctgtcccagaacaagagcgccctggactgccctcatcagcacctagacgtaccgcacgggaaggaggagcagatctgctgacctcagggcctgacagtgtgggacaggctcttctttcccaaaattagggagctcttgacagaaagcagttctgatgcttacatctggaatctgaggcatcctctgactccactcaaagagggtgagggccttcttaagatacaaatggtggaggattgctgccagagaagtctggtcagagccacagggtctgcctccagccaaacgggagcttttggtgagaaggtgttggacaggggattggcgcccccctttggtttggcctccatcctcatctctcttgggccaagccagctgcctaggtcccccaagcatgggggaccccttcccacatataagttgagaaggtgcctgccatagccaggagcgcatctcaatggaaacatcactggggtcacttgggaagaggacttcggggtagaggctgggaggagcccctggacatgcctgtcctgaaagcggctgcctccattatccattcccaagatgcctgatcagaaaccaaccatgaatgaacccctggctccttcaccacccccacgattggtatgatgctgccggcacagctgggatacacacggctcccccaggcctgagctgcttcactagggaatcctgcggcaggactgcagagcagatggcagatgcacatgttggaggagagagccttgggagccactgccactccagtcctgccaccaccctgtcttcctctgcaagtgctcagggaaatggccttcccgccggaggccagctatctgcctgacaggctgtgactcttctctcaaccttggccttctcccctcttctgagctagttggttgaattttttttaatgcttaagatttgtttttctcttttcacagcaacattttcttgaatttttttctgcacagcttttccaaaataaaaaccttccaaaca

SEQ ID NO: 365209 - DNA, 4226 bp, Homo sapiens
agaggccgcggtggcgccgcgccgcccccgacggcgccctctggcggcgacagctggcgccgccggggcacggggatgctgcgggagacccctgagatacaagtggactctcccggggcgcggggaagaagggagagccgactgcgagaaggaaggcgacctgggtgggcaggatcccctctgggaagattacagggacagtcggggccatggcggtcagaaggagaagagcaacgagtggcttttaaaggtcggaaccgaaatgccctttacagaggacgccatgaaggagagccttctgaagagggaccatgtggaagatgccccgaggactcggggaggcggagcccgcgggttcagcccccagcgcccgcacggcccctgcctgcgtaggccgcccgcgggagccggaccccgggcgccggttgctgtggcccgcgggggtcgccgggccgcaggcgccgcgctgattggctgcgccgcgggcggaagtgatgctgctgtcactgctcctccggctcccgggaagccgcgagtttccgcagggaggcggcggcagctgcggcggggccggtctgtagcctttgctgagtcaacactactcacagtgaaagtgatgccttttctccatttgcacaacatgagtgtgacgtggttagccagaccaggagctcaacctcatgtagaatccagtccactgctctgatgccgaaggggaggcagaaagtgccacacttggatgcccccctgggcctgcccacctgcctctggctggaattagccgggctcttcttactggttccctgggtcatgggcctggcagggacaggtgggcctgatggccagggcacaggggggccgagctgggctgtgcacctggaaagcctggaaggtgacggggaggaagagactctggagcagcaggcggatgccttggcccaggcagcagggctggtgaatgctggacgcatcggagagcttcaggggcactacctctttgtccagcctgctgggcacaggccggccctggaggtggaggccatccggcagcaggtggaggctgtgttggctgggcatgaagctgtgcgctggcactcagagcagaggctgctaaggcgggccaagcgcagcgtccacttcaacgaccccaagtacccgcagcaatggcacctgaataaccgacggagcccgggcagggacatcaacgtgacgggtgtgtgggaacgcaatgtgactgggcgaggggtgacggtggtggtagtggatgacggagtggaacacaccatccaggacattgcacccaactatagccctgagggtagctatgacctcaactctaatgaccctgaccccatgccccacccggatgtggagaatggcaaccaccatggcacgcgatgtgcaggagagatcgcggctgtgcccaacaacagcttctgtgccgtgggcgtggcctacgggagccgcatcgcaggtatccgggtactggatggacctctcacagacagcatggaggcagtggcgttcaacaagcactatcagatcaatgacatctacagctgcagctggggaccagatgacgatgggaagacagtggatggcccccatcagcttggaaaggctgccttacaacatggggtgattgctggtcgccagggctttgggagcatctttgtggtagccagtggcaacggaggccaacacaacgacaactgcaactacgatggctacgccaactccatctacaccgtcaccataggtagtcacccaatgtttctgtgctcctgtgtgtgtgtcaccgaagggttagggcatcacacgtcttgtcctagcttctgtgtgtgtctaaatgtgtgagcacaataatctctttgggctcagataggactagccctgcttgcagaggaccttgggacttcttagatgtcagcataccctgggaacaccttcaagccatcatctggagatcaccgagctgcctccaccccaccacagctggagctgtggatgaggagggacgcatgcctttctatgcagaagaatgtgcctccatgctggcagtcaccttcagtggtggggacaagatgcttcggagcattgtgaccactgactgggaccttcagaagggcactggctgcactgagggccacacagggacctcagctgcagcgcctctggcagctggcatgatagccttaatgctgcaggtgcggccctgcctcacgtggcgtgacgtccagcacatcattgtcttcacagccacccggtatgaggatcgccgtgcagagtgggtcaccaacgaggcaggcttcagccatagccaccagcacggtttcggcctcctcaacgcctggaggctcgtgaatgcagccaagatctggacatctgtcccttacttagcatcctacgtcagtcccgtgttaaaagaaaacaaggcgattccgcagtccccccgttccctggaggtcctgtggaatgtcagcaggatggacctggagatgtcagggctgaagaccctggagcatgtggcagtgacagtctccatcactcacccacggcgcggcagcttggagctgaagctgttctgccccagtggcatgatgtccctcatcggcgccccccgcagcatggactcggatcccaacggcttcaatgactggaccttctccactgtgcgatgctggggggagagagcccgagggacctacaggctggtcatcagggatgtcggggatgagtcattccaggtcggcatcctccggcaatggcagctgaccctatatggctctgtgtggagtgcagtagacatcagggacagacaaaggctgttagagagtgccatgagtggaaaatacctgcacgatgacttcgccctgccctgcccaccggggctgaaaattcctgaggaagatggttacaccatcacccccaacaccctcaagaccctggtgctggtaggctgtttcaccgtcttctggactgtttactacatgctggaagtatatttgagccagaggaatgtggcttccaatcaagtttgtaggagtggaccctgccactggccccatcggagccggaaagccaaggaggaagggacagagctagaatcagtgccactttgcagcagcaaggatccagacgaagtggaaacagagagcaggggccctcccaccacctctgacctccttgccccagacctgctggagcaaggggactggagcctgtcccagaacaagagcgccctggactgccctcatcagcacctagacgtaccgcacgggaaggaggagcagatctgctgacctcagggcctgacagtgtgggacaggctcttctttcccaaaattagggagctcttgacagaaagcagttctgatgcttacatctggaatctgaggcatcctctgactccactcaaagagggtgagggccttcttaagatacaaatggtggaggattgctgccagagaagtctggtcagagccacagggtctgcctccagccaaacgggagcttttggtgagaaggtgttggacaggggattggcgcccccctttggtttggcctccatcctcatctctcttgggccaagccagctgcctaggtcccccaagcatgggggaccccttcccacatataagttgagaaggtgcctgccatagccaggagcgcatctcaatggaaacatcactggggtcacttgggaagaggacttcggggtagaggctgggaggagcccctggacatgcctgtcctgaaagcggctgcctccattatccattcccaagatgcctgatcagaaaccaaccatgaatgaacccctggctccttcaccacccccacgattggtatgatgctgccggcacagctgggatacacacggctcccccaggcctgagctgcttcactagggaatcctgcggcaggactgcagagcagatggcagatgcacatgttggaggagagagccttgggagccactgccactccagtcctgccaccaccctgtcttcctctgcaagtgctcagggaaatggccttcccgccggaggccagctatctgcctgacaggctgtgactcttctctcaaccttggccttctcccctcttctgagctagttggttgaattttttttaatgcttaagatttgtttttctcttttcacagcaacattttcttgaatttttttctgcacagcttttccaaaataaaaaccttccaaaca

SEQ ID NO: 365210 - DNA, 1734 bp, Homo sapiens
ccaggggcaaggggcacctgagaagccctcgtggcaccctcccaggttgtttccacggctactacagtaagaaagtgttgctgggggaaggtcagctctctggcccacgccttccacctgtttctgctgtgttctttcctcagggatcccaacggcttcaatgactggaccttctccactgtgcgatgctggggggagagagcccgagggacctacaggctggtcatcagggatgtcggggatgagtcattccaggtcggcatcctccggcaatggcagctgaccctatatggctctgtgtggagtgcagtagacatcagggacagacaaaggctgttagagagtgccatgagtggaaaatacctgcacgatgacttcgccctgccctgcccaccggggctgaaaattcctgaggaagatggttacaccatcacccccaacaccctcaagaccctggtgctggtaggctgtttcaccgtcttctggactgtttactacatgctggaagtatatttgagccagaggaatgtggcttccaatcaagtttgtaggagtggaccctgccactggccccatcggagccggaaagccaaggaggaagggacagagctagaatcagtgccactttgcagcagcaaggatccagacgaagtggaaacagagagcaggggccctcccaccacctctgacctccttgccccagacctgctggagcaaggggactggagcctgtcccagaacaagagcgccctggactgccctcatcagcacctagacgtaccgcacgggaaggaggagcagatctgctgacctcagggcctgacagtgtgggacaggctcttctttcccaaaattagggagctcttgacagaaagcagttctgatgcttacatctggaatctgaggcatcctctgactccactcaaagagggtgagggccttcttaagatacaaatggtggaggattgctgccagagaagtctggtcagagccacagggtctgcctccagccaaacgggagcttttggtgagaaggtgttggacaggggattggcgcccccctttggtttggcctccatcctcatctctcttgggccaagccagctgcctaggtcccccaagcatgggggaccccttcccacatataagttgagaaggtgcctgccatagccaggagcgcatctcaatggaaacatcactggggtcacttgggaagaggacttcggggtagaggctgggaggagcccctggacatgcctgtcctgaaagcggctgcctccattatccattcccaagatgcctgatcagaaaccaaccatgaatgaacccctggctccttcaccacccccacgattggtatgatgctgccggcacagctgggatacacacggctcccccaggcctgagctgcttcactagggaatcctgcggcaggactgcagagcagatggcagatgcacatgttggaggagagagccttgggagccactgccactccagtcctgccaccaccctgtcttcctctgcaagtgctcagggaaatggccttcccgccggaggccagctatctgcctgacaggctgtgactcttctctcaaccttggccttctcccctcttctgagctagttggttgaattttttttaatgcttaagatttgtttttctcttttcacagcaacattttcttgaatttttttctgcacagcttttccaaaataaaaaccttccaaaca

SEQ ID NO: 365211 - DNA, 1669 bp, Homo sapiens
aaacgacccgaagaccttcgacataatcctcataggtgccccactcccgtcttcgggtcgtactacggcccgaagactcaagctgcgggtagatgggactgtcctgtctgggggatggagttcttagtgtgtttctcagggtgacctgcggggtgaaggactgggaagacctgggtcccagcagtggtttcatagcattgctcctaccctgctagcctaactcttacaggacaggccttgtcgggggagggggcagagggaacagtttgggtgaaaaaggcagtccctagaaggaaaaagactttctgagctcattgtcctgggctgagaaaggctgtaggcttcgggaaacagtgcctcacgtaggtgcttgcctcggccccagaccctggtgctggtaggctgtttcaccgtcttctggactgtttactacatgctggaagtatatttgagccagaggaatgtggcttccaatcaagtttgtaggagtggaccctgccactggccccatcggagccggaaagccaaggaggaagggacagagctagaatcagtgccactttgcagcagcaaggatccagacgaagtggaaacagagagcaggggccctcccaccacctctgacctccttgccccagacctgctggagcaaggggactggagcctgtcccagaacaagagcgccctggactgccctcatcagcacctagacgtaccgcacgggaaggaggagcagatctgctgacctcagggcctgacagtgtgggacaggctcttctttcccaaaattagggagctcttgacagaaagcagttctgatgcttacatctggaatctgaggcatcctctgactccactcaaagagggtgagggccttcttaagatacaaatggtggaggattgctgccagagaagtctggtcagagccacagggtctgcctccagccaaacgggagcttttggtgagaaggtgttggacaggggattggcgcccccctttggtttggcctccatcctcatctctcttgggccaagccagctgcctaggtcccccaagcatgggggaccccttcccacatataagttgagaaggtgcctgccatagccaggagcgcatctcaatggaaacatcactggggtcacttgggaagaggacttcggggtagaggctgggaggagcccctggacatgcctgtcctgaaagcggctgcctccattatccattcccaagatgcctgatcagaaaccaaccatgaatgaacccctggctccttcaccacccccacgattggtatgatgctgccggcacagctgggatacacacggctcccccaggcctgagctgcttcactagggaatcctgcggcaggactgcagagcagatggcagatgcacatgttggaggagagagccttgggagccactgccactccagtcctgccaccaccctgtcttcctctgcaagtgctcagggaaatggccttcccgccggaggccagctatctgcctgacaggctgtgactcttctctcaaccttggccttctcccctcttctgagctagttggttgaattttttttaatgcttaagatttgtttttctcttttcacagcaacattttcttgaatttttttctgcacagcttttccaaaataaaaaccttccaaaca

SEQ ID NO: 365212 - DNA, 1640 bp, Homo sapiens
ccaggggcaaggggcacctgagaagccctcgtggcaccctcccaggttgtttccacggctactacagtaagaaagtgttgctgggggaaggtcagctctctggcccacgccttccacctgtttctgctgtgttctttcctcagggatcccaacggcttcaatgactggaccttctccactgtgcgatgctggggggagagagcccgagggacctacaggctggtcatcagggatgtcggctgttagagagtgccatgagtggaaaatacctgcacgatgacttcgccctgccctgcccaccggggctgaaaattcctgaggaagatggttacaccatcacccccaacaccctcaagaccctggtgctggtaggctgtttcaccgtcttctggactgtttactacatgctggaagtatatttgagccagaggaatgtggcttccaatcaagtttgtaggagtggaccctgccactggccccatcggagccggaaagccaaggaggaagggacagagctagaatcagtgccactttgcagcagcaaggatccagacgaagtggaaacagagagcaggggccctcccaccacctctgacctccttgccccagacctgctggagcaaggggactggagcctgtcccagaacaagagcgccctggactgccctcatcagcacctagacgtaccgcacgggaaggaggagcagatctgctgacctcagggcctgacagtgtgggacaggctcttctttcccaaaattagggagctcttgacagaaagcagttctgatgcttacatctggaatctgaggcatcctctgactccactcaaagagggtgagggccttcttaagatacaaatggtggaggattgctgccagagaagtctggtcagagccacagggtctgcctccagccaaacgggagcttttggtgagaaggtgttggacaggggattggcgcccccctttggtttggcctccatcctcatctctcttgggccaagccagctgcctaggtcccccaagcatgggggaccccttcccacatataagttgagaaggtgcctgccatagccaggagcgcatctcaatggaaacatcactggggtcacttgggaagaggacttcggggtagaggctgggaggagcccctggacatgcctgtcctgaaagcggctgcctccattatccattcccaagatgcctgatcagaaaccaaccatgaatgaacccctggctccttcaccacccccacgattggtatgatgctgccggcacagctgggatacacacggctcccccaggcctgagctgcttcactagggaatcctgcggcaggactgcagagcagatggcagatgcacatgttggaggagagagccttgggagccactgccactccagtcctgccaccaccctgtcttcctctgcaagtgctcagggaaatggccttcccgccggaggccagctatctgcctgacaggctgtgactcttctctcaaccttggccttctcccctcttctgagctagttggttgaattttttttaatgcttaagatttgtttttctcttttcacagcaacattttcttgaatttttttctgcacagcttttccaaaataaaaaccttccaaaca

SEQ ID NO: 365213 - DNA, 4255 bp, Homo sapiens
  misc_feature (2971)..(2971): n is a, c, g, or t
agaggccgcggtggcgccgcgccgcccccgacggcgccctctggcggcgacagctggcgccgccggggcacggggatgctgcgggagacccctgagatacaagtggactctcccggggcgcggggaagaagggagagccgactgcgagaaggaaggcgacctgggtgggcaggatcccctctgggaagattacagggacagtcggggccatggcggtcagaaggagaagagcaacgagtggcttttaaaggtcggaaccgaaatgccctttacagaggacgccatgaaggagagccttctgaagagggaccatgtggaagatgccccgaggactcggggaggcggagcccgcgggttcagcccccagcgcccgcacggcccctgcctgcgtaggccgcccgcgggagccggaccccgggcgccggttgctgtggcccgcgggggtcgccgggccgcaggcgccgcgctgattggctgcgccgcgggcggaagtgatgctgctgtcactgctcctccggctcccgggaagccgcgagtttccgcagggaggcggcggcagctgcggcggggccggtctgtagcctttgctgagtcaacactactcacagtgaaagtgatgccttttctccatttgcacaacatgagtgtgacgtggttagccagaccaggagctcaacctcatgtagaatccagtccactgctctgatgccgaaggggaggcagaaagtgccacacttggatgcccccctgggcctgcccacctgcctctggctggaattagccgggctcttcttactggttccctgggtcatgggcctggcagggacaggtgggcctgatggccagggcacaggggggccgagctgggctgtgcacctggaaagcctggaaggtgacggggaggaagagactctggagcagcaggcggatgccttggcccaggcagcagggctggtgaatgctggacgcatcggagagcttcaggggcactacctctttgtccagcctgctgggcacaggccggccctggaggtggaggccatccggcagcaggtggaggctgtgttggctgggcatgaagctgtgcgctggcactcagagcagaggctgctaaggcgggccaagcgcagcgtccacttcaacgaccccaagtacccgcagcaatggcacctgaataaccgacggagcccgggcagggacatcaacgtgacgggtgtgtgggaacgcaatgtgactgggcgaggggtgacggtggtggtagtggatgacggagtggaacacaccatccaggacattgcacccaactatagccctgagggtagctatgacctcaactctaatgaccctgaccccatgccccacccggatgtggagaatggcaaccaccatggcacgcgatgtgcaggagagatcgcggctgtgcccaacaacagcttctgtgccgtgggcgtggcctacgggagccgcatcgcaggtatccgggtactggatggacctctcacagacagcatggaggcagtggcgttcaacaagcactatcagatcaatgacatctacagctgcagctggggaccagatgacgatgggaagacagtggatggcccccatcagcttggaaaggctgccttacaacatggggtgattgctggtcgccagggctttgggagcatctttgtggtagccagtggcaacggaggccaacacaacgacaactgcaactacgatggctacgccaactccatctacaccgtcaccataggagctgtggatgaggagggacgcatgcctttctatgcagaagaatgtgcctccatgctggcagtcaccttcagtggtggggacaagatgcttcggagcattgtgaccactgactgggaccttcagaagggcactggctgcactgagggccacacagggacctcagctgcagcgcctctggcagctggcatgatagccttaatgctgcaggtgcggccctgcctcacgtggcgtgacgtccagcacatcattgtcttcacagccacccggtatgaggatcgccgtgcagagtgggtcaccaacgaggcaggcttcagccatagccaccagcacggtttcggcctcctcaacgcctggaggctcgtgaatgcagccaagatctggacatctgtcccttacttagcatcctacgtcagtcccgtgttaaaagaaaacaaggcgattccgcagtccccccgttccctggaggtcctgtggaatggtaagtaatcagcacaaagggggttaatcttaggcctgaggtttggggccgggtgacaaggaagttaaactcgtcctccctgccagattctaccccctttcggagctgagctccagccaaacctgtggagttttctttgaccattttaggacatgttactgcttctgagttggctcccccagctgcttaaacaagacctttctcctgggttcctagtagtgaaaaggagcagcagagcaactgaggaggagggcgggtgggaggcatgggactggggcttggggaggtcaggcgagaccggggtgagagctcagagaagctcctgtgacttccatgctaagatcttgccagagaactctggtcagtcctcgggtgtctggatgaagtaaaggagttaggcatttcttcctttgattctctggcttacctaatagagagagtcagatgtggtctgctggggatggacagagggtttgtagaagtctcctaggctttagtgacccatcctctgcctccgcctccatggtggccagcatgaaccaggattgtctgaaggggttgtatcctctaagccagcgacctggttttatgttgagcgaagaggcggacgccctccctagaggagagtgcagctggatcaggatgcttgtgcagaggatgccctgtctgcacatttaccagcgttttccctacccccagctccttgggggattctttttcctggagtcattnactactttttgcaaaggaagtatgctatgcttagtgcccaaaccaaaactgtcttcactttttctgtcctcctagaaagtgatcaattgagagccatggcaggagaaggaatggccagagaaggttactcagaagggaggatgaggggtggcttccctcaggtgaaggtttcacagagaagaattgagttttctcctcctaaccacatccagcacttgcccaatttccctcaatgtggaatgaaacccctgggccagtcactgcatttcccataaaaggaatgttatcttggaaagggcataaagcgtcagccaagtcagagaagttcagaaacatttccaggaatgcagttcatttggaagcccctggctttgcacttgcgtgtcttagagatagtgtgccttcaactttaccttctatccagggctatttcctgttgcatctgtcaaatgagggcagtgacttaaaagagtaatatggtcttcccagcttcgtcatcctctgcttcctgctgaccaggggacgttgccacggaatgtctaccctaggcattgaggcatctggcaactgcttgcttgtcactaaaaagtaagagaaagaaggacagattgcctgggtggagaagagtgggaggtggcctagtggagaaagcaggattaagagaagggagggaaagatttagggagtttggctaatggagccctttacctgttggaagggcagcaagcaaaagttttaccagagttttccctacccccagctccttgggggattttttgttttgtttcatttttgtttttgtttttttgccttgagtaattttgacatgcagagttattcacaactttttgcaaagtactattttcattggcttttcagagccagtgaagttgccttctcctccaacatgaccacattttcctctgagcagacaaaaacagaacaaataagtttgtgggcttgcttggaggttgaaagaaataagtccagttaaaatgagagttgagccaggtgccctggctcatgcctgtaatcccagcactttgggaactttgggaggcagataacctgaggtcaggagtttgagaccaacctgaccaacatggtgataccccatctccactaaaaatacaaaattagctgggtgtggtggctcatgcctgtagtcccagctacttgggaggctgaggcaggagaacccgggaggcagaggttgcagtgagctgagatcgcaccattgcactccagcctgggcaagaagagggaaactccatctcaaaaaaa

SEQ ID NO: 365214 - DNA, 2067 bp, Homo sapiens
ggggcacagggaggagctgcccaggtgcagttaccattgcctcagtgacagagccctcaaagcttggccagggctgaaggtaccacacgggtgtgggtgaggcaggctaagcgggatggctgcagccaaggagctgggggagggccgggctcagggctagccctctccgctctaactgatgatctgccgaggtcgtccgtagcctgtcatgccggcctgggaggcccctctgttgctgcccatctgaaggccaatgacatgctttccctcctgcagctggctctctgtgaattccctcttatgctcctgcgctttcttcataaaccagttgggatctccacggtagtgcccatcattcttggtcactgccaagctgcccaaagccatcagggtcctctgcactgctgccatgtctttgccttcaaagaggtcaacagtctggaacatgtcagtcttgatgaccccatagtcctcagccgccttcaggaactgagccacctgctccatctgcttgaagaccatggagggtgggttctcgggcaccttcaccggcttggagccatcagggtacaggctgttcaccagcttgctcagaatcacgccattcttcagccagacctggaagcccaagcgcccacggtctgggcggcccacatcagggccacactgcaactatgatccactccaccagccgctcctccagctcctcgtcatacttcttctcgattttggactgcacttcgcggctcatgccataggaaggacccttgttggccatgtctggggaaagctgtccactgatgtcaccctagggtgctgtgccttctctccagtgtttgtctgaagagacttccaaaagaggtaccaaaggaagccgaacccatcccctggcctcagaggggtcagaggttgggagggacacgctggtctgaggatggacgcaggagcgcactcccccggctccctctctgggctatcgctgctgctcaggccctggggacccgccagagtgggacaccgtgctccaacacagatgaggaaactgaggccccgagtgcgtcttcctcaaggccacatggtgaatggaacagtccctaccagcctggaaaacagaccagcctctgtcactccagagataacccactctcatcttgctcgtacctggcttcagggatcctggggagagataagaggttaaaaaagggacatatcaaaactccctcctcttggagcctgcccagctttcatcaccctcctgcctcggcctgcacgctgagcggattataaacgccgcatcagggagcactgcttgggcctgtggcctgaaaacggaaatgcaaccatagcatggagacgctctgagaaaagatccagacccacctcatctcccagcccttcaagcagagctataaaaacaagtttgggagaaaaacacattcccatccccaaagcagaggccccgcctgagctcccccatcctcagcatctggggtggaccaggtatgtgtgtgcatgactaacacagaacttgcctgaagactggacggaaacttagaagccagccctgggtcctagagcgaggctaggactgggcacgtagagggaaacagcacatcccttcctgaagcccctttctaagtatccaggtcgtcatccagtgtcagcaacacctggggtgtggacgccagatcagccacagagaaggaggcagctgctaccttcacgtacccacccggctcggccgggaggcccgcttaccaggaaggacccgaacatggcgatggaggagaggaagtgccagatgtcgtggtcgtcaaagaagtcgaggaggatgcagtcccggttgtgctccctcgactctgcaggggttttcttggggagcaacaagaaaaactgccgaatgaccctgctctggcagggcaagggccagacccatctgccatcttgctcctgggcacccctctctccagccccaggcaggacagcagcaattctgacctgtcccttgtccttgtccctaccccttcccgatctaacaaatggcctttggttacaaacttaaaatga

SEQ ID NO: 365215 - DNA, 1119 bp, Homo sapiens
ggggcacagggaggagctgcccaggtgcagttaccattgcctcagtgacagagccctcaaagcttggccagggctgaaggtaccacacgggtgtgggtgaggcaggctaagcgggatggctgcagccaaggagctgggggagggccgggctcagggctagccctctccgctctaactgatgatctgccgaggtcgtccgtagcctgtcatgccggcctgggaggcccctctgttgctgcccatctgaaggccaatgacatgctttccctcctgcagctggctctctgtgaattccctcttatgctcctgcgctttcttcataaaccagttgggatctccacggtagtgcccatcattcttggtcactgccaagctgcccaaagccatcagggtcctctgcactgctgccatgtctttgccttcaaagaggtcaacagtctggaacatgtcagtcttgatgaccccatagtcctcagccgccttcaggaactgagccacctgctccatctgcttgaagaccatggagggtgggttctcgggcaccttcaccggcttggagccatcagggtacaggctgttcaccagcttgctcagaatcacgccattcttcagccagacctggaagcccaagcgcccacggtctgggcggcccacatcagggccacactgcaactatgatccactccaccagccgctcctccagctcctcgtcatacttcttctcgattttggactgcacttcgcggctcatgccataggaaggacccttgttggccatgtctggggaaagctaaagcaggccagggtggaggagggaggggcagagggtcagggagcagctctgctttcacccgtgccaggcagccttctagctctgtgcaggatacccggccatcctagacacttgtcacagcactgcccatccaggccaggctcagcccctactccagacacctctctgaacttgaacaccaggaaagaggataccaggtctttggaggtctagagcaggggtcagtaaactgtttttgtaaaggataagacagaacatattttaggctttgcaggacacatggtctctgctgttgcagtgtgcttccgggatcctctagacgaccc

SEQ ID NO: 365216 - DNA, 317 bp, Homo sapiens
aacaacttcgtccattctgatctgtgtggatcctcggcgtgtgcatgcacacgccgaggatctagcctcacgaaactggaataagccttcgaaaagaaattgtccttgaagcttgtatctgatatcagcactggattgtagaacttgttgctgattttgaccttgtattgaagttaactgttccccttggtatttgtttaataccctgtacatatctttgagttcaacctttagtacgtttggacactcggcgtgtgcagcaacaacttcgtccactccgagctgtaactcctcgtctggactgtcggcgtgtgaga

SEQ ID NO: 365217 - DNA, 1609 bp, Homo sapiens
  misc_feature (93)..(93): n is a, c, g, or t
agaagatctggcaccacaccttctacaacgagctgcgcgtggcccggaggagcacccagtgctgctgaccgaggccccctgaaccccaaggcnaacagagagaagatgactcagattatgtttgagaccttcaacaccccggccatgtacgtggccatccaggccgtgctgtccctctacgcctctgggcgcaccactggcattgtcatggactctggagacggggtcacccacacggtgcccatctacgagggctacgccctcccccacgccatcctgcgtctggacctggctggccgggacctgaccgactacctcatgaagatcctcactgagcgaggctacagcttcaccaccacggccgagcgggaaatcgtgcgcgacatcaaggagaagctgtgctacgtcgccctggacttcgagcaggagatggccacggccgcatcctcctcttctctggagaagagctacgagctgcccgatggccaggtcatcaccattggcaatgagcggttccggtgtccggaggcgctgttccagccttccttcctgggtatggaatcttgcggcatccacgagaccaccttcaactccatcatgaagtgtgacgtggacatccgcaaagacctgtacgccaacacggtgctgtccggcggcaccaccatgtatcccggcattgccgacaggatgcagaaggagatcaccgccctggcgtccagcaccatgaagatcaagactcatcgcacccccagagcgcaagtactcggtgtggatcggtggctccatcctggcctcactgtccaccttccagcagatgtggattagcaagcaggagtacgacgagtcgggcccctccatcgtccaccgcaaatgcttctaaacggactcagcagatgcgtagcatttgctgcatgggttaattgagaatagaaatttgcccctggcaaatgcacacacctcatgctagcctcacgaaactggaataagccttcgaaaagaaattgtccttgaagcttgtatctgatatcagcactggattgtagaacttgttgctgattttgaccttgtattgaagttaactgttccccttggtatttgtttaataccctgtacatatctttgagttcaacctttagtacgtgtggcttggtcacttcgtggctaaggtaagaacgtgcttgtggaagacaagttgcgacttggtgagtctgcatggccagcagtctccgatctttgcagggtattaacgtgtcagggctgagtgttctgggatttctctagaggctggcaagaaccagttgttttgtcttgcgggtctgtcagggttggaaagtccaagccgtaggacccagtttcctttcttagctgatgtctttgtgccagaacactgtgggctgtgacttgctttgagttggaagcagtttgcatttacacctgtaaatgtattcatccttttaatttatgtaaggtttttttttgtatgcaattctcgattctttaaggagatgagaacagattttggttttctactgttatgtgagaacattaggccccagcggcatgtcattgtgtaaggaaaaataaaagtgctgctgtaaccaaaaaaaag

SEQ ID NO: 365218 - DNA, 739 bp, Homo sapiens
atcctctagagcgggcgcctactactactaaattcgcggccgcgtcgacattgagaatagaaatttgcccctggcaaatgcacacacctcatgctagcctcacgaaactggaataagccttcgaaaagaaattgtccttgaagcttgtatctgatatcagcactggattgtagaacttgttgctgattttgaccttgtattgaagttaactgttccccttggtatttgtttaataccctgtacatatctttgagttcaacctttagtacgtgtggcttggtcacttcgtggctaaggtaagaacgtgcttgtggaagacaagttgcgacttggtgagtctgcatggccagcagtctccgatctttgcagggtattaacgtgtcagggctgagtgttctgggatttctctagaggctggcaagaaccagttgttttgtcttgcgggtctgtcagggttggaaagtccaagccgtaggacccagtttcctttcttagctgatgtctttgtgccagaacactgtgggctgtgacttgctttgagttggaagcagtttgcatttacacctgtaaatgtattcatccttttaatttatgtaaggtttttttttgtatgcaattctcgattctttaaggagatgagaacagattttggttttctactgttatgtgagaacattaggccccagcggcatgtcattgtgtaaggaaaaataaaagtgctgctgtaaccaaaaaaaag

SEQ ID NO: 365219 - DNA, 1250 bp, Homo sapiens
  misc_feature (93)..(93): n is a, c, g, or t
agaagatctggcaccacaccttctacaacgagctgcgcgtggcccggaggagcacccagtgctgctgaccgaggccccctgaaccccaaggcnaacagagagaagatgactcagattatgtttgagaccttcaacaccccggccatgtacgtggccatccaggccgtgctgtccctctacgcctctgggcgcaccactggcattgtcatggactctggagacggggtcacccacacggtgcccatctacgagggctacgccctcccccacgccatcctgcgtctggacctggctggccgggacctgaccgactacctcatgaagatcctcactgagcgaggctacagcttcaccaccacggccgagcgggaaatcgtgcgcgacatcaaggagaagctgtgctacgtcgccctggacttcgagcaggagatggccacggccgcatcctcctcttctctggagaagagctacgagctgcccgatggccaggtcatcaccattggcaatgagcggttccggtgtccggaggcgctgttccagccttccttcctgggtatggaatcttgcggcatccacgagaccaccttcaactccatcatgaagtgtgacgtggacatccgcaaagacctgtacgccaacacggtgctgtccggcggcaccaccatgtatcccggcattgccgacaggatgcagaaggagatcaccgccctggcgtccagcaccatgaagatcaagactcatcgcacccccagagcgcaagtactcggtgtggatcggtggctccatcctggcctcactgtccaccttccagcagatgtggattagcaagcaggagtacgacgagtcgggcccctccatcgtccaccgcaaatgcttctaaacggactcagcagatgcgtagcatttgctgcatgggttaattgagaatagaaatttgcccctggcaaatgcacacacctcatgctagcctcacgaaactggaataagccttcgaaaagaaattgtccttgaagcttgtatctgatatcagcactggattgtagaacttgttgctgattttgaccttgtattgaagttaactgttccccttggtatttgtttaataccctgtacatatccatggagctcgacctgtatacaagagttgatggattgggcacttcgtggctaacgagtaagcacggtgcttctggaatggcatagtctgtggctttcgtgagatctgtcatggtactaggtcctcagcgtgt

SEQ ID NO: 365220 - DNA, 1202 bp, Homo sapiens
  misc_feature (93)..(93): n is a, c, g, or t
agaagatctggcaccacaccttctacaacgagctgcgcgtggcccggaggagcacccagtgctgctgaccgaggccccctgaaccccaaggcnaacagagagaagatgactcagattatgtttgagaccttcaacaccccggccatgtacgtggccatccaggccgtgctgtccctctacgcctctgggcgcaccactggcattgtcatggactctggagacggggtcacccacacggtgcccatctacgagggctacgccctcccccacgccatcctgcgtctggacctggctggccgggacctgaccgactacctcatgaagatcctcactgagcgaggctacagcttcaccaccacggccgagcgggaaatcgtgcgcgacatcaaggagaagctgtgctacgtcgccctggacttcgagcaggagatggccacggccgcatcctcctcttctctggagaagagctacgagctgcccgatggccaggtcatcaccattggcaatgagcggttccggtgtccggaggcgctgttccagccttccttcctgggtatggaatcttgcggcatccacgagaccaccttcaactccatcatgaagtgtgacgtggacatccgcaaagacctgtacgccaacacggtgctgtccggcggcaccaccatgtatcccggcattgccgacaggatgcagaaggagatcaccgccctggcgtccagcaccatgaagatcaagactcatcgcacccccagagcgcaagtactcggtgtggatcggtggctccatcctggcctcactgtccaccttccagcagatgtggattagcaagcaggagtacgacgagtcgggcccctccatcgtccaccgcaaatgcttctaaacggactcagcagatgcgtagcatttgctgcatgggttaattgagaatagaaatttgcccctggcaaatgcacacacctcatgctagcctcacgaaactggaataagccttcgaaaagaaattgtccttgaagcttgtatctgatatcagcactggattgtagaacttgttgctgattttgaccttgtattgaagttaactgttccccttggtattaacgtgtcagggctgagtgttctgggatttctctagaggctggcaagaaccagttgttttgacttgcgggctgatcctctagagtcgaccgatcctctagagtcga

SEQ ID NO: 365221 - DNA, 678 bp, Homo sapiens
actctagaggatctcctgcacacgccgaggcactagcctcacgaaactggaataagccttcgaaaagaaattgtccttgaagcttgtatctgatatcagcactggattgtagaacttgttgctgattttgaccttgtattgaagttaactgttccccttggtatttgtttaataccctgtacatatctttgagttcaacctttagtacgtgtggcttggtcacttcgtggctaaggtaagaacgtgcttgtggaagacaagttgcgacttggtgagtctgcatggccagcagtctccgatctttgcagggtattaacgtgtcagggctgagtgttctgggatttctctagaggctggcaagaaccagttgttttgtcttgcgggtctgtcagggttggaaagtccaagccgtaggacccagtttcctttcttagctgatgtctttgtgccagaacactgtgggctgtgacttgctttgagttggaagcagtttgcatttacacctgtaaatgtattcatccttttaatttatgtaaggtttttttttgtatgcaattctcgattctttaaggagatgagaacagattttggttttctactgttatgtgagaacattaggccccagcggcatgtcattgtgtaaggaaaaataaaagtgctgctgtaaccaaaaaaaag

SEQ ID NO: 365222 - DNA, 748 bp, Homo sapiens
ttcaatttctatttgaaggcttattccagtttcgtgaggctagcatgaggtgtgtgcagtttgccagggagtagatttctagttctcaattaacccatgcagctagcctcacgaaactggaataagccttcgaaaagaaattgtccttgaagcttgtatctgatatcagcactggattgtagaacttgttgctgattttgaccttgtattgaagttaactgttccccttggtatttgtttaataccctgtacatatctttgagttcaacctttagtacgtgtggcttggtcacttcgtggctaaggtaagaacgtgcttgtggaagacaagttgcgacttggtgagtctgcatggccagcagtctccgatctttgcagggtattaacgtgtcagggctgagtgttctgggatttctctagaggctggcaagaaccagttgttttgtcttgcgggtctgtcagggttggaaagtccaagccgtaggacccagtttcctttcttagctgatgtctttgtgccagaacactgtgggctgtgacttgctttgagttggaagcagtttgcatttacacctgtaaatgtattcatccttttaatttatgtaaggtttttttttgtatgcaattctcgattctttaaggagatgagaacagattttggttttctactgttatgtgagaacattaggccccagcggcatgtcattgtgtaaggaaaaataaaagtgctgctgtaaccaaaaaaaag

SEQ ID NO: 365223 - DNA, 1461 bp, Homo sapiens
  misc_feature (93)..(93): n is a, c, g, or t
agaagatctggcaccacaccttctacaacgagctgcgcgtggcccggaggagcacccagtgctgctgaccgaggccccctgaaccccaaggcnaacagagagaagatgactcagattatgtttgagaccttcaacaccccggccatgtacgtggccatccaggccgtgctgtccctctacgcctctgggcgcaccactggcattgtcatggactctggagacggggtcacccacacggtgcccatctacgagggctacgccctcccccacgccatcctgcgtctggacctggctggccgggacctgaccgactacctcatgaagatcctcactgagcgaggctacagcttcaccaccacggccgagcgggaaatcgtgcgcgacatcaaggagaagctgtgctacgtcgccctggacttcgagcaggagatggccacggccgcatcctcctcttctctggagaagagctacgagctgcccgatggccaggtcatcaccattggcaatgagcggttccggtgtccggaggcgctgttccagccttccttcctgggtatggaatcttgcggcatccacgagaccaccttcaactccatcatgaagtgtgacgtggacatccgcaaagacctgtacgccaacacggtgctgtccggcggcaccaccatgtatcccggcattgccgacaggatgcagaaggagatcaccgccctggcgtccagcaccatgaagatcaagactcatcgcacccccagagcgcaagtactcggtgtggatcggtggctccatcctggcctcactgtccaccttccagcagatgtggattagcaagcaggagtacgacgagtcgggcccctccatcgtccaccgcaaatgcttctaaacggactcagcagatgcgtagcatttgctgcatgggttaattgagaatagaaatttgcccctggcaaatgcacacacctcatgctagcctcacgaaactggaataagccttcgaaaagaaattgtccttgaagcttgtatctgatatcagcactggattgtagaacttgttgctgattttgaccttgtattgaagttaactgttccccttgggtattaacgtgtcagggctgagtgttctgggatttctctagaggctggcaagaaccagttgttttgtcttgcgggtctgtcagggttggaaagtccaagccgtaggacccagtttcctttcttagctgatgtctttgtgccagaacactgtgggctgtgacttgctttgagttggaagcagtttgcatttacacctgtaaatgtattcatccttttaatttatgtaaggtttttttttgtatgcaattctcgattctttaaggagatgagaacagattttggttttctactgttatgtgagaacattaggccccagcggcatgtcattgtgtaaggaaaaataaaagtgctgctgtaaccaaaaaaaag

SEQ ID NO: 365224 - DNA, 1160 bp, Homo sapiens
  misc_feature (93)..(93): n is a, c, g, or t
agaagatctggcaccacaccttctacaacgagctgcgcgtggcccggaggagcacccagtgctgctgaccgaggccccctgaaccccaaggcnaacagagagaagatgactcagattatgtttgagaccttcaacaccccggccatgtacgtggccatccaggccgtgctgtccctctacgcctctgggcgcaccactggcattgtcatggactctggagacggggtcacccacacggtgcccatctacgagggctacgccctcccccacgccatcctgcgtctggacctggctggccgggacctgaccgactacctcatgaagatcctcactgagcgaggctacagcttcaccaccacggccgagcgggaaatcgtgcgcgacatcaaggagaagctgtgctacgtcgccctggacttcgagcaggagatggccacggccgcatcctcctcttctctggagaagagctacgagctgcccgatggccaggtcatcaccattggcaatgagcggttccggtgtccggaggcgctgttccagccttccttcctgggtatggaatcttgcggcatccacgagaccaccttcaactccatcatgaagtgtgacgtggacatccgcaaagacctgtacgccaacacggtgctgtccggcggcaccaccatgtatcccggcattgccgacaggatgcagaaggagatcaccgccctggcgtccagcaccatgaagatcaagactcatcgcacccccagagcgcaagtactcggtgtggatcggtggctccatcctggcctcactgtccaccttccagcagatgtggattagcaagcaggagtacgacgagtcgggcccctccatcgtccaccgcaaatgcttctaaacggactcagcagatgcgtagcatttgctgcatgggttaattgagaatagaaatttgcccctggcaaatgcacacacctcatgctagcctcacgaaactggaataagccttcgaaaagaaattgtccttgaagcttgtatctgatatcagcactggattgtagaacttgttgctgattttgaccttgtattgaagttaactgttccccttggtatttgtttaataccctgtacatatcctaggagtctcaacatgtacgaagagtgacgatggcgaactg

SEQ ID NO: 365225 - DNA, 1203 bp, Homo sapiens
gccggcgcgggaagcgcttcggggcaggggcggggcttccggcggcgcctcaggtcgcggggcgcctaggcctgggttgtcctttgcatctgcacgtgttcgcagtcgtttccgcgatgctgcctctgctgcgctgcgtgccccgtgtgctgggctcctccgtcgccggcctccgcgctgccgcgcccgcctcgcctttccggcagctcctgcagccggcaccccggctgtgcacccggcccttcgggctgctcagcgtgcgcgcaggttccgagcggcggccgggcctcctgcggcctcgcggaccctgcgcctgtggctgtggctgcggctcgctgcacaccgacggagacaaagcttttgttgatttcctgagtgatgaaattaaggaggaaagaaaaattcagaagcataaaaccctccctaagatgtctggaggttgggagctggaactgaatgggacagaagcgaaattagtgcggaaagttgccggggaaaaaatcacggtcactttcaacattaacaacagcatcccaccaacatttgatggtgaggaggaaccctcgcaagggcagaaggttgaagaacaggagcctgaactgacatcaactcccaatttcgtggttgaagttataaagaatgatgatggcaagaaggcccttgtgttggactgtcattatccagaggatgaggttggacaagaagacgaggctgagagtgacatcttctctatcagggaagttagctttcagtccactggcgagtctgaatggaaggatactaattatacactcaacacagattccttggactgggccttatatgaccacctaatggatttccttgccgaccgaggggtggacaacacttttgcagatgagctggtggagctcagcacagccctggagcaccaggagtacattacttttcttgaagacctcaagagttttgtcaagagccagtagagcagacagatgctgaaagccatagtttcatggcaggctttggccagtgaacaaatcctactctgaagctagacatgtgctttgaaatgattatcatcctaatatcatgggggaaaaaataccaaatttaaattatatgttttgtgttctcatttattatcatttttttctgtacaaatctattatttctagatttttgtataacatgatagacataaaattggtttatctcctccaa

SEQ ID NO: 365226 - DNA, 460 bp, Homo sapiens
tcaaggggagaaaaaagcattttaatgttcattacagatttttttttaactagtaaatattgttctttgcaggccttatatgaccacctaatggatttccttgccgaccgaggggtggacaacacttttgcagatgagctggtggagctcagcacagccctggagcaccaggagtacattacttttcttgaagacctcaagagttttgtcaagagccagtagagcagacagatgctgaaagccatagtttcatggcaggctttggccagtgaacaaatcctactctgaagctagacatgtgctttgaaatgattatcatcctaatatcatgggggaaaaaataccaaatttaaattatatgttttgtgttctcatttattatcatttttttctgtacaaatctattatttctagatttttgtataacatgatagacataaaattggtttatctcctccaa

SEQ ID NO: 365227 - DNA, 1074 bp, Homo sapiens
gggattacagacgtgagccaccgtgcccggtgaaactccatctcaaaaaaaaaaaaagaaggaaaggaaaggaaacagacctgtgtgctctagcagggtgttttcctctgcctgttctgctcagagccttggaagaaagtaaactgtgatgggggtggcacaggcctcaatcatctgcttttggggctcgagagggacacggaaaggccttcccactatttgtttctggtcctcctcttcgttctcttatgcaggtgattgtgatgtcagctacgatggatgtggacctgttctctcagtatttcaatggcgcccccgtcctctacctagagggtcggcagcatccgatccaggtgttttacaccaaacagcctcagaatgattacctgcacgccgcgcttgtctccgtcttccagatccaccaggaagccccttcttcacaggacatcctggtgttcctcactgggcaggaggagatcgaagccatgagcaagacgtgccgagacattgcaaagcacctcccagacggctgccctgcgatgctggtccttcctctgtacgcctccctgccctatgcacagcagctccgagtcttccaaggggccccaaagggtatcgcaagtgatcattcaaccaaatcgctgaactccaaaacattacgggaatacgatatgtgcatgaacacgagcgcgtgtaaagcaacagaagtatacccggacacagacataaggggtaaaccgagcaggggaacaaagaacaacggctggagacgccggagaggcagcaaaaaagacgcagggacactgaacgggaccacaggagggagaaattgaacacagggcacagaacggccaagcacacagggacaactgacagaaaggaagcagcaaacaacagaacacaagggagcatagagtgagaatcgacgcagaaaaaaaaaggaggagcacgagcacacggacgagcacaggaagaacgaaaagaaagaagagtaaacaagaacgaactacctaagaaaagaaagggaaccagagaaagaacgtagagaacagcgagagaacaagacacacagat

SEQ ID NO: 365228 - DNA, 1627 bp, Homo sapiens
  misc_feature (1213)..(1213): n is a, c, g, or t
  misc_feature (1627)..(1627): n is a, c, g, or t
gccggcgcgggaagcgcttcggggcaggggcggggcttccggcggcgcctcaggtcgcggggcgcctaggcctgggttgtcctttgcatctgcacgtgttcgcagtcgtttccgcgatgctgcctctgctgcgctgcgtgccccgtgtgctgggctcctccgtcgccggcctccgcgctgccgcgcccgcctcgcctttccggcagctcctgcagccggcaccccggctgtgcacccggcccttcgggctgctcagcgtgcgcgcaggttccgagcggcggccgggcctcctgcggcctcgcggaccctgcgcctgtggctgtggctgcggctcgctgcacaccgacggagacaaagcttttgttgatttcctgagtgatgaaattaaggaggaaagaaaaattcagaagcataaaaccctccctaagatgtctggaggttgggagctggaactgaatgggacagaagcgaaattagtgcggaaagttgccggggaaaaaatcacggtcactttcaacattaacaacagcatcccaccaacatttgatggtgaggaggaaccctcgcaagggcagaaggttgaagaacaggagcctgaactgacatcaactcccaatttcgtggttgaagttataaagaatgatgatggcaagaaggcccttgtgttggactgtcattatccagaggatgaggttggacaagaagacgaggctgagagtgacatcttctctatcagggaagttagctttcagtccactggcgagtctgaatggaaggatactaattatacactcaacacagattccttggactgggccttatatgaccacctaatggatttccttgccgaccgaggggtggacaacacttttgcagatgagctggtggagctcagcacagccctggagcaccaggagtacattacttttcttgaagacctcaagagttttgtcaagagccagtagagcagacagatgctgaaagccatagtttcatggcaggctttggccagtgaacaaatcctactctgaagctagacatgtgctttgaaatgattatcatcctaatatcatgggggaaaaaataccaaatttaaattatatgttttgtgttctcatttattatcatttttttctgtacaaatctattatttctagatttttgtataacatgatagacataaaattggtttatctcctccaaaaaaaacacnaaaaaacagaaacaacacaggggagaagcacacaaagttaccaccgaggcgcccaagataacacagacacaatttccggcacagcgggcccacaacgcgaccaccaaaaacacacaacagcgacggaaaacacgccgcgcggcacacctcgcactcgggacactgggttaagggaccaatactcgggggcgggacacgagcggcaccaccccccagaaaacgcgcacccggacaccacacccagaagcaacaggtgaaacacacaaagtaagcgggcgcaaactgacacagcaacaactaaaatcagcaaacgacacataaaagcacagacaagcaccagaaagacaaaaagaggcgcagcccgcaaaggatgcacaccaataacaccacaacacaagcaaaccaagacataan

SEQ ID NO: 365229 - DNA, 1790 bp, Homo sapiens
gccggcgcgggaagcgcttcggggcaggggcggggcttccggcggcgcctcaggtcgcggggcgcctaggcctgggttgtcctttgcatctgcacgtgttcgcagtcgtttccgcgatgctgcctctgctgcgctgcgtgccccgtgtgctgggctcctccgtcgccggcctccgcgctgccgcgcccgcctcgcctttccggcagctcctgcagccggcaccccggctgtgcacccggcccttcgggctgctcagcgtgcgcgcaggttccgagcggcggccgggcctcctgcggcctcgcggaccctgcgcctgtggctgtggctgcggctcgctgcacaccgacggagacaaagcttttgttgatttcctgagtgatgaaattaaggaggaaagaaaaattcagaagcataaaaccctccctaagatgtctggaggttgggagctggaactgaatgggacagaagcgaaattagtgcggaaagttgccggggaaaaaatcacggtcactttcaacattaacaacagcatcccaccaacatttgatggtgaggaggaaccctcgcaagggcagaaggttgaagaacaggagcctgaactgacatcaactcccaatttcgtggttgaagttataaagaatgatgatggcaagaaggcccttgtgttggactgtcattatccagaggatgaggttggacaagaagacgaggctgagagtgacatcttctctatcagggaagttagctttcagtccactggcgagtctgaatggaaggatactaattatacactcaacacagattccttggactgggccttatatgaccacctaatggatttccttgccgaccgaggggtggacaacacttttgcagatgagctggtggagctcagcacagccctggagcaccaggagtacattacttttcttgaagacctcaagagttttgtcaagagccagtagagcagacagatgctgaaagccatagtttcatggcaggctttggccagtgaacaaatcctactctgaagctagacatgtgctttgaaatgattatcatcctaatatcatgggggaaaaaataccaaatttaaattatatgttttgtgttctcatttattatcatttttttctgtacaaatctattatttctagatttttgtataacatgatagacataaaattggtttatctcctccaacaaggcagtttgtctttttctattcctcccccttcaacctgcgtcacaaaagaccaagaacagatgtcggaaaagtttttttttcttcagtattgtttaaaagtttcaatacaaaataagttataaataaaaggcttgtatgtacaaggctcctcagagggaatgagttgtcttcaaccccatagaatgatgtgagtccaagctggctctagaggatcacagcccaagtatcacaggcctaggtttaaacaggaaaataattagcttaaattgtattctagtcatgaaagatatctgataaaagttgtaatcaatgagaattctacacattagatgaggtctcctgagtccagtttcaattagttcagtagtgtagtttgtcatgatgaccgcccctctttggcattgctggacctctgtcctgcagccttcaaacaactgccctgggaaccatcagcatcaatagtcttcaagctaagatcaaatcctgtagatgaactaatcaaacatcctcaccatcaggaaaccactgaccagaaagattgtattcaaactcttgatagcctggagcttttagagcccagcag

SEQ ID NO: 365230 - DNA, 1645 bp, Homo sapiens
gccggcgcgggaagcgcttcggggcaggggcggggcttccggcggcgcctcaggtcgcggggcgcctaggcctgggttgtcctttgcatctgcacgtgttcgcagtcgtttccgcgatgctgcctctgctgcgctgcgtgccccgtgtgctgggctcctccgtcgccggcctccgcgctgccgcgcccgcctcgcctttccggcagctcctgcagccggcaccccggctgtgcacccggcccttcgggctgctcagcgtgcgcgcaggttccgagcggcggccgggcctcctgcggcctcgcggaccctgcgcctgtggctgtggctgcggctcgctgcacaccgacggagacaaagcttttgttgatttcctgagtgatgaaattaaggaggaaagaaaaattcagaagcataaaaccctccctaagatgtctggaggttgggagctggaactgaatgggacagaagcgaaattagtgcggaaagttgccggggaaaaaatcacggtcactttcaacattaacaacagcatcccaccaacatttgatggtgaggaggaaccctcgcaagggcagaaggttgaagaacaggagcctgaactgacatcaactcccaatttcgtggttgaagttataaagaatgatgatggcaagaaggcccttgtgttggactgtcattatccagaggatgaggttggacaagaagacgaggctgagagtgacatcttctctatcagggaagttagctttcagtccactggcgagtctgaatggaaggatactaattatacactcaacacagattccttggactgggccttatatgaccacctaatggatttccttgccgaccgaggggtggacaacacttttgcagatgagctggtggagctcagcacagccctggagcaccaggagtacattacttttcttgaagacctcaagagttttgtcaagagccagtagagcagacagatgctgaaagccatagtttcatggcaggctttggccagtgaacaaatcctactctgaagctagacatgtgctttgaaatgattatcatcctaatatcatgggggaaaaaataccaaatttaaattatatgttttgtgttctcatttattatcatttttttctgtacaaatctattatttctagatttttgtataacatgatagacataaaattggtttatctcctccaaaaaaagaaaaagaacaaacaaacccgggggggacacattggggggggggcaacaacgcgggtatcggaggggccactgggcccaaggggttccggaacccagttttttggtcccagggggtacatcggcggaccccccatagaggggggcgaacataaaattcgagaaggtccggggtaacccggcttaggaaccgcggcaaacgcaacgagcgacagaagatgcgacacagaaagacgccgggggagatcacatgcatgacacgcacgggggcgacacgggactgacagccataacagcacgcaccagcaactacaagcaccaagcaatatgagaaacacaacagagtcaggacgagagcacaaacagagagcgacggcaaccacaggcgacagcgaccggacgcatcagcgacgagggagggacacaaggaggaagaata

SEQ ID NO: 365231 - DNA, 1395 bp, Homo sapiens
gccggcgcgggaagcgcttcggggcaggggcggggcttccggcggcgcctcaggtcgcggggcgcctaggcctgggttgtcctttgcatctgcacgtgttcgcagtcgtttccgcgatgctgcctctgctgcgctgcgtgccccgtgtgctgggctcctccgtcgccggcctccgcgctgccgcgcccgcctcgcctttccggcagctcctgcagccggcaccccggctgtgcacccggcccttcgggctgctcagcgtgcgcgcaggttccgagcggcggccgggcctcctgcggcctcgcggaccctgcgcctgtggctgtggctgcggctcgctgcacaccgacggagacaaagcttttgttgatttcctgagtgatgaaattaaggaggaaagaaaaattcagaagcataaaaccctccctaagatgtctggaggttgggagctggaactgaatgggacagaagcgaaattagtgcggaaagttgccggggaaaaaatcacggtcactttcaacattaacaacagcatcccaccaacatttgatggtgaggaggaaccctcgcaagggcagaaggttgaagaacaggagcctgaactgacatcaactcccaatttcgtggttgaagttataaagaatgatgatggcaagaaggcccttgtgttggactgtcattatccagaggatgaggttggacaagaagacgaggctgagagtgacatcttctctatcagggaagttagctttcagtccactggcgagtctgaatggaaggatactaattatacactcaacacagattccttggactgggccttatatgaccacctaatggatttccttgccgaccgaggggtggacaacacttttgcagatgagctggtggagctcagcacagccctggagcaccaggagtacattacttttcttgaagacctcaagagttttgtcaagagccagtagagcagacagatgctgaaagccatagtttcatggcaggctttggccagtgaacaaatcctactctgaagctagacatgtgctttgaaatgattatcatcctaatatcatgggggaaaaaataccaaatttaaattatatgttttgtgttctcatttattatcatttttttctgtacaaatctattatttctagatttttgtataacatgatagacataaaattggtttatctcctccaaaaaaaaaaaaaaaaaaaaatttgtgagttaatggtacaagtgtgagtacttatccagagttttattatcctataactgtagtcccagctcctctggaagctgaggtggggaggacacttgaacccccatagtaaagtctgcagtgggctgccactgcactccagcctgggtgacagcaagactctgtctcaa

SEQ ID NO: 365232 - DNA, 1169 bp, Homo sapiens
cgaaacgcaacaacccaaagtaggcaggacgaggctgggttgtgaatcggcagaggcacacgtgttcgcagtcgtttccgcgatgctgcctctgctgcgctgcgtgccccgtgtgctgggctcctccgtcgccggcctccgcgctgccgcgcccgcctcgcctttccggcagctcctgcagccggcaccccggctgtgcacccggcccttcgggctgctcagcgtgcgcgcaggttccgagcggcggccgggcctcctgcggcctcgcggaccctgcgcctgtggctgtggctgcggctcgctgcacaccgacggagacaaagcttttgttgatttcctgagtgatgaaattaaggaggaaagaaaaattcagaagcataaaaccctccctaagatgtctggaggttgggagctggaactgaatgggacagaagcgaaattagtgcggaaagttgccggggaaaaaatcacggtcactttcaacattaacaacagcatcccaccaacatttgatggtgaggaggaaccctcgcaagggcagaaggttgaagaacaggagcctgaactgacatcaactcccaatttcgtggttgaagttataaagaatgatgatggcaagaaggcccttgtgttggactgtcattatccagaggatgaggttggacaagaagacgaggctgagagtgacatcttctctatcagggaagttagctttcagtccactggcgagtctgaatggaaggatactaattatacactcaacacagattccttggactgggccttatatgaccacctaatggatttccttgccgaccgaggggtggacaacacttttgcagatgagctggtggagctcagcacagccctggagcaccaggagtacattacttttcttgaagacctcaagagttttgtcaagagccagtagagcagacagatgctgaaagccatagtttcatggcaggctttggccagtgaacaaatcctactctgaagctagacatgtgctttgaaatgattatcatcctaatatcatgggggaaaaaataccaaatttaaattatatgttttgtgttctcatttattatcatttttttctgtacaaatctattatttctagatttttgtataacatgatagacataaaattggtttatctcctccaa

SEQ ID NO: 365233 - DNA, 1081 bp, Homo sapiens
  misc_feature (894)..(894): n is a, c, g, or t
  misc_feature (901)..(901): n is a, c, g, or t
gccggcgcgggaagcgcttcggggcaggggcggggcttccggcggcgcctcaggtcgcggggcgcctaggcctgggttgtcctttgcatctgcacgtgttcgcagtcgtttccgcgatgctgcctctgctgcgctgcgtgccccgtgtgctgggctcctccgtcgccggcctccgcgctgccgcgcccgcctcgcctttccggcagctcctgcagccggcaccccggctgtgcacccggcccttcgggctgctcagcgtgcgcgcaggttccgagcggcggccgggcctcctgcggcctcgcggaccctgcgcctgtggctgtggctgcggctcgctgcacaccgacggagacaaagcttttgttgatttcctgagtgatgaaattaaggaggaaagaaaaattcagaagcataaaaccctccctaagatgtctggaggttgggagctggaactgaatgggacagaagcgaaattagtgcggaaagttgccggggaaaaaatcacggtcactttcaacattaacaacagcatcccaccaacatttgatggtgaggaggaaccctcgcaagggcagaaggttgaagaacaggagcctgaactgacatcaactcccaatttcgtggttgaagttataaagaatgatgatggcaagaaggcccttgtgttggactgtcattatccagaggatgaggttggacaagaagacgaggctgagagtgacatcttctctatcagggaagttagctttcagtccactggcgagtctgaatggaaggatactaattatacactcaacacagattccttggactgggccttatatgaccacctaatggatttccttgccgaccgaggggtggacaacacttttgcagatgagctggtggagcggnccagagnctctttcttgagcctagagtttggcgacgcttacgacgtctaagctagtctgcggtgcgggcacacctcctcgctctgtctgggtttcccatcggggcaccctattttggccctaactgcgcctttatgtcgcacctctcctcaaaaaacttggtggggttcctctctctcttgccttct

SEQ ID NO: 365234 - DNA, 954 bp, Homo sapiens
gccggcgcgggaagcgcttcggggcaggggcggggcttccggcggcgcctcaggtcgcggggcgcctaggcctgggttgtcctttgcatctgcacgtgttcgcagtcgtttccgcgatgctgcctctgctgcgctgcgtgccccgtgtgctgggctcctccgtcgccggcctccgcgctgccgcgcccgcctcgcctttccggcagctcctgcagccggcaccccggctgtgcacccggcccttcgggctgctcagcgtgcgcgcaggttccgagcggcggccgggcctcctgcggcctcgcggaccctgcgcctgtggctgtggctgcggctcgctgcacaccgacggagacaaagcttttgttgatttcctgagtgatgaaattaaggaggaaagaaaaattcagaagcataaaaccctccctaagatgtctggaggttgggagctggaactgaatgggacagaagcgaaattagtgcggaaagttgccggggaaaaaatcacggtcactttcaacattaacaacagcatcccaccaacatttgatggtgaggaggaaccctcgcaagggcagaaggttgaagaacaggagcctgaactgacatcaactcccaatttcgtggttgaagttataaagaatgatgatggcaagaaggcccttgtgttggactgtcattatccagaggatgaggttggacaagaagacgaggctgagagtgacatcttctctatcagggaagttagctttcagtccactggcgagtctgaatggaaggatactaattatacactcaacacagattccttggactgggccttatatgaccacctaatggatttccttgccgaccgaggggtggacaacacttttgcagatgagctggtggagcgacgaagatgcgcgctcttcgtcccatcagcggatttctatacagtgacctcttgttggttat

SEQ ID NO: 365235 - DNA, 1178 bp, Homo sapiens
cggcgggggaccgcggtgctcgccggtgccaccatacggctcggcttgtcctttgtactctgctgattgtcctgactactgctacgtgatggctggtgtctgctgcactaccatgtgccgctctgtgggctcctccgtcgccggcctccgcgctgccgcgcccgcctcgcctttccggcagctcctgcagccggcaccccggctgtgcacccggcccttcgggctgctcagcgtgcgcgcaggttccgagcggcggccgggcctcctgcggcctcgcggaccctgcgcctgtggctgtggctgcggctcgctgcacaccgacggagacaaagcttttgttgatttcctgagtgatgaaattaaggaggaaagaaaaattcagaagcataaaaccctccctaagatgtctggaggttgggagctggaactgaatgggacagaagcgaaattagtgcggaaagttgccggggaaaaaatcacggtcactttcaacattaacaacagcatcccaccaacatttgatggtgaggaggaaccctcgcaagggcagaaggttgaagaacaggagcctgaactgacatcaactcccaatttcgtggttgaagttataaagaatgatgatggcaagaaggcccttgtgttggactgtcattatccagaggatgaggttggacaagaagacgaggctgagagtgacatcttctctatcagggaagttagctttcagtccactggcgagtctgaatggaaggatactaattatacactcaacacagattccttggactgggccttatatgaccacctaatggatttccttgccgaccgaggggtggacaacacttttgcagatgagctggtggagctcagcacagccctggagcaccaggagtacattacttttcttgaagacctcaagagttttgtcaagagccagtagagcagacagatgctgaaagccatagtttcatggcaggctttggccagtgaacaaatcctactctgaagctagacatgtgctttgaaatgattatcatcctaatatcatgggggaaaaaataccaaatttaaattatatgttttgtgttctcatttattatcatttttttctgtacaaatctattatttctagatttttgtataacatgatagacataaaattggtttatctcctccaa

SEQ ID NO: 365236 - DNA, 2564 bp, Homo sapiens
acatgccggaggaggcgggcttcccgccggccaagagattccggccaggctctggacctccgagccgcgctgggtccttccctcccgggaggcaagtggtgatgctgctgactgcgggcagcggcggcagaggaggaggaggaggccggaggcagcagccgcccctggcccagccctcggccagtccctaccctgaagctgtggagctgcagcgccggagtctgcccatcttccaagcgcgggggcaactgttggcccagctccgaaacctggacaacgcggtcctcatcggttggctatacagtgcgctttgatgatgtcacctcagaagacaccaggatcaagtttctgacagatggcatgcttctgcgtgaagcaatttcagactctttgcttcggaaatacagctgtgtcattttggatgaagctcacgaacggactatccacacagatgtgctctttggagtggtgaaagctgcacagaagaggagaaaggaactcgggaaacttcctctgaaagtgattgtgatgtcagctacgatggatgtggacctgttctctcagtatttcaatggcgcccccgtcctctacctagagggtcggcagcatccgatccaggtgttttacaccaaacagcctcagaatgattacctgcacgccgcgcttgtctccgtcttccagatccaccaggaagccccttcttcacaggacatcctggtgttcctcactgggcaggaggagatcgaagccatgagcaagacgtgccgagacattgcaaagcacctcccagacggctgccctgcgatgctggtccttcctctgtacgcctccctgccctatgcacagcagctccgagtcttccaaggggccccaaagggctatcgcaaagtgatcatttcaaccaacatcgctgaaacctccataaccattacaggaataaaatatgtagttgacacgggcatggttaaagcaaagaagtataaccctgacagtggtcttgaggtgttagcagtgcagcgggtatcgaagacgcaggcttggcagcgcacagggagggctggcagagaggacagtggcatctgctaccggctctacacggaggacgagtttgagaagtttgataagatgaccgtgccagagatccagaggtgtaacctggccagtgtgatgcttcagcttctagcaatgaaagtcccaaatgtgctcacctttgacttcatgtcgaagccatctccagatcacattcaggcggccattgcccaactggacctgttaggtgctcttgaacataaggatgaccagcttaccctgactccaatgggaagaaagatggcagcatttcctttagaacccaaatttgccaaaaccatcctcatgtcccccaaattccactgtacagaggagatcctgaccattgtctccctgctgtctgtggacagcgtcctccacaaccctccttcccggcgagaggaagtgcaaggggtccgcaagaagttcatatccagcgagggggatcacatgaccctgctcaatatctatcggaccttcaaaaacctaggcggaaataaggattggtgcaaagagaattttgtcaacagcaagaatatgacgctggtagcagaagtcagagcacagctgagggacatctgcttaaaggtatcgtctggtcctagtgttctgtgggtgacaaagctgtcactttgttcaaggagacaaagcttttgttgatttcctgagtgatgaaattaaggaggaaagaaaaattcagaagcataaaaccctccctaagatgtctggaggttgggagctggaactgaatgggacagaagcgaaattagtgcggaaagttgccggggaaaaaatcacggtcactttcaacattaacaacagcatcccaccaacatttgatggtgaggaggaaccctcgcaagggcagaaggttgaagaacaggagcctgaactgacatcaactcccaatttcgtggttgaagttataaagaatgatgatggcaagaaggcccttgtgttggactgtcattatccagaggatgaggttggacaagaagacgaggctgagagtgacatcttctctatcagggaagttagctttcagtccactggcgagtctgaatggaaggatactaattatacactcaacacagattccttggactgggccttatatgaccacctaatggatttccttgccgaccgaggggtggacaacacttttgcagatgagctggtggagctcagcacagccctggagcaccaggagtacattacttttcttgaagacctcaagagttttgtcaagagccagtagagcagacagatgctgaaagccatagtttcatggcaggctttggccagtgaacaaatcctactctgaagctagacatgtgctttgaaatgattatcatcctaatatcatgggggaaaaaataccaaatttaaattatatgttttgtgttctcatttattatcatttttttctgtacaaatctattatttctagatttttgtataacatgatagacataaaattggtttatctcctccaa

SEQ ID NO: 365237 - DNA, 1320 bp, Homo sapiens
gccggcgcgggaagcgcttcggggcaggggcggggcttccggcggcgcctcaggtcgcggggcgcctaggcctgggttgtcctttgcatctgcacgtgttcgcagtcgtttccgcgatgctgcctctgctgcgctgcgtgccccgtgtgctgggctcctccgtcgccggcctccgcgctgccgcgcccgcctcgcctttccggcagctcctgcagccggcaccccggctgtgcacccggcccttcgggctgctcagcgtgcgcgcaggttccgagcggcggccgggcctcctgcggcctcgcggaccctgcgcctgtggctgtggctgcggctcgctgcacaccgacggagacaaagcttttgttgatttcctgagtgatgaaattaaggaggaaagaaaaattcagaagcataaaaccctccctaagatgtctggaggttgggagctggaactgaatgggacagaagcgaaattagtgcggaaagttgccggggaaaaagtcttgctgtgtctccaggctggagagcagtggcgtgatctcggctcactgcaacctccacctcccaggttcaagcaattctcctgcctcagcctcctgagtagctgggattacagaatcacggtcactttcaacattaacaacagcatcccaccaacatttgatggtgaggaggaaccctcgcaagggcagaaggttgaagaacaggagcctgaactgacatcaactcccaatttcgtggttgaagttataaagaatgatgatggcaagaaggcccttgtgttggactgtcattatccagaggatgaggttggacaagaagacgaggctgagagtgacatcttctctatcagggaagttagctttcagtccactggcgagtctgaatggaaggatactaattatacactcaacacagattccttggactgggccttatatgaccacctaatggatttccttgccgaccgaggggtggacaacacttttgcagatgagctggtggagctcagcacagccctggagcaccaggagtacattacttttcttgaagacctcaagagttttgtcaagagccagtagagcagacagatgctgaaagccatagtttcatggcaggctttggccagtgaacaaatcctactctgaagctagacatgtgctttgaaatgattatcatcctaatatcatgggggaaaaaataccaaatttaaattatatgttttgtgttctcatttattatcatttttttctgtacaaatctattatttctagatttttgtataacatgatagacataaaattggtttatctcctccaa

SEQ ID NO: 365238 - DNA, 1252 bp, Homo sapiens
ctgcctaacccaaggttgtgaagatgtatgccttaattttttcaaagttttctagttttagctcttagtttaggtctgtgattcattttgaatatggtgtgaagtagggtcctgattctcttgcctgttgcatagtgtgtttttgccctacacaggtcaattgtgtcttctgtaatctcacctaaacaccatttgcgcaaggttttcatagctatttgggggccattaaaaataatgctctgatgaacgtcattcaatttctgtgcccaggagctcagcttagtcagcacagttggaattagacagattttgtcaacctcagactgcctctgttgccatggaaaggtggcttcctggcagagcagctagttagcacaagtggagggcggcacttcatgtactctttttttttttttttttttttctgacagagtcttgctgtgtctccaggctggagagcagtggcgtgatctcggctcactgcaacctccacctcccaggttcaagcaattctcctgcctcagcctcctgagtagctgggattacagaatcacggtcactttcaacattaacaacagcatcccaccaacatttgatggtgaggaggaaccctcgcaagggcagaaggttgaagaacaggagcctgaactgacatcaactcccaatttcgtggttgaagttataaagaatgatgatggcaagaaggcccttgtgttggactgtcattatccagaggatgaggttggacaagaagacgaggctgagagtgacatcttctctatcagggaagttagctttcagtccactggcgagtctgaatggaaggatactaattatacactcaacacagattccttggactgggccttatatgaccacctaatggatttccttgccgaccgaggggtggacaacacttttgcagatgagctggtggagctcagcacagccctggagcaccaggagtacattacttttcttgaagacctcaagagttttgtcaagagccagtagagcagacagatgctgaaagccatagtttcatggcaggctttggccagtgaacaaatcctactctgaagctagacatgtgctttgaaatgattatcatcctaatatcatgggggaaaaaataccaaatttaaattatatgttttgtgttctcatttattatcatttttttctgtacaaatctattatttctagatttttgtataacatgatagacataaaattggtttatctcctccaa

SEQ ID NO: 365239 - DNA, 5561 bp, Homo sapiens
acatgccggaggaggcgggcttcccgccggccaagagattccggccaggctctggacctccgagccgcgctgggtccttccctcccgggaggcaagtggtgatgctgctgactgcgggcagcggcggcagaggaggaggaggaggccggaggcagcagccgcccctggcccagccctcggccagtccctaccctgaagctgtggagctgcagcgccggagtctgcccatcttccaagcgcgggggcaactgttggcccagctccgaaacctggacaacgcggtcctcatcggttggctatacagtgcgctttgatgatgtcacctcagaagacaccaggatcaagtttctgacagatggcatgcttctgcgtgaagcaatttcagactctttgcttcggaaatacagctgtgtcattttggatgaagctcacgaacggactatccacacagatgtgctctttggagtggtgaaagctgcacagaagaggagaaaggaactcgggaaacttcctctgaaagtgattgtgatgtcagctacgatggatgtggacctgttctctcagtatttcaatggcgcccccgtcctctacctagagggtcggcagcatccgatccaggtgttttacaccaaacagcctcagaatgattacctgcacgccgcgcttgtctccgtcttccagatccaccaggaagccccttcttcacaggacatcctggtgttcctcactgggcaggaggagatcgaagccatgagcaagacgtgccgagacattgcaaagcacctcccagacggctgccctgcgatgctggtccttcctctgtacgcctccctgccctatgcacagcagctccgagtcttccaaggggccccaaagggctatcgcaaagtgatcatttcaaccaacatcgctgaaacctccataaccattacaggaataaaatatgtagttgacacgggcatggttaaagcaaagaagtataaccctgacagtggtcttgaggtgttagcagtgcagcgggtatcgaagacgcaggcttggcagcgcacagggagggctggcagagaggacagtggcatctgctaccggctctacacggaggacgagtttgagaagtttgataagatgaccgtgccagagatccagaggtgtaacctggccagtgtgatgcttcagcttctagcaatgaaagtcccaaatgtgctcacctttgacttcatgtcgaagccatctccagatcacattcaggcggccattgcccaactggacctgttaggtgctcttgaacataaggatgaccagcttaccctgactccaatgggaagaaagatggcagcatttcctttagaacccaaatttgccaaaaccatcctcatgtcccccaaattccactgtacagaggagatcctgaccattgtctccctgctgtctgtggacagcgtcctccacaaccctccttcccggcgagaggaagtgcaaggggtccgcaagaagttcatatccagcgagggggatcacatgaccctgctcaatatctatcggaccttcaaaaacctaggcggaaataaggattggtgcaaagagaattttgtcaacagcaagaatatgacgctggtagcagaagtcagagcacagctgagggacatctgcttaaagatgtcaatgccaatcgcatcatcccgaggagacgtggagagtgtccgccgctgcctggctcacagcctcttcatgagcaccgccgagcttcagccagatggcacctatgccaccacggacacccaccagccagtggccatccacccgtcgtctgtcctcttccactgcaagccggcctgcgtcgtgtacactgagctgctctacaccaacaagtgctacatgcgggacctctgcgtcatagatgcacagtggctgtacgaggctgcccctgagtactttaggaggaagctgagaaccgccagaaactgagccgccccaggatgccgccagaatcactggtccctgggagcttggactacagttgtccttacagcaggcttccaggttggcgcttagagaagccttggaatcagctgaaggtgcctgacttccaggagcgtgaaagcatctttgctcaactcctgggactgaaccatatagacatggacatatcatttgtacctggaaacctcaaaattatgcttttggttcttactgggtgactttgacttaatttaacacctgagcctcagttttctcatctgccaaatgggagtaataataataatccttataaaattgggttcataaagtttagagaaaaggaatggaaagtacccagaactatgcctggagcacgcacgacacacgtacagtgagttgggagccgttaggctgaatgttactgcttgccatatgatgtgaagtacagcaatatcccaagttcttgtgactgagggagattttctggaagggccacaggaggttgcggagcttggatgttgcccttagttcttgtttaatgtctctctgaatgcagttttaaaatagaaaacaaaactgacttctgtagaagtttccagagggaggtgctgttatctcgtacctcctgggatggcgatccctactgaacgcttgtgtctcagggtggaccactctgtgtctgtctccaagcagagaccagtaaaggagcctcctggtcctcagtgcgtgaccctgtcagtgctttcaggagacatgtaagcttcctgggtgaaggttgatttgtaccttctgaatcctgtcacgtgtagacatgggaaactgacctatcagtgttttgtgtgtgtaggtgactcccacatacacagttgccatttttctctctaactgggcaccagtgaacatgcgggcatgaggagtgactgtgtaccatttcagctgtttcttttcgggcagtcccctggtcagagggggtgggggtgggggaggggagaggggtacctagaacccagagaacattggcttatgccagataccacaccacatctgggcttacattcttgtatcttttttggtgtgtgggcggggggggtggggggcagttcagtgaagtctagaagacctgctggacaaattctaaaagagctagagctgtaacacttattcttgcatcttattaattttctatgatattttttccttcttcgtagggacttgggacaatctggctttgctgctttctaactgctaggcacctctctctaaccctcattgtcagagggaattggaggatatccacagtctgttcctgttctgatattctgagcagagaaaaggcactaacggttcctcttagctatttaattatcagaagcaagtaatctttccccagataatattttgccctagaagaagccgtgatttagctcttttattgtgcttacttggtccaaatacatctgtggggtgttttgtcatttcttaatgaatgaatcatagttataaccaggggccaagctgcccaagaggctcttcagagatcatggatgctctctttctggaagctgtggcctgatggagcagccccattccagggtcccatctgtccggagttgtgtatgtcaagtccggctcagtctttatttccaacactagccgtggtcctgtgcagtcaagctctcagctagtgtttagggctgtctgtcagaaatggttatacgtgggcaaaagaagatctgacagctcctatataccttatcttactgaattcttaaactttgaaccagttcttccacttactgacttgttaccactgctgactttctgaaaagttttccagtttttgttttttgttttttgttttccagtaggggattagaatgtttagtcctacttagtaagaaaaatattgtatttttaatcattcatagtgctggtaaaaaaaaaaaaaaaaaaaaaaaaattgggggggtggccgggcgcaggggcttcacacctgtaattcccagcactttgggaggccaagggggggggatcacctcatgcctgtaatcccagctttgggatgggaggctgaggtgggtggattgcttgaaaagttcaagaccagcctggccaacatggcaaaaccccgtctctactaaaaatagaaaacttagctgggcatggtggcacacgcctgtaatcccagctaccggggaggctgaggcacaagaattgcttgaacttgggaggcagagtttgtagtgagccaagatcacgccactgcattccagcctggccgacagtgtgagacggtctcagaaaaaaaaagaaagaaagaaagaaaaagaaaaaacttggggtaatttatgtccagcttaagtacctgaacagtttccggaaatgtatattttttttctgagaggcaaaggatgtaaacagcttctaagtagccttaatgtttctgtacagaaataagtttatccctgtaacattgtggtagagttttaatacagtatttagttttttattgggcttttttaaaaagttaacttttaacatagctgctcagggattaaatcagattggaaaacccattctgactccacatactgctacaaagaaatacatcgttgtttatattgagctgcaggagatagtacactttaaacttaagaaagttaaatgtttcacaataacattgcaatataatcttcagctactctctttccattggtaaaatctctgatggtgtgataactctttgccaacctacgaaacccatatctggaagaatcaccagctcccgtgagcagcttcatgtaaatagatgcactccaagcagattgcatgcctcaggtgtttgtcttctagtaatcatggagtgtgcaacacccagagtaacactacaaggggcaggactgcaaacagcaggtcctggctaaaaacccttaatgctgcattgctgccagttgtaaagagatgcctgaatggaggcaagttctgccctgtgggtgaaactgatgatgtactgtactgtcatatataaatccactaaatccagctaccgaaccctggaactgtggccatgcatttttttttttctttaaagaccagtgtgatagtaggccatgcatctgagatacgatattccttggtaactagagggagaaaaaaaaatcaagtaggttcaggcttatgttgtattttgagagtctggttttatttgaacagaaataactctacagaaagctcttgtaaataatgctcaaatttgcacccgacgatcaaatccattaaaaatgaatcttgtaaaaaaaaagtgtgtggcttgtttcttgcatctcttttccattattcatagaaaattatttagaaaatattaagtgttagtcttaccatgagttagtaagacataccttcttagtagcttatatgtcctgtatatcctgggaaggtaggattgttgatttttaataaatctgaaccctgtctttgggttatattaatttactggagaaactcacagaactcagggaaacacatttaccggtttcatacaaaagatatgaccaaggatacagataaggagatgagcagggtggggaatggggaagaagctc

SEQ ID NO: 365240 - DNA, 696 bp, Homo sapiens
gccatcagacactctgaacagagatccttgatccagccatccatctccttccagcagcagcatgtattgacttcttgtttccccagcctgaactgacatcaactcccaatttcgtggttgaagttataaagaatgatgatggcaagaaggcccttgtgttggactgtcattatccagaggatgaggttggacaagaagacgaggctgagagtgacatcttctctatcagggaagttagctttcagtccactggcgagtctgaatggaaggatactaattatacactcaacacagattccttggactgggccttatatgaccacctaatggatttccttgccgaccgaggggtggacaacacttttgcagatgagctggtggagctcagcacagccctggagcaccaggagtacattacttttcttgaagacctcaagagttttgtcaagagccagtagagcagacagatgctgaaagccatagtttcatggcaggctttggccagtgaacaaatcctactctgaagctagacatgtgctttgaaatgattatcatcctaatatcatgggggaaaaaataccaaatttaaattatatgttttgtgttctcatttattatcatttttttctgtacaaatctattatttctagatttttgtataacatgatagacataaaattggtttatctcctccaa

SEQ ID NO: 365241 - DNA, 1104 bp, Homo sapiens
gccggcgcgggaagcgcttcggggcaggggcggggcttccggcggcgcctcaggtcgcggggcgcctaggcctgggttgtcctttgcatctgcacgtgttcgcagtcgtttccgcgatgctgcctctgctgcgctgcgtgccccgtgtgctgggctcctccgtcgccggcctccgcgctgccgcgcccgcctcgcctttccggcagctcctgcagccggcaccccggctgtgcacccggcccttcgggctgctcagcgtgcgcgcaggttccgagcggcggccgggcctcctgcggcctcgcggaccctgcgcctgtggctgtggctgcggctcgctgcacaccgacggagacaaagcttttgttgatttcctgagtgatgaaattaaggaggaaagaaaaattcagaagcataaaaccctccctaagatgtctggaggttgggagctggaactgaatgggacagaagcgaaattagtgcggaaagttgccggggaaaaaatcacggtcactttcaacattaacaacagcatcccaccaacatttgatggtgaggaggaaccctcgcaagggcagaaggttgaagaacaggaggttggacaagaagacgaggctgagagtgacatcttctctatcagggaagttagctttcagtccactggcgagtctgaatggaaggatactaattatacactcaacacagattccttggactgggccttatatgaccacctaatggatttccttgccgaccgaggggtggacaacacttttgcagatgagctggtggagctcagcacagccctggagcaccaggagtacattacttttcttgaagacctcaagagttttgtcaagagccagtagagcagacagatgctgaaagccatagtttcatggcaggctttggccagtgaacaaatcctactctgaagctagacatgtgctttgaaatgattatcatcctaatatcatgggggaaaaaataccaaatttaaattatatgttttgtgttctcatttattatcatttttttctgtacaaatctattatttctagatttttgtataacatgatagacataaaattggtttatctcctccaa

SEQ ID NO: 365242 - DNA, 4557 bp, Homo sapiens
acatgccggaggaggcgggcttcccgccggccaagagattccggccaggctctggacctccgagccgcgctgggtccttccctcccgggaggcaagtggtgatgctgctgactgcgggcagcggcggcagaggaggaggaggaggccggaggcagcagccgcccctggcccagccctcggccagtccctaccctgaagctgtggagctgcagcgccggagtctgcccatcttccaagcgcgggggcaactgttggcccagctccgaaacctggacaacgcggtcctcatcggttggctatacagtgcgctttgatgatgtcacctcagaagacaccaggatcaagtttctgacagatggcatgcttctgcgtgaagcaatttcagactctttgcttcggaaatacagctgtgtcattttggatgaagctcacgaacggactatccacacagatgtgctctttggagtggtgaaagctgcacagaagaggagaaaggaactcgggaaacttcctctgaaagtgattgtgatgtcagctacgatggatgtggacctgttctctcagtatttcaatggcgcccccgtcctctacctagagggtcggcagcatccgatccaggtgttttacaccaaacagcctcagaatgattacctgcacgccgcgcttgtctccgtcttccagatccaccaggaagccccttcttcacaggacatcctggtgttcctcactgggcaggaggagatcgaagccatgagcaagacgtgccgagacattgcaaagcacctcccagacggctgccctgcgatgctggtccttcctctgtacgcctccctgccctatgcacagcagctccgagtcttccaaggggccccaaagggctatcgcaaagtgatcatttcaaccaacatcgctgaaacctccataaccattacaggaataaaatatgtagttgacacgggcatggttaaagcaaagaagtataaccctgacagtggtcttgaggtgttagcagtgcagcgggtatcgaagacgcaggcttggcagcgcacagggagggctggcagagaggacagtggcatctgctaccggctctacacggaggacgagtttgagaagtttgataagatgaccgtgccagagatccagaggtgtaacctggccagtgtgatgcttcagcttctagcaatgaaagtcccaaatgtgctcacctttgacttcatgtcgaagccatctccagatcacattcaggcggccattgcccaactggacctgttaggtgctcttgaacataaggatgaccagcttaccctgactccaatgggaagaaagatggcagcatttcctttagaacccaaatttgccaaaaccatcctcatgtcccccaaattccactgtacagaggagatcctgaccattgtctccctgctgtctgtggacagcgtcctccacaaccctccttcccggcgagaggaagtgcaaggggtccgcaagaagttcatatccagcgagggggatcacatgaccctgctcaatatctatcggaccttcaaaaacctaggcggaaataaggattggtgcaaagagaattttgtcaacagcaagaatatgacgctggtagcagaagtcagagcacagctgagggacatctgcttaaagatgtcaatgccaatcgcatcatcccgaggagacgtggagagtgtccgccgctgcctggctcacagcctcttcatgagcaccgccgagcttcagccagatggcacctatgccaccacggacacccaccagccagtggccatccacccgtcgtctgtcctcttccactgcaagccggcctgcgtcgtgtacactgagctgctctacaccaacaagtgctacatgcgggacctctgcgtcatagatgcacagtggctgtacgaggctgcccctgagtactttaggaggaagctgagaaccgccagaaactgagccgccccaggatgccgccagaatcactggtccctgggagcttggactacagttgtccttacagcaggcttccaggttggcgcttagagaagccttggaatcagctgaaggtgcctgacttccaggagcgtgaaagcatctttgctcaactcctgggactgaaccatatagacatggacatatcatttgtacctggaaacctcaaaattatgcttttggttcttactgggtgactttgacttaatttaacacctgagcctcagttttctcatctgccaaatgggagtaataataataatccttataaaattgggttcataaagtttagagaaaaggaatggaaagtacccagaactatgcctggagcacgcacgacacacgtacagtgagttgggagccgttaggctgaatgttactgcttgccatatgatgtgaagtacagcaatatcccaagttcttgtgactgagggagattttctggaagggccacaggaggttgcggagcttggatgttgcccttagttcttgtttaatgtctctctgaatgcagttttaaaatagaaaacaaaactgacttctgtagaagtttccagagggaggtgctgttatctcgtacctcctgggatggcgatccctactgaacgcttgtgtctcagggtggaccactctgtgtctgtctccaagcagagaccagtaaaggagcctcctggtcctcagtgcgtgaccctgtcagtgctttcaggagacatgtaagcttcctgggtgaaggttgatttgtaccttctgaatcctgtcacgtgtagacatgggaaactgacctatcagtgttttgtgtgtgtaggtgactcccacatacacagttgccatttttctctctaactgggcaccagtgaacatgcgggcatgaggagtgactgtgtaccatttcagctgtttcttttcgggcagtcccctggtcagagggggtgggggtgggggaggggagaggggtacctagaacccagagaacattggcttatgccagataccacaccacatctgggcttacattcttgtatcttttttggtgtgtgggcggggggggtggggggcagttcagtgaagtctagaagacctgctggacaaattctaaaagagctagagctgtaacacttattcttgcatcttattaattttctatgatattttttccttcttcgtagggacttgggacaatctggctttgctgctttctaactgctaggcacctctctctaaccctcattgtcagagggaattggaggatatccacagtctgttcctgttctgatattctgagcagagaaaaggcactaacggttcctcttagctatttaattatcagaagcaagtaatctttccccagataatattttgccctagaagaagccgtgatttagctcttttattgtgcttacttggtccaaatacatctgtggggtgttttgtcatttcttaatgaatgaatcatagttataaccaggggccaagctgcccaagaggctcttcagagatcatggatgctctctttctggaagctgtggcctgatggagcagccccattccagggtcccatctgtccggagttgtgtatgtcaagtccggctcagtctttatttccaacactagccgtggtcctgtgcagtcaagctctcagctagtgtttagggctgtctgtcagaaatggttatacgtgggcaaaagaagatctgacagctcctatataccttatcttactgaattcttaaactttgaaccagttcttccacttactgacttgttaccactgctgactttctgaaaagttttccagtttttgttttttgttttttgttttccagtaggggattagaatgtttagtcctacttagtaagaaaaatattgtatttttaatcattcatagtgctggtaaaaaaaaaaaaaaaaaaaaaaaaattgggggggtggccgggcgcaggggcttcacacctgtaattcccagcactttgggaggccaagggggggggatcacctcatgcctgtaatcccagctttgggatgggaggctgaggtgggtggattgcttgaaaagttcaagaaccaggtcctgggcaacaggggaaaacccgggttctattaaaattagacaattagctggggctggggggaacacgcttggtaatcccagttaccgggagcggtggcggcaagatttgctcgacttggggagggctaagttggttgtggaggcccaaggattatgcgcatgtggtttcacaggtgggcgacaatgttgaaaagggtctcgaaaaaacatggtagcgaagtagaaggaaaaggaacacacagtgtgggggcatattatcttccggttatactacttagaaggtccgggaaaggatattttttgtcttggagagcgaaaggggtttaaagtgcttctagagtagctttagggtgtcgtgccgacaaaatggttctccgtgacaaggggcggacgctaataacgatatggttgctagtggtggtttaaagagagttaaaaggccggggagacatagtgaaacgcgtctctttgtcgaaaacagattgtt

SEQ ID NO: 365243 - DNA, 2078 bp, Homo sapiens
acattcgactcggacccccaccacctgagtcctggaagctgtggcctgatggagcagccccattccagggtcccatctgtccggagttgtgtatgtcaagtccggctcagtctttatttccaacactagccgtggtcctgtgcagtcaagctctcagctagtgtttagggctgtctgtcagaaatggttatacgtgggcaaaagaagatctgacagctcctatataccttatcttactgaattcttaaactttgaaccagttcttccacttactgacttgttaccactgctgactttctgaaaagttttccagtttttgttttttgttttttgttttccagtaggggattagaatgtttagtcctacttagtaagaaaaatattgtatttttaatcattcatagtgctggtaaaaaaaaaaaaaaaaaaaaaaaaattgggggggtggccgggcgcaggggcttcacacctgtaattcccagcactttgggaggccaagggggggggatcacctcatgcctgtaatcccagctttgggatgggaggctgaggtgggtggattgcttgaaaagttcaagaccagcctggccaacatggcaaaaccccgtctctactaaaaatagaaaacttagctgggcatggtggcacacgcctgtaatcccagctaccggggaggctgaggcacaagaattgcttgaacttgggaggcagagtttgtagtgagccaagatcacgccactgcattccagcctggccgacagtgtgagacggtctcagaaaaaaaaagaaagaaagaaagaaaaagaaaaaacttggggtaatttatgtccagcttaagtacctgaacagtttccggaaatgtatattttttttctgagaggcaaaggatgtaaacagcttctaagtagccttaatgtttctgtacagaaataagtttatccctgtaacattgtggtagagttttaatacagtatttagttttttattgggcttttttaaaaagttaacttttaacatagctgctcagggattaaatcagattggaaaacccattctgactccacatactgctacaaagaaatacatcgttgtttatattgagctgcaggagatagtacactttaaacttaagaaagttaaatgtttcacaataacattgcaatataatcttcagctactctctttccattggtaaaatctctgatggtgtgataactctttgccaacctacgaaacccatatctggaagaatcaccagctcccgtgagcagcttcatgtaaatagatgcactccaagcagattgcatgcctcaggtgtttgtcttctagtaatcatggagtgtgcaacacccagagtaacactacaaggggcaggactgcaaacagcaggtcctggctaaaaacccttaatgctgcattgctgccagttgtaaagagatgcctgaatggaggcaagttctgccctgtgggtgaaactgatgatgtactgtactgtcatatataaatccactaaatccagctaccgaaccctggaactgtggccatgcatttttttttttctttaaagaccagtgtgatagtaggccatgcatctgagatacgatattccttggtaactagagggagaaaaaaaaatcaagtaggttcaggcttatgttgtattttgagagtctggttttatttgaacagaaataactctacagaaagctcttgtaaataatgctcaaatttgcacccgacgatcaaatccattaaaaatgaatcttgtaaaaaaaaagtgtgtggcttgtttcttgcatctcttttccattattcatagaaaattatttagaaaatattaagtgttagtcttaccatgagttagtaagacataccttcttagtagcttatatgtcctgtatatcctgggaaggtaggattgttgatttttaataaatctgaaccctgtctttgggttatattaatttactggagaaactcacagaactcagggaaacacatttaccggtttcatacaaaagatatgaccaaggatacagataaggagatgagcagggtggggaatggggaagaagctc

SEQ ID NO: 365244 - DNA, 1527 bp, Homo sapiens
gccggcgcgggaagcgcttcggggcaggggcggggcttccggcggcgcctcaggtcgcggggcgcctaggcctgggttgtcctttgcatctgcacgtgttcgcagtcgtttccgcgatgctgcctctgctgcgctgcgtgccccgtgtgctgggctcctccgtcgccggcctccgcgctgccgcgcccgcctcgcctttccggcagctcctgcagccggcaccccggctgtgcacccggcccttcgggctgctcagcgtgcgcgcaggttccgagcggcggccgggcctcctgcggcctcgcggaccctgcgcctgtggctgtggctgcggctcgctgcacaccgacggagacaaagcttttgttgatttcctgagtgatgaaattaaggaggaaagaaaaattcagaagcataaaaccctccctaagatgtctggaggttgggagctggaactgaatgggacagaagcgaaattagtgcggaaagttgccggggaaaaaatcacggtcactttcaacattaacaacagcatcccaccaacatttgatggtgaggaggaaccctcgcaagggcagaaggttgaagaacaggagcctgaactgacatcaactcccaatttcgtggttgaagttataaagaatgatgatggcaagaaggcccttgtgttggactgtcattatccagaggatgagtggacaagaagacgaggcgtgaagccgagaaagcaagtgtgtacgaagcgcgcacaccagaggaagaatcgaaccgtggttcaaccggcgaaacccctaaacacctcaacgaattaacgttggttcaaagaatgtgcacttgtgaaagaagtgctgatgtgccagaaaccagaaagggaacacacagtttgtgagcggcattgggaaggccagcttcaccaccttcactgtgaacgaaaatacgtggtttaaccgctgtgctgatctgcccatcattgtgggcatcccgaagtgggcacctcaactcgtggggcgccattttaacttttcggcgcattctcctcttcttattcactgtgcaacgatctcgtggcgacagtgtgtacgcaagtgcatttaaacgaagccttcccgtgaaatgaggaaaatttcaaggtgacactcagccgaatgctcatatcccatcataacgttacacagcaccagttacgtggtgaaacccaagttactttggaagagccttgatgagaggaaaaaaagttattcacagacaaagcgctcccggccaattcacactttgccaggcaacaggcaacgttataacactgcaccaatttctcaaggcgaattggaaaggatgataacgcgtggaagttacagtagaattcccgtttcaaacatctacacccgtggttggcccaaaattccaaaggttcccaaagctttgcttaatgtaccagggcacaccacaatgaaatggacatttgggaacttatctcctggccgttcgaacaattacacagcgtaccactttttcgtcaaggtcgcgacatta

SEQ ID NO: 365245 - DNA, 680 bp, Homo sapiens
  misc_feature (641)..(641): n is a, c, g, or t
gccggcgcgggaagcgcttcggggcaggggcggggcttccggcggcgcctcaggtcgcggggcgcctaggcctgggttgtcctttgcatctgcacgtgttcgcagtcgtttccgcgatgctgcctctgctgcgctgcgtgccccgtgtgctgggctcctccgtcgccggcctccgcgctgccgcgcccgcctcgcctttccggcagctcctgcagccggcaccccggctgtgcacccggcccttcgggctgctcagcgtgcgcgcaggttccgagcggcggccgggcctcctgcggcctcgcggaccctgcgcctgtggctgtggctgcggctcgctgcacaccgacggagacaaagcttttgttgatttcctgagtgatgaaattaaggaggaaagaaaaattcagaagcataaaaccctccctaagatgtctggaggttgggagctggaactgaatgggacagaagcgaaattagtgcggaaagttgccggggaaaagaggaaccctcgcaagggcagaaggttgaagaacaggagcctgaactgacatcaactcccaatttcgtggttgaagttataaagaatgatgatggcaagaaggcccttgtgttggactgtcattatccagaggatgagtggncaagaagacgactgcttggattacaaggaggggatcctc

SEQ ID NO: 365246 - DNA, 923 bp, Homo sapiens
gccggcgcgggaagcgcttcggggcaggggcggggcttccggcggcgcctcaggtcgcggggcgcctaggcctgggttgtcctttgcatctgtcagcacagccctggagcaccaggagtacattacttttcttgaagacctcaagagttttgtcaagagccagtagagcagacagatgctgaaagccatagtttcatggcaggctttggccagtgaacaaatcctactctgaagctagacatgtgctttgaaatgattatcatcctaatatcatgggggaaaaaataccaaatttaaattatatgttttgtgttctcatttattatcatttttttctgtacaaatctattatttctagatttttgtataacatgatagacataaaattggtttatctcctccaaaaaaaaaaaaaaggagaaaaacaacactccgggtgtttttttgttttatattcgttgttttattagaaatttccgcccaaagaactatcttttgtggggagaagccacaggtctggcagcgccttgtttttggtgcgcaagacgcttgtgggggccctctgatatatcccccaaagaaggggaggcgagcgttttttgcccccactgggcggtgggggggcctctttattgcacatcttgcgggcaggggggaccacttctgggaggacgagggaaagacggcgcccctctttttatagaaggccccggtgctttgttttcacggcgcttttggtgtccacacacacagtagaaaagctgctggttgctccggcccctctttttgcggcgggggcacaccatgggcgggcggcggcgtacgtgcggccggccccaaggtgtccacggggttatgctacgtgttctgcccccccgtcttttggtggggggccaccattcttcccgcggagcgacgaatgg

SEQ ID NO: 365247 - DNA, 288 bp, Homo sapiens
aatcacttttccagaatcaggctcagcttcctactactattatggtatttttaccgataaggaaacaggcttctagagtaaccgtaatagcagagagattagaaacagtccaggtttctggctgcaataacctgggtaatagttttatgttttagactaactggctttcctttttatgtatctggatttcttttctaggagacaaagcttttgttgatttcctgagtgatgaaattaaggaggaaagaaaaattcagaagcataaaaccctccctaagatgtctggag

SEQ ID NO: 365248 - DNA, 893 bp, Homo sapiens
gcagcagcatgtattgacttcttgtttccccagcctgaactgacatcaactcccaatttcgtggttgaagttataaagaatgatgatggcaagaaggcccttgtgttggactgtcattatccagaggatgaggtatgcaggatggagtgctagcctcttggcacccctggggaacagtgtgtcccttgggaacttcctgtccctattttagcagaaatttaaacacttttctagcttagaccagcccagcagggggagagaggtggggagtgagggaagagggttaaaacctgatgagtttcatgctgtcagtggccccctttcttcccctgagtctagcttgtcctggagaacccttcagtttcccaatattgtttcttctcaggttggacaagaagacgaggctgagagtgacatcttctctatcagggaagttagctttcagtccactggcgagtctgaatggaaggatactaattatacactcaacacagattccttggactgggtgagtgcttgataaggtgggggaaccttttgggccttggaaggaagggtcctagttcaaggggagaaaaaagcattttaatgttcattacagatttttttttaactagtaaatattgttctttgcaggccttatatgaccacctaatggatttccttgccgaccgaggggtggacaacacttttgcagatgagctggtggagctcagcacagccctggagcaccaggagtacattacttttcttgaagacctcaagagttttgtcaagagccagtagagcagacagatgctgaaagccatagtttcatggcaggctttggccagtgaacaaatcctactctgaagctagacatgtgctttgaaatgattatcatcctaatatca

SEQ ID NO: 365249 - DNA, 570 bp, Homo sapiens
acgatggatgtggacctgttctctcagtatttcaatggcgcccccgtcctctacctagagggtcggcagcatccgatccaggtgttttacaccaaacagcctcagaatgattacctgcacgccgcgcttgtctccgtcttccagatccaccaggtatggtgctgggggcaaattcctgaaaagttctcttttatcttgcagttggtagtgagaacattgagccttgaaaagaaaagctactgaataaaacaactttgtgagttgtgtcatcaagatgaataaggaggccaggtgcggtggctcacgcctgtaatccctgcactttgggaggccgaggcaggtggatcacctgaggtcaggagttcaagaccagcctggccaacatggtgaaaccccatctctactaaaaatacaaaaattagccaggcatgatggcgggtgcctgtaatcccagctactcgggatgctgaggtgggagaatcgcctgaatccgggaggtggaagttgcaatgaggcgagattgcaccactgcactccagcctaggtgacagagggagactccgtctgaaa

SEQ ID NO: 365250 - DNA, 1353 bp, Homo sapiens
gccggcgcgggaagcgcttcggggcaggggcggggcttccggcggcgcctcaggtcgcggggcgcctaggcctgggttgtcctttgcatctgcacgtgttcgcagtcgtttccgcgatgctgcctctgctgcgctgcgtgccccgtgtgctgggctcctccgtcgccggcctccgcgctgccgcgcccgcctcgcctttccggcagctcctgcagccggcaccccggctgtgcacccggcccttcgggctgctcagcgtgcgcgcaggttccgagcggcggccgggcctcctgcggcctcgcggaccctgcgcctgtggctgtggctgcggctcgctgcacaccgacggagacaaagcttttgttgatttcctgagtgatgaaattaaggaggaaagaaaaattcagaagcataaaaccctccctaagatgtctggaggttgggagctggaactgaatgggacagaagcgaaattagtgcggaaagttgccggggaaaaaatcacggtcactttcaacattaacaacagcatcccaccaacatttgatggtgaggaggaaccctcgcaagggcagaaggttgaagaacaggagcctgaactgacatcaactcccaatttcgtggttgaagttataaagaatgatgatggcaagaaggcccttgtgttggactgtcattatccagaggatgaggttggacaagaagacgaggctgagagtgacatcttctctatcagggaagttagctttcagtccactggcgagtctgaatggaaggatactaattatacactcaacacagattccttggactgggccttatatgaccacctaatggatttccttgccgaccgaggggtggacaacacttttgcagatgagctggtggagctcagcacagccctggagcaccaggagtacattacttttcttgaagacctcaagagttttgtcaagagccagtagagcagacagatgctgaaagccatagtttcatggcaggctttggccagtgaacaaatcctactctgaagctagacatgtgctttgaaatgattatcatcctaatatcatgggggaaaaaataccaaatttaaattatatgttttgtgttctcatttattatcatttttttctgtacaaatctattatttctagatttttgtataacatgatagacataaaattggtttatctcctccaagctgagtcttcctagaagtacctgctgggttctcagttccagttcccatcctttgattgatcactctccctgacatccacctgtatgactttgtcaccaaatgctgtcttctctttctccaatcaagaaataataatccctcgagtttac

SEQ ID NO: 365251 - DNA, 513 bp, Homo sapiens
actcaacacagattcgccagtggactgaaagctaacttccctgataggaagttagctttcagtccactggcgagtctgaatggaaggatactaattatacactcaacacagattccttggactgggccttatatgaccacctaatggatttccttgccgaccgaggggtggacaacacttttgcagatgagctggtggagctcagcacagccctggagcaccaggagtacattacttttcttgaagacctcaagagttttgtcaagagccagtagagcagacagatgctgaaagccatagtttcatggcaggctttggccagtgaacaaatcctactctgaagctagacatgtgctttgaaatgattatcatcctaatatcatgggggaaaaaataccaaatttaaattatatgttttgtgttctcatttattatcatttttttctgtacaaatctattatttctagatttttgtataacatgatagacataaaattggtttatctcctccaa

SEQ ID NO: 365252 - DNA, 2288 bp, Homo sapiens
gttcctcactgggcaggaggaacaccaggatgtcctgtgaagaaggggcatcctggtgttcctcactgggcaggaggagatcgaagccatgagcaagacgtgccgagacattgcaaagcacctcccagacggctgccctgcgatgctggtccttcctctgtacgcctccctgccctatgcacagcagctccgagtcttccaaggggccccaaagggctatcgcaaagtgatcatttcaaccaacatcgctgaaacctccataaccattacaggaataaaatatgtagttgacacgggcatggttaaagcaaagaagtataaccctgacagtggtcttgaggtgttagcagtgcagcgggtatcgaagacgcaggcttggcagcgcacagggagggctggcagagaggacagtggcatctgctaccggctctacacggaggacgagtttgagaagtttgataagatgaccgtgccagagatccagaggtgtaacctggccagtgtgatgcttcagcttctagcaatgaaagtcccaaatgtgctcacctttgacttcatgtcgaagccatctccagatcacattcaggcggccattgcccaactggacctgttaggtgctcttgaacataaggatgaccagcttaccctgactccaatgggaagaaagatggcagcatttcctttagaacccaaatttgccaaaaccatcctcatgtcccccaaattccactgtacagaggagatcctgaccattgtctccctgctgtctgtggacagcgtcctccacaaccctccttcccggcgagaggaagtgcaaggggtccgcaagaagttcatatccagcgagggggatcacatgaccctgctcaatatctatcggaccttcaaaaacctaggcggaaataaggattggtgcaaagagaattttgtcaacagcaagaatatgacgctggtagcagaagtcagagcacagctgagggacatctgcttaaagatgtcaatgccaatcgcatcatcccgaggagacgtggagagtgtccgccgctgcctggctcacagcctcttcatgagcaccgccgagcttcagccagatggcacctatgccaccacggacacccaccagccagtggccatccacccgtcgtctgtcctcttccactgcaagccggcctgcgtcgtgtacactgagctgctctacaccaacaagtgctacatgcgggacctctgcgtcatagatgcacagtggctgtacgaggctgcccctgagtactttaggaggaagctgagaaccgccagaaactgagccgccccaggatgccgccagaatcactggtccctgggagcttggactacagttgtccttacagcaggcttccaggttggcgcttagagaagccttggaatcagctgaaggtgcctgacttccaggagcgtgaaagcatctttgctcaactcctgggactgaaccatatagacatggacatatcatttgtacctggaaacctcaaaattatgcttttggttcttactgggtgactttgacttaatttaacacctgagcctcagttttctcatctgccaaatgggagtaataataataatccttataaaattgggttcataaagtttagagaaaaggaatggaaagtacccagaactatgcctggagcacgcacgacacacgtacagtgagttgggagccgttaggctgaatgttactgcttgccatatgatgtgaagtacagcaatatcccaagttcttgtgactgagggagattttctggaagggccacaggaggttgcggagcttggatgttgcccttagttcttgtttaatgtctctctgaatgcagttttaaaatagaaaacaaaactgacttctgtagaagtttccagagggaggtgctgttatctcgtacctcctgggatggcgatccctactgaacgcttgtgtctcagggtggaccactctgtgtctgtctccaagcagagaccagtaaaggagcctcctggtcctcagtgcgtgaccctgtcagtgctttcaggagacatgtaagcttcctgggtgaaggttgatttgtaccttctgaatcctgtcacgtgtagacatgggaaactgacctatcagtgttttgtgtgtgtaggtgactcccacatacacagttgccatttttctctctaactgggcaccagtgaacatgcgggcatgaggagtgactgtgtaccatttcagctgtttcttttcgggcagtcccctgccctctccctgaaataaagaacagcttgac

SEQ ID NO: 365253 - DNA, 2838 bp, Homo sapiens
acatgccggaggaggcgggcttcccgccggccaagagattccggccaggctctggacctccgagccgcgctgggtccttccctcccgggaggcaagtggtgatgctgctgactgcgggcagcggcggcagaggaggaggaggaggccggaggcagcagccgcccctggcccagccctcggccagtccctaccctgaagctgtggagctgcagcgccggagtctgcccatcttccaagcgcgggggcaactgttggcccagctccgaaacctggacaacgcggtcctcatcggggaaactggctctgggaagacaactcagatccctcagtacctgtatgaaggagggatcagccgccagggcatcattgctgtgacccagcctcgtcgagtagctgccatctctcttgctactagagtctcagatgagaagagaactgaacttgggaagctggttggctatacagtgcgctttgatgatgtcacctcagaagacaccaggatcaagtttctgacagatggcatgcttctgcgtgaagcaatttcagactctttgcttcggaaatacagctgtgtcattttggatgaagctcacgaacggactatccacacagatgtgctctttggagtggtgaaagctgcacagaagaggagaaaggaactcgggaaacttcctctgaaagtgattgtgatgtcagctacgatggatgtggacctgttctctcagtatttcaatggcgcccccgtcctctacctagagggtcggcagcatccgatccaggtgttttacaccaaacagcctcagaatgattacctgcacgccgcgcttgtctccgtcttccagatccaccaggaagccccttcttcacaggacatcctggtgttcctcactgggcaggaggagatcgaagccatgagcaagacgtgccgagacattgcaaagcacctcccagacggctgccctgcgatgctggtccttcctctgtacgcctccctgccctatgcacagcagctccgagtcttccaaggggccccaaagggctatcgcaaagtgatcatttcaaccaacatcgctgaaacctccataaccattacaggaataaaatatgtagttgacacgggcatggttaaagcaaagaagtataaccctgacagtggtcttgaggtgttagcagtgcagcgggtatcgaagacgcaggcttggcagcgcacagggagggctggcagagaggacagtggcatctgctaccggctctacacggaggacgagtttgagaagtttgataagatgaccgtgccagagatccagaggtgtaacctggccagtgtgatgcttcagcttctagcaatgaaagtcccaaatgtgctcacctttgacttcatgtcgaagccatctccagatcacattcaggcggccattgcccaactggacctgttaggtgctcttgaacataaggatgaccagcttaccctgactccaatgggaagaaagatggcagcatttcctttagaacccaaatttgccaaaaccatcctcatgtcccccaaattccactgtacagaggagatcctgaccattgtctccctgctgtctgtggacagcgtcctccacaaccctccttcccggcgagaggaagtgcaaggggtccgcaagaagttcatatccagcgagggggatcacatgaccctgctcaatatctatcggaccttcaaaaacctaggcggaaataaggattggtgcaaagagaattttgtcaacagcaagaatatgacgctggtagcagaagtcagagcacagctgagggacatctgcttaaagatgtcaatgccaatcgcatcatcccgaggagacgtggagagtgtccgccgctgcctggctcacagcctcttcatgagcaccgccgagcttcagccagatggcacctatgccaccacggacacccaccagccagtggccatccacccgtcgtctgtcctcttccactgcaagccggcctgcgtcgtgtacactgagctgctctacaccaacaagtgctacatgcgggacctctgcgtcatagatgcacagtggctgtacgaggctgcccctgagtactttaggaggaagctgagaaccgccagaaactgagccgccccaggatgccgccagaatcactggtccctgggagcttggactacagttgtccttacagcaggcttccaggttggcgcttagagaagccttggaatcagctgaaggtgcctgacttccaggagcgtgaaagcatctttgctcaactcctgggactgaaccatatagacatggacatatcatttgtacctggaaacctcaaaattatgcttttggttcttactgggtgactttgacttaatttaacacctgagcctcagttttctcatctgccaaatgggagtaataataataatccttataaaattgggttcataaagtttagagaaaaggaatggaaagtacccagaactatgcctggagcacgcacgacacacgtacagtgagttgggagccgttaggctgaatgttactgcttgccatatgatgtgaagtacagcaatatcccaagttcttgtgactgagggagattttctggaagggccacaggaggttgcggagcttggatgttgcccttagttcttgtttaatgtctctctgaatgcagttttaaaatagaaaacaaaactgacttctgtagaagtttccagagggaggtgctgttatctcgtacctcctgggatggcgatccctactgaacgcttgtgtctcagggtggaccactctgtgtctgtctccaagcagagaccagtaaaggagcctcctggtc

SEQ ID NO: 365254 - DNA, 444 bp, Homo sapiens
aaggaatctgtgttgagtgtataattagtatccttccattcagattcctggactgggccttatatgaccacctaatggatttccttgccgaccgaggggtggacaacacttttgcagatgagctggtggagctcagcacagccctggagcaccaggagtacattacttttcttgaagacctcaagagttttgtcaagagccagtagagcagacagatgctgaaagccatagtttcatggcaggctttggccagtgaacaaatcctactctgaagctagacatgtgctttgaaatgattatcatcctaatatcatgggggaaaaaataccaaatttaaattatatgttttgtgttctcatttattatcatttttttctgtacaaatctattatttctagatttttgtataacatgatagacataaaattggtttatctcctccaa

SEQ ID NO: 365255 - DNA, 359 bp, Homo sapiens
  misc_feature (165)..(165): n is a, c, g, or t
ccgcaagccggcgagccttcttcgctgctgggcagtcgttctgtcagctaaacaaacgaaaaaagacaccaccacccacccccaatatttcaacacgaatctttttttctttccacccacaatttgggtgggcccccaaaggggaacttattttccggcaccccnaagtgaacaaatcctactctgaagctagacatgtgctttgaaatgattatcatcctaatatcatgggggaaaaaataccaaatttaaattatatgttttgtgttctcatttattatcatttttttctgtacaaatctattatttctagatttttgtataacatgatagacataaaattggtttatctcctccaa

SEQ ID NO: 365256 - DNA, 1803 bp, Homo sapiens
gccggcgcgggaagcgcttcggggcaggggcggggcttccggcggcgcctcaggtcgcggggcgcctaggcctgggttgtcctttgcatctgcacgtgttcgcagtcgtttccgcgatgctgcctctgctgcgctgcgtgccccgtgtgctgggctcctccgtcgccggcctccgcgctgccgcgcccgcctcgcctttccggcagctcctgcagccggcaccccggctgtgcacccggcccttcgggctgctcagcgtgcgcgcaggttccgagcggcggccgggcctcctgcggcctcgcggaccctgcgcctgtggctgtggctgcggctcgctgcacaccgacggagacaaagcttttgttgatttcctgagtgatgaaattaaggaggaaagaaaaattcagaagcataaaaccctccctaagatgtctggaggttgggagctggaactgaatgggacagaagcgaaattagtgcggaaagttgccggggaaaaaatcacggtcactttcaacattaacaacagcatcccaccaacatttgatggtgaggaggaaccctcgcaagggcagaaggttgaagaacaggagcctgaactgacatcaactcccaatttcgtggttgaagttataaagaatgatgatggcaagaaggcccttgtgttggactgtcattatccagaggatgaggttggacaagaagacgaggctgagagtgacatcttctctatcagggaagttagctttcagtccactggcgagtctgaatggaaggatactaattatacactcaacacagattccttggactgggccttatatgaccacctaatggatttccttgccgaccgaggggtggacaacacttttgcagatgagctggtggagctcagcacagccctggagcaccaggagtacattacttttcttgaagacctcaagagttttgtcaagagccagtagagcagacagatgctgaaagccatagtttcatggcaggctttggccagtgaacaaatcctactctgaagctagacatgtgctttgaaatgattatcatcctaatatcatgggggaaaaaataccaaatttaaattatatgttttgtgttctcatttattatcatttttttctgtacaaatctattatttctagatttttgtataacatgatagacataaaattggtttatctcctccaacaaggcagtttgtctttttctattcctcccccttcaacctgcgtcacaaaagaccaagaacagatgtcggaaaagtttttttttcttcagtattgtttaaaagtttcaatacaaaataagttataaataaaaggcttgtatgtacaaggctcctcagagggaatgagttgtcttcaaccccatagaatgatgtgagtccaagctggctctagaggatcacagcccaagtatcacaggccttggttgatcagctcctgttgaatttcctccagcacagccatgtctatcagctcctccaactgagccaagtcttctggacaattctccactgactgcaaagcattccactcttcttccatcacctcttgaactagaaagctgttctgagaattccctggcccactgcttccagcctggcggtacctgtttaggagcctgtcccggctgtttctcattctctccaggcatctctgccggaaagcctctttccaaggcggcgagcccaccagtttgtacagggagcggcgcggagacctcaacgactccgccatctcctcttcgcgggagacaaagccacaagacccgttccctggaggcgcg

SEQ ID NO: 365257 - DNA, 1353 bp, Homo sapiens
gccggcgcgggaagcgcttcggggcaggggcggggcttccggcggcgcctcaggtcgcggggcgcctaggcctgggttgtcctttgcatctgcacgtgttcgcagtcgtttccgcgatgctgcctctgctgcgctgcgtgccccgtgtgctgggctcctccgtcgccggcctccgcgctgccgcgcccgcctcgcctttccggcagctcctgcagccggcaccccggctgtgcacccggcccttcgggctgctcagcgtgcgcgcaggttccgagcggcggccgggcctcctgcggcctcgcggaccctgcgcctgtggctgtggctgcggctcgctgcacaccgacggagacaaagcttttgttgatttcctgagtgatgaaattaaggaggaaagaaaaattcagaagcataaaaccctccctaagatgtctggaggttgggagctggaactgaatgggacagaagcgaaattagtgcggaaagttgccggggaaaaaatcacggtcactttcaacattaacaacagcatcccaccaacatttgatggtgaggaggaaccctcgcaagggcagaaggttgaagaacaggagcctgaactgacatcaactcccaatttcgtggttgaagttataaagaatgatgatggcaagaaggcccttgtgttggactgtcattatccagaggatgaggttggacaagaagacgaggctgagagtgacatcttctctatcagggaagttagctttcagtccactggcgagtctgaatggaaggatactaattatacactcaacacagattccttggactgggccttatatgaccacctaatggatttccttgccgaccgaggggtggacaacacttttgcagatgagctggtggagctcagcacagccctggagcaccaggagtacattacttttcttgaagacctcaagagttttgtcaagagccagtagagcagacagatgctgaaagccatagtttcatggcaggctttggccagtgaacaaatcctactctgaagctagacatgtgctttgaaatgattatcatcctaatatcatgggggaaaaaataccaaatttaaattatatgttttgtgttctcatttattatcatttttttctgtacaaatctattatttctagatttttgtataacatgatagacataaaattggtttatctcctccaacaaggcagtttgtctttttctattcctcccccttcaacctgcgtcacaaaagaccaagaacagatgtcggaaaagtttttttttcttcagtattgtttaaaagtttcaatacaaaataagttataaataaaaggcttgtatgtacaaggc

SEQ ID NO: 365258 - DNA, 1198 bp, Homo sapiens
gaggattacgaggcagttcccggttttaatttcgttaccgggcctggcgtacgttgacttagtggctcggttgttgcttcatcatgtcacgtgttcgcagtcgtttccgcgatgctgcctctgctgcgctgcgtgccccgtgtgctgggctcctccgtcgccggcctccgcgctgccgcgcccgcctcgcctttccggcagctcctgcagccggcaccccggctgtgcacccggcccttcgggctgctcagcgtgcgcgcaggttccgagcggcggccgggcctcctgcggcctcgcggaccctgcgcctgtggctgtggctgcggctcgctgcacaccgacggagacaaagcttttgttgatttcctgagtgatgaaattaaggaggaaagaaaaattcagaagcataaaaccctccctaagatgtctggaggttgggagctggaactgaatgggacagaagcgaaattagtgcggaaagttgccggggaaaaaatcacggtcactttcaacattaacaacagcatcccaccaacatttgatggtgaggaggaaccctcgcaagggcagaaggttgaagaacaggagcctgaactgacatcaactcccaatttcgtggttgaagttataaagaatgatgatggcaagaaggcccttgtgttggactgtcattatccagaggatgaggttggacaagaagacgaggctgagagtgacatcttctctatcagggaagttagctttcagtccactggcgagtctgaatggaaggatactaattatacactcaacacagattccttggactgggccttatatgaccacctaatggatttccttgccgaccgaggggtggacaacacttttgcagatgagctggtggagctcagcacagccctggagcaccaggagtacattacttttcttgaagacctcaagagttttgtcaagagccagtagagcagacagatgctgaaagccatagtttcatggcaggctttggccagtgaacaaatcctactctgaagctagacatgtgctttgaaatgattatcatcctaatatcatgggggaaaaaataccaaatttaaattatatgttttgtgttctcatttattatcatttttttctgtacaaatctattatttctagatttttgtataacatgatagacataaaattggtttatctcctccaa

SEQ ID NO: 365259 - DNA, 979 bp, Homo sapiens
gccggcgcgggaagcgcttcggggcaggggcggggcttccggcggcgcctcaggtcgcggggcgcctaggcctgggttgtcctttgcatctgcacgtgttcgcagtcgtttccgcgatgctgcctctgctgcgctgcgtgccccgtgtgctgggctcctccgtcgccggcctccgcgctgccgcgcccgcctcgcctttccggcagctcctgcagccggcaccccggctgtgcacccggcccttcgggctgctcagcgtgcgcgcaggttccgagcggcggccgggcctcctgcggcctcgcggaccctgcgcctgtggctgtggctgcggctcgctgcacaccgacggagacaaagcttttgttgatttcctgagtgatgaaattaaggaggaaagaaaaattcagaagcataaaaccctccctaagatgtctggaggttgggagctggaactgaatgggacagaagcgaaattagtgcggaaagttgccggggaaaaaatcacggtcactttcaacattaacaacagcatcccaccaacatttgatggtgaggaggaaccctcgcaagggcagaaggttgaagaacaggagcctgaactgacatcaactcccaatttcgtggttgaagttataaagaatgatgatggcaagaaggcccttgtgttggactgtcattatccagaggatgaggttggacaagaagacgaggctgagagtgacatcttctctatcagggaagttagctttcagtccactggcgagtctgaatggaaggatactaattatacactcaacacagattccttggactgggccttatatgaccacctaatggatttccttgccgaccgaggggtggacaacacttttgcagatgagctggtggagctcaagacggcactcttgctcccatcagtcttgctcccatcaactcttgtactgctgttcaatatagaatccgctgatggacgaagatg

SEQ ID NO: 365260 - DNA, 1148 bp, Homo sapiens
gccggcgcgggaagcgcttcggggcaggggcggggcttccggcggcgcctcaggtcgcggggcgcctaggcctgggttgtcctttgcatctgcacgtgttcgcagtcgtttccgcgatgctgcctctgctgcgctgcgtgccccgtgtgctgggctcctccgtcgccggcctccgcgctgccgcgcccgcctcgcctttccggcagctcctgcagccggcaccccggctgtgcacccggcccttcgggctgctcagcgtgcgcgcaggttccgagcggcggccgggcctcctgcggcctcgcggaccctgcgcctgtggctgtggctgcggctcgctgcacaccgacggagacaaagcttttgttgatttcctgagtgatgaaattaaggaggaaagaaaaattcagaagcataaaaccctccctaagatgtctggaggttgggagctggaactgaatgggacagaagcgaaattagtgcggaaagttgccggggaaaagaggaaccctcgcaagggcagaaggttgaagaacaggagcctgaactgacatcaactcccaatttcgtggttgaagttataaagaatgatgatggcaagaaggcccttgtgttggactgtcattatccagaggatgaggttggacaagaagacgaggctgagagtgacatcttctctatcagggaagttagctttcagtccactggcgagtctgaatggaaggatactaattatacactcaacacagattccttggactgggccttatatgaccacctaatggatttccttgccgaccgaggggtggacaacacttttgcagatgagctggtggagctcagcacagccctggagcaccaggagtacattacttttcttgaagacctcaagagttttgtcaagagccagtagagcagacagatgctgaaagccatagtttcatggcaggctttggccagtgaacaaatcctactctgaagctagacatgtgctttgaaatgattatcatcctaatatcatgggggaaaaaataccaaatttaaattatatgttttgtgttctcatttattatcatttttttctgtacaaatctattatttctagatttttgtataacatgatagacataaaattggtttatctcctccaa

SEQ ID NO: 365261 - DNA, 1703 bp, Homo sapiens
gccggcgcgggaagcgcttcggggcaggggcggggcttccggcggcgcctcaggtcgcggggcgcctaggcctgggttgtcctttgcatctgcacgtgttcgcagtcgtttccgcgatgctgcctctgctgcgctgcgtgccccgtgtgctgggctcctccgtcgccggcctccgcgctgccgcgcccgcctcgcctttccggcagctcctgcagccggcaccccggctgtgcacccggcccttcgggctgctcagcgtgcgcgcaggttccgagcggcggccgggcctcctgcggcctcgcggaccctgcgcctgtggctgtggctgcggctcgctgcacaccgacggagacaaagcttttgttgatttcctgagtgatgaaattaaggaggaaagaaaaattcagaagcataaaaccctccctaagatgtctggaggttgggagctggaactgaatgggacagaagcgaaattagtgcggaaagttgccggggaaaaaatcacggtcactttcaacattaacaacagcatcccaccaacatttgatggtgaggaggaaccctcgcaagggcagaaggttgaagaacaggagcctgaactgacatcaactcccaatttcgtggttgaagttataaagaatgatgatggcaagaaggcccttgtgttggactgtcattatccagaggatgaggttggacaagaagacgaggctgagagtgacatcttctctatcagggaagttagctttcagtccactggcgagtctgaatggaaggatactaattatacatcagcacagccctggagcaccaggagtacattacttttcttgaagacctcaagagttttgtcaagagccagtagagcagacagatgctgaaagccatagtttcatggcaggctttggccagtgaacaaatcctactctgaagctagacatgtgctttgaaatgattatcatcctaatatcatgggggaaaaaataccaaatttaaattatatgttttgtgttctcatttattatcatttttttctgtacaaatctattatttctagatttttgtataacatgatagacataaaattggtttatctcctccaacaaggcagtttgtctttttctattcctcccccttcaacctgcgtcacaaaagaccaagaacagatgtcggaaaagtttttttttcttcagtattgtttaaaagtttcaatacaaaataagttataaataaaaggcttgtatgtacaaggctcctcagagggaatgagttgtcttcaaccccatagaatgatgtgagtccaagctggctctagaggatcacagcccaagtatcacaggccttggttgatcagctcctgttgaatttcctccagcacagccatgtctatcagctcctccaactgagccaagtcttctggacaattctccactgactgcaaagcattccactcttcttccatcacctcttgaactagaaagctgttctgagaattccctggcccactgcttccagcctggcggtacctgtttaggagcctgtcccggctgtttctcattctctccaggcatctctgccggaaagcctctttccaaggcggcgagcccaccagtttgtacagggagcggcgcggagacctcaacgactccgccatctcctcttcgcgggagacaaagccacaagacccgttccctggaggcgcg

SEQ ID NO: 365262 - DNA, 588 bp, Homo sapiens
  misc_feature (10)..(10): n is a, c, g, or t
  misc_feature (23)..(23): n is a, c, g, or t
  misc_feature (32)..(32): n is a, c, g, or t
cccgcccgcncgatacgggcganaagacgacngaagggaaagcccttgtgttggactgtcattatccagaggatgaggttggacaagaagacgaggctgagagtgacatcttctctatcagggaagttagctttcagtccactggcgagtctgaatggaaggatactaattatacactcaacacagattccttggactgggccttatatgaccacctaatggatttccttgccgaccgaggggtggacaacacttttgcagatgagctggtggagctcagcacagccctggagcaccaggagtacattacttttcttgaagacctcaagagttttgtcaagagccagtagagcagacagatgctgaaagccatagtttcatggcaggctttggccagtgaacaaatcctactctgaagctagacatgtgctttgaaatgattatcatcctaatatcatgggggaaaaaataccaaatttaaattatatgttttgtgttctcatttattatcatttttttctgtacaaatctattatttctagatttttgtataacatgatagacataaaattggtttatctcctccaa

SEQ ID NO: 365263 - DNA, 784 bp, Homo sapiens
gccggcgcgggaagcgcttcggggcaggggcggggcttccggcggcgcctcaggtcgcggggcgcctaggcctgggttgtcctttgcatctgcacgtgttcgcagtcgtttccgcgatgctgcctctgctgcgctgcgtgccccgtgtgctgggctcctccgtcgccggcctccgcgctgccgcgcccgcctcgcctttccggcagctcctgcagccggcaccccggctgtgcacccggcccttcgggctgctcagcgtgcgcgcaggttccgagcggcggccgggcctcctgcggcctcgcggaccctgcgcctgtggctgtggctgcggctcgctgcacaccgacggagacaaagcttttgttgatttcctgagtgatgaaattaaggaggaaagaaaaattcagaagcataaaaccctccctaagatgtctggaggttgggagctggaactgaatgggacagaagcgaaattagtgcggaaagttgccggggaaaaaatcacggtcactttcaacattaacaacagcatcccaccaacatttgatggtgaggaggaaccctcgcaagggcagaaggttgaagaacaggagccttaaaatattcactgaaccctgctgtaaacagtgttgtcattcacgcttttttgttcaatttctaaagcacaggcagagtagacttagcataattcctagcggccctaggatatttagaatgttaagtgaccactggttgcaactcaaagtccccatctgtattagcccctgagggggtttgtgggtga

SEQ ID NO: 365264 - DNA, 1047 bp, Homo sapiens
acatgccggaggaggcgggcttcccgccggccaagagattccggccaggctctggacctccgagccgcgctgggtccttccctcccgggaggcaagtggtgatgctgctgactgcgggcagcggcggcagaggaggaggaggaggccggaggcagcagccgcccctggcccagccctcggccagtccctaccctgaagctgtggagctgcagcgccggagtctgcccatcttccaagcgcgggggcaactgttggcccagctccgaaacctggacaacgcggtcctcatcggggaaactggctctgggaagacaactcagatccctcagtacctgtatgaaggagggatcagccgccagggcatcattgctgtgacccagcctcgtcgagtagctgccatctctcttgctactagagtctcagatgagaagagaactgaacttgggaagctggttggctatacagtgcgctttgatgatgtcacctcagaagacaccaggatcaagtttctgacagatggcatgcttctgcgtgaagcaatttcagactctttgcttcggaaatacagctgtgtcattttggatgaagctcacgaacggactatccacacagatgtgctctttggagtggtgaaagctgcacagaagaggagaaaggaactcgggaaacttcctctgaaagtatgagggaaacttcccctgaaagtatgagggaaacttcccctgaaagtatgcgtaacacacagaaggaaacaggcctggctgggcgcggtggctcacgcctgtaatcccagcactttgggaggccaaggccggtggatcacctgaggtcaggagttcgagaccagcctggccaacgtggtgaaaccccgtctctactaaaaatataaaaattagctgggtgtggtggcacacatctgtaatcccagctacttgggtggctgaggcatgagaatcgcctgaacccaggaggcggaggttgcggtgagctgagatcacaccactgcactccagcctgggtgacagagcgagactctgtctcaaaaaa

SEQ ID NO: 365265 - DNA, 635 bp, Homo sapiens
gaattgtacttatttttcttcataaaacactttctcttttcatgtttcttataataggtgttggtgccagaaatacttagtattgaagtgttttttttcctaggaagcgctaggctgtttatagacattgttttgaagaggagagcaagttcagcttaagtgttgagtgcaagtctaaaaactgcaaccaaaggaacttccagccagggctgaggaaggtgcaaccagtgggcaagaagatggaccaagaagcgcattggctagagcacagatacctgggctctggttgctactctgtaatagcagagtgaagtcattttatatcaggccagtggctctccaagtggggttcccagaccagcagcctcagcatcacctgggaacttgatagacatgcacattcttagattccccacccagatctacagaatctgaaactctggaatgaggccaagagttaaatccagtttgacaggccttctggatgattctggtgcacactaaagattgagagctaatgtactatgcttttagtctccttggagtttctccttctcaatccaaggggcctttcaactttgagatgcagtgaatccaacactcttcccaggacctatcctacttccttgtagtga

SEQ ID NO: 365266 - DNA, 481 bp, Homo sapiens
atttaaattataatttatacttttagttaactttttttgcttattgcattgctattatagtgtttatccattagtatggaagtatttcaacattttggcagttgtgtgcatttggatgaatatatcaactttaacctttgttattgaaagtatcattcatccctcatacagtactgatcacttagcaaatatgaggcattatgaggtactgtatgaggtgacaaatatgtgtaaggcccaaaatgcatcctcagagagcttgtaatctattacatacctatacaaggaaatagaatatatggaagaaagtactaagtactagagaagaattgttaatattacatacaagttgtattcatgtagagagattaatcttgtttgggaaatttcattgtcaaagtttaggaataaccatatacattttttccttataagaatcatacattctcattgtgaaaattcataaactctagagagtcac

SEQ ID NO: 365267 - DNA, 513 bp, Homo sapiens
agtcctgagcgggaggtgggtagagaaggtgctccctggccgggagggctcagaagagaagtagggcatggcatcgtcctctgctgaccacctgcactcggctcccccgtgcgctgcaggtccctgttccagcagcttctctacggcctcatctaccacagctggttccaagcaggtaggtagggctttggaggcgcctcctcaagtccgggtccccaatctgagctaagacgactccatggggagggtggggtctacgactgagggaggccggagaccttgccagggtctgtgggcggagctgaggcgctctgggccctcgcagaccccgcggaggccgaggggagccccgagacgcgcgagagcagctgcgtcatgaaacagacccagtactacttcggctcggtaaacgcctcctacaacgccatcatcgactgcggaaactgctccaggtgctggcagtggggcgggaccagaggccaagggcggaacctgtgagcggggcgagacgct

SEQ ID NO: 365268 - DNA, 5753 bp, Homo sapiens
  misc_feature (24)..(24): n is a, c, g, or t
gccagcgctgcagggagatagcgngcagcgcagcccgcagaggcgctgcggcccgtgcagccccggaggcccctcgcggagaaggcggcggcggaggagaggccgagttaccgcccgccgcccgcgcccccccaaccccgccgccgccgccgccgccgccactgccccccctccccgcggcgccgcatcttgaatggaaacatggcggtgccggctcggacctgcggcgcctctcggcccggcccagcgcggactgcgcgcccctggcccggctgcggcccccaccctggccccggcacccggcgcccgacgtccgggcccccgcgcccgctgtggctgctgctgccgcttctaccgctgctcgccgcccccggcgcctctgcctacagcttcccccagcagcacacgatgcagcactgggcccggcgtctggagcaggaggtcgacggcgtgatgcggatttttggaggcgtccagcagctccgtgagatttacaaggacaaccggaacctgttcgaggtacaggagaatgagcctcagaagttggtggagaaggtggcaggggacattgagagccttctggacaggaaggtgcaggccctgaagagactggctgatgctgcagagaacttccagaaagcacaccgctggcaggacaacatcaaggaggaagacatcgtgtactatgacgccaaggctgacgctgagctggacgaccctgagagtgaggatgtggaaagggggtctaaggccagcaccctaaggctggacttcatcgaggacccaaacttcaagaacaaggtcaactattcatacgcggctgtacagatccctacggacatctacaaaggctccactgtcatcctcaatgagctcaactggacagaggccctggagaatgtgttcatggaaaaccgcagacaagaccccacactgctgtggcaggtcttcggcagcgccacaggagtcactcgctactacccggccaccccgtggcgagcccccaagaagatcgacctgtacgatgtccgaaggagaccctggtatatccagggggcctcgtcacccaaagacatggtcatcatcgtggatgtgagtggcagtgtgagcggcctgaccctgaagctgatgaagacatctgtctgcgagatgctggacacgctgtctgatgatgactatgtgaatgtggcctcgttcaacgagaaggcacagcctgtgtcatgcttcacacacctggtgcaggccaatgtgcgcaacaagaaggtgttcaaggaagctgtgcagggcatggtggccaagggcaccacaggctacaaggccggctttgagtatgcctttgaccagctgcagaactccaacatcactcgggccaactgcaacaagatgatcatgatgttcacggatggtggtgaggaccgcgtgcaggacgtctttgagaagtacaattggccaaaccggacggtgcgcgtgtttactttctccgtggggcagcataactatgacgtcacaccgctgcagtggatggcctgtgccaacaaaggctactattttgagatcccttccatcggagccatccgcatcaacacacaggaatatctagatgtgttgggcaggcccatggtgctggcaggcaaggaggccaagcaggtgcagtggaccaacgtgtatgaggatgcactgggactggggttggtggtaacagggaccctccctgttttcaacctgacacaggatggccctggggaaaagaagaaccagctgatcctgggcgtgatgggcattgacgtggctctgaatgacatcaagaggctgacccccaactacacgcttggagccaacggctatgtgtttgccattgacctgaacggctacgtgttgctgcaccccaatctcaagccccagaccaccaacttccgggagcctgtgactctggacttcctggatgcggagctagaggatgagaacaaggaagagatccgtcggagcatgattgatggcaacaagggccacaagcagatcagaacgttggtcaagtccctggatgagaggtacatagatgaggtgacacggaactacacctgggtgcctataaggagcactaactacagcctggggctggtgctcccaccctacagcaccttctacctccaagccaatctcagtgaccagatcctgcaggtcaagtattttgagttcctgctccccagcagctttgagtctgaaggacacgttttcattgctcccagagagtactgcaaggacctgaatgcctcagacaacaacaccgagttcctgaaaaactttattgagctcatggagaaagtgactccagactccaagcagtgcaacaacttccttctgcacaacctgatcttggacacgggcatcacgcagcagctggtagagcgtgtgtggagggaccaggatctcaacacgtacagcctactggccgtgttcgctgccacagacggtggcatcacccgagtcttccccaacaaggcagctgaggactggacagagaaccctgagcccttcaatgccagcttctaccgccgcagcctggataaccacggttatgtcttcaagcccccacaccaggatgccctgttaaggccgctggagctggagaatgacactgtgggcatcctcgtcagcacagctgtggagctcagcctaggcaggcgcacactgaggccagcagtggtgggcgtcaagctggacctagaggcttgggctgagaagttcaaggtgctagccagcaaccgtacccaccaagaccagcctcagaagtgcggccccaacagccactgtgagatggactgcgaggttaacaatgaggacttactctgtgtcctcattgatgatggaggattcctggtgctgtcaaaccagaaccatcagtgggaccaggtgggcaggttcttcagtgaggtggatgccaacctgatgctggcactctacaataactccttctacacccgcaaggagtcctatgactatcaggcagcctgtgcccctcagccccctggcaacctgggtgctgcaccccggggtgtctttgtgcccaccgttgcagatttccttaacctggcctggtggacctctgctgccgcctggtccctgttccagcagcttctctacggcctcatctaccacagctggttccaagcagaccccgcggaggccgaggggagccccgagacgcgcgagagcagctgcgtcatgaaacagacccagtactacttcggctcggtaaacgcctcctacaacgccatcatcgactgcggaaactgctccaggctgttccacgcgcagagactgaccaacaccaatcttctctttgtggtggccgagaagccgctgtgcagccagtgcgaggctggccggctgctgcagaaggagacgcactgcccagcggacggcccggagcagtgtgagctagtgcagagaccgcgataccggagaggcccgcacatctgcttcgactacaacgcgacagaagatacctcagactgtggccgcggggcctccttcccgccgtcgctgggcgtcctggtctccctgcaactgctgctcctcctgggcctgccgccccggccgcagcctcaagtcctcgtccacgcctctcgccgcctctgagcaccctgccccaccccacctccactcccacctcacccggcctcttcgcctttcccaccctcctgccccacactccccgccttagagcctcgtccctccctcactgaaggacctgagctggccaggccctgagagtctggtctgcgccttgggatggggagtcccaaagcgggacgccgcaggtgtttggcacccaaatcacatctcacctccgaactgttcaagtgtccccagacccttcttgcctgctgggctccccccagtgggatgggacagggaggccacacgcactggtgccaaaaccaggcctctgctgccgcccttcctggaggctgcctatgttgggggggaccctgcctcagctgacccggcctctctgccccacccaagcccaaacttggtttctgtgagaatagtggaggaaggtgagatggccagtttgaagcctgtgcctcccagcttaaatcctagcaggagagaggctctggggcagcccccatgggctcctgcccctttcaggcctacagccacatccccaagcccaccaggtgtcaggatagtcacagtgataccagttcagacactaccccatatacacctggaacattgaggatggaaactggactcacattcgacataccccactgggcacacgcacaaacacacacactatggggtggggtgggtgtaggggcttacaaagccttacacagggcgaggggttggtgggagggttggcacctgcacactccatctcctgctcaccacctgcctctaatctgagctgcagcctggctggtcctcccatttctaaagctgaatgtcaaacagtgccaaatgctggggcagggggtgaagaaccctctgtcccacccctagccaccagtgtcctccaagtgccccctcacctctccaggtgctcattgtaaccatttctcactagtgtcaggcccccagtgggaccacatgccactgcctgcacctttcggcagaggaacccccaccagacatcaccctttgccttagcaggggtgactttgtctctcctggctgggccatccttccgccaatctggcccttacacactcaggcctgtgcccactccctatctccttcccacccctacacacacactccctgcttgcaggaggccaaactgtccctcccttgctgaacacacacacacacacacacacacaggtggggactgggcacagctcttcacaccattcattctggtcatttcccccaaaggcatcccagcctgggggccagtggggaactgagggcaaggggatatagtgatggggctcagatggactgggaggagggggagggtgatgcattaattaatggcttcgttaattaatgtcatgttgcttgtcgctttctcagtgtgtgtgtgtggtccatgcccactgctggtgccagggtgggtgtccatgtgcacccggcctggatgccagctgtgtccttcgggggcgtgcgtgtaactgtagtgtagtcaggtgctcaatggagaatataaacatatacagaaaaatatatattttaagtttaaaaaacagaaaaacagacaaaacaatccccatcaggtagctgtctaacccccagctgggtctaatccttctcattacccacccgacctggctgcccctcaccttgggctgggggactggggggccatttccttttctctgccctttttttgttgttctattttgtacagacaagttggaaaaacaacagcgacaaaaaagtcaagaaactttgtaaaatatcgtgtgtgtgattccttgtaaaatattttcaaatggtttattacagaagatcagttattaaataatgttcatattttcacttcaaatggttcccatccactgtatcagcttgggggtgaggactgggtagctatgaagacagttggccaagacctcagagtcccacttagtgctctgcagggggtgaagaccatggtagcccaggtccctgtcaaccacagggcatggcacttgcttccaccagttataataggtgccaggcccttgacatacattgtctcataacatctcaaaaagctgtcttttaaaaacaagcaagacaggctgggtgcg

SEQ ID NO: 365269 - DNA, 5528 bp, Homo sapiens
  misc_feature (2)..(3): n is a, c, g, or t
  misc_feature (5)..(6): n is a, c, g, or t
anngnngcgaagcgagtggctgcagagggctgcatcctgccgtccccagccccccacaaccgtacagccgtgcccaggtttccgcttagggaaccaggaggtccaggccctttctgccagcagccgggcgtgcaagcccccgacagagagaaatcttaaagatagctagagccacgggggctgatgcagcactgggcccggcgtctggagcaggaggtcgacggcgtgatgcggatttttggaggcgtccagcagctccgtgagatttacaaggacaaccggaacctgttcgaggtacaggagaatgagcctcagaagttggtggagaaggtggcaggggacattgagagccttctggacaggaaggtgcaggccctgaagagactggctgatgctgcagagaacttccagaaagcacaccgctggcaggacaacatcaaggaggaagacatcgtgtactatgacgccaaggctgacgctgagctggacgaccctgagagtgaggatgtggaaagggggtctaaggccagcaccctaaggctggacttcatcgaggacccaaacttcaagaacaaggtcaactattcatacgcggctgtacagatccctacggacatctacaaaggctccactgtcatcctcaatgagctcaactggacagaggccctggagaatgtgttcatggaaaaccgcagacaagaccccacactgctgtggcaggtcttcggcagcgccacaggagtcactcgctactacccggccaccccgtggcgagcccccaagaagatcgacctgtacgatgtccgaaggagaccctggtatatccagggggcctcgtcacccaaagacatggtcatcatcgtggatgtgagtggcagtgtgagcggcctgaccctgaagctgatgaagacatctgtctgcgagatgctggacacgctgtctgatgatgactatgtgaatgtggcctcgttcaacgagaaggcacagcctgtgtcatgcttcacacacctggtgcaggccaatgtgcgcaacaagaaggtgttcaaggaagctgtgcagggcatggtggccaagggcaccacaggctacaaggccggctttgagtatgcctttgaccagctgcagaactccaacatcactcgggccaactgcaacaagatgatcatgatgttcacggatggtggtgaggaccgcgtgcaggacgtctttgagaagtacaattggccaaaccggacggtgcgcgtgtttactttctccgtggggcagcataactatgacgtcacaccgctgcagtggatggcctgtgccaacaaaggctactattttgagatcccttccatcggagccatccgcatcaacacacaggaatatctagatgtgttgggcaggcccatggtgctggcaggcaaggaggccaagcaggtgcagtggaccaacgtgtatgaggatgcactgggactggggttggtggtaacagggaccctccctgttttcaacctgacacaggatggccctggggaaaagaagaaccagctgatcctgggcgtgatgggcattgacgtggctctgaatgacatcaagaggctgacccccaactacacgcttggagccaacggctatgtgtttgccattgacctgaacggctacgtgttgctgcaccccaatctcaagccccagaccaccaacttccgggagcctgtgactctggacttcctggatgcggagctagaggatgagaacaaggaagagatccgtcggagcatgattgatggcaacaagggccacaagcagatcagaacgttggtcaagtccctggatgagaggtacatagatgaggtgacacggaactacacctgggtgcctataaggagcactaactacagcctggggctggtgctcccaccctacagcaccttctacctccaagccaatctcagtgaccagatcctgcaggtcaagtattttgagttcctgctccccagcagctttgagtctgaaggacacgttttcattgctcccagagagtactgcaaggacctgaatgcctcagacaacaacaccgagttcctgaaaaactttattgagctcatggagaaagtgactccagactccaagcagtgcaacaacttccttctgcacaacctgatcttggacacgggcatcacgcagcagctggtagagcgtgtgtggagggaccaggatctcaacacgtacagcctactggccgtgttcgctgccacagacggtggcatcacccgagtcttccccaacaaggcagctgaggactggacagagaaccctgagcccttcaatgccagcttctaccgccgcagcctggataaccacggttatgtcttcaagcccccacaccaggatgccctgttaaggccgctggagctggagaatgacactgtgggcatcctcgtcagcacagctgtggagctcagcctaggcaggcgcacactgaggccagcagtggtgggcgtcaagctggacctagaggcttgggctgagaagttcaaggtgctagccagcaaccgtacccaccaagaccagcctcagaagtgcggccccaacagccactgtgagatggactgcgaggttaacaatgaggacttactctgtgtcctcattgatgatggaggattcctggtgctgtcaaaccagaaccatcagtgggaccaggtgggcaggttcttcagtgaggtggatgccaacctgatgctggcactctacaataactccttctacacccgcaaggagtcctatgactatcaggcagcctgtgcccctcagccccctggcaacctgggtgctgcaccccggggtgtctttgtgcccaccgttgcagatttccttaacctggcctggtggacctctgctgccgcctggtccctgttccagcagcttctctacggcctcatctaccacagctggttccaagcagaccccgcggaggccgaggggagccccgagacgcgcgagagcagctgcgtcatgaaacagacccagtactacttcggctcggtaaacgcctcctacaacgccatcatcgactgcggaaactgctccaggctgttccacgcgcagagactgaccaacaccaatcttctctttgtggtggccgagaagccgctgtgcagccagtgcgaggctggccggctgctgcagaaggagacgcactgcccagcggacggcccggagcagtgtgagctagtgcagagaccgcgataccggagaggcccgcacatctgcttcgactacaacgcgacagaagatacctcagactgtggccgcggggcctccttcccgccgtcgctgggcgtcctggtctccctgcaactgctgctcctcctgggcctgccgccccggccgcagcctcaagtcctcgtccacgcctctcgccgcctctgagcaccctgccccaccccacctccactcccacctcacccggcctcttcgcctttcccaccctcctgccccacactccccgccttagagcctcgtccctccctcactgaaggacctgagctggccaggccctgagagtctggtctgcgccttgggatggggagtcccaaagcgggacgccgcaggtgtttggcacccaaatcacatctcacctccgaactgttcaagtgtccccagacccttcttgcctgctgggctccccccagtgggatgggacagggaggccacacgcactggtgccaaaaccaggcctctgctgccgcccttcctggaggctgcctatgttgggggggaccctgcctcagctgacccggcctctctgccccacccaagcccaaacttggtttctgtgagaatagtggaggaaggtgagatggccagtttgaagcctgtgcctcccagcttaaatcctagcaggagagaggctctggggcagcccccatgggctcctgcccctttcaggcctacagccacatccccaagcccaccaggtgtcaggatagtcacagtgataccagttcagacactaccccatatacacctggaacattgaggatggaaactggactcacattcgacataccccactgggcacacgcacaaacacacacactatggggtggggtgggtgtaggggcttacaaagccttacacagggcgaggggttggtgggagggttggcacctgcacactccatctcctgctcaccacctgcctctaatctgagctgcagcctggctggtcctcccatttctaaagctgaatgtcaaacagtgccaaatgctggggcagggggtgaagaaccctctgtcccacccctagccaccagtgtcctccaagtgccccctcacctctccaggtgctcattgtaaccatttctcactagtgtcaggcccccagtgggaccacatgccactgcctgcacctttcggcagaggaacccccaccagacatcaccctttgccttagcaggggtgactttgtctctcctggctgggccatccttccgccaatctggcccttacacactcaggcctgtgcccactccctatctccttcccacccctacacacacactccctgcttgcaggaggccaaactgtccctcccttgctgaacacacacacacacacacacacacaggtggggactgggcacagctcttcacaccattcattctggtcatttcccccaaaggcatcccagcctgggggccagtggggaactgagggcaaggggatatagtgatggggctcagatggactgggaggagggggagggtgatgcattaattaatggcttcgttaattaatgtcatgttgcttgtcgctttctcagtgtgtgtgtgtggtccatgcccactgctggtgccagggtgggtgtccatgtgcacccggcctggatgccagctgtgtccttcgggggcgtgcgtgtaactgtagtgtagtcaggtgctcaatggagaatataaacatatacagaaaaatatatattttaagtttaaaaaacagaaaaacagacaaaacaatccccatcaggtagctgtctaacccccagctgggtctaatccttctcattacccacccgacctggctgcccctcaccttgggctgggggactggggggccatttccttttctctgccctttttttgttgttctattttgtacagacaagttggaaaaacaacagcgacaaaaaagtcaagaaactttgtaaaatatcgtgtgtgtgattccttgtaaaatattttcaaatggtttattacagaagatcagttattaaataatgttcatattttcacttcaaatggttcccatccactgtatcagcttgggggtgaggactgggtagctatgaagacagttggccaagacctcagagtcccacttagtgctctgcagggggtgaagaccatggtagcccaggtccctgtcaaccacagggcatggcacttgcttccaccagttataataggtgccaggcccttgacatacattgtctcataacatctcaaaaagctgtcttttaaaaacaagcaagacaggctgggtgcg

SEQ ID NO: 365270 - DNA, 5724 bp, Homo sapiens
  misc_feature (2)..(3): n is a, c, g, or t
  misc_feature (5)..(6): n is a, c, g, or t
anngnngcgaagcgagtggctgcagagggctgcatcctgccgtccccagccccccacaaccgtacagccgtgcccaggtttccgcttagggaaccaggaggtccaggccctttctgccagcagccgggcgtgcaagcccccgacagagagaaatcttaaagatagctagagccacgggggctgatgcagcactgggcccggcgtctggagcaggaggtcgacggcgtgatgcggatttttggaggcgtccagcagctccgtgagatttacaaggacaaccggaacctgttcgaggtacaggagaatgagcctcagaagttggtggagaaggtggcaggggacattgagagccttctggacaggaaggtgcaggccctgaagagactggctgatgctgcagagaacttccagaaagcacaccgctggcaggacaacatcaaggaggaagacatcgtgtactatgacgccaaggctgacgctgagctggacgaccctgagagtgaggatgtggaaagggggtctaaggccagcaccctaaggctggacttcatcgaggacccaaacttcaagaacaaggtcaactattcatacgcggctgtacagatccctacggacatctacaaaggctccactgtcatcctcaatgagctcaactggacagaggccctggagaatgtgttcatggaaaaccgcagacaagaccccacactgctgtggcaggtcttcggcagcgccacaggagtcactcgctactacccggccaccccgtggcgagcccccaagaagatcgacctgtacgatgtccgaaggagaccctggtatatccagggggcctcgtcacccaaagacatggtcatcatcgtggatgtgagtggcagtgtgagcggcctgaccctgaagctgatgaagacatctgtctgcgagatgctggacacgctgtctgatgatgactatgtgaatgtggcctcgttcaacgagaaggcacagcctgtgtcatgcttcacacacctggtgcaggccaatgtgcgcaacaagaaggtgttcaaggaagctgtgcagggcatggtggccaagggcaccacaggctacaaggccggctttgagtatgcctttgaccagctgcagaactccaacatcactcgggccaactgcaacaagatgatcatgatgttcacggatggtggtgaggaccgcgtgcaggacgtctttgagaagtacaattggccaaaccggacggtgcgcgtgtttactttctccgtggggcagcataactatgacgtcacaccgctgcagtggatggcctgtgccaacaaaggctactattttgagatcccttccatcggagccatccgcatcaacacacaggaatatctagatgtgttgggcaggcccatggtgctggcaggcaaggaggccaagcaggtgcagtggaccaacgtgtatgaggatgcactgggactggggttggtggtaacagggaccctccctgttttcaacctgacacaggatggccctggggaaaagaagaaccagctgatcctgggcgtgatgggcattgacgtggctctgaatgacatcaagaggctgacccccaactacacgcttggagccaacggctatgtgtttgccattgacctgaacggctacgtgttgctgcaccccaatctcaagccccagaccaccaacttccgggagcctgtgactctggacttcctggatgcggagctagaggatgagaacaaggaagagatccgtcggagcatgattgatggcaacaagggccacaagcagatcagaacgttggtcaagtccctggatgagaggtacatagatgaggtgacacggaactacacctgggtgcctataaggagcactaactacagcctggggctggtgctcccaccctacagcaccttctacctccaagccaatctcagtgaccagatcctgcaggtcaagtattttgagttcctgctccccagcagctttgagtctgaaggacacgttttcattgctcccagagagtactgcaaggacctgaatgcctcagacaacaacaccgagttcctgaaaaactttattgagctcatggagaaagtgactccagactccaagcagtgtgagtgcctggcagggcagctggctctgggcagtgcccaggcagcatggggccagcccagaggaacccagaggccgggcaggtgtggaaataagcaggcacaagctaagggctgggcctgggccagggccaggtcatggaggaggctcctggtggagccttaagggtgggggtgagggtgggcaaggagctgcaagaagatgcccccacccccacccctcccctcctgttccaggcaacaacttccttctgcacaacctgatcttggacacgggcatcacgcagcagctggtagagcgtgtgtggagggaccaggatctcaacaccagtctgcctcttgggtgctccagggcagctgaggactggacagagaaccctgagcccttcaatgccagcttctaccgccgcagcctggataaccacggttatgtcttcaagcccccacaccaggatgccctgttaaggccgctggagctggagaatgacactgtgggcatcctcgtcagcacagctgtggagctcagcctaggcaggcgcacactgaggccagcagtggtgggcgtcaagctggacctagaggcttgggctgagaagttcaaggtgctagccagcaaccgtacccaccaagaccagcctcagaagtgcggccccaacagccactgtgagatggactgcgaggttaacaatgaggacttactctgtgtcctcattgatgatggaggattcctggtgctgtcaaaccagaaccatcagtgggaccaggtgggcaggttcttcagtgaggtggatgccaacctgatgctggcactctacaataactccttctacacccgcaaggagtcctatgactatcaggcagcctgtgcccctcagccccctggcaacctgggtgctgcaccccggggtgtctttgtgcccaccgttgcagatttccttaacctggcctggtggacctctgctgccgcctggtccctgttccagcagcttctctacggcctcatctaccacagctggttccaagcagaccccgcggaggccgaggggagccccgagacgcgcgagagcagctgcgtcatgaaacagacccagtactacttcggctcggtaaacgcctcctacaacgccatcatcgactgcggaaactgctccaggctgttccacgcgcagagactgaccaacaccaatcttctctttgtggtggccgagaagccgctgtgcagccagtgcgaggctggccggctgctgcagaaggagacgcactgcccagcggacggcccggagcagtgtgagctagtgcagagaccgcgataccggagaggcccgcacatctgcttcgactacaacgcgacagaagatacctcagactgtggccgcggggcctccttcccgccgtcgctgggcgtcctggtctccctgcaactgctgctcctcctgggcctgccgccccggccgcagcctcaagtcctcgtccacgcctctcgccgcctctgagcaccctgccccaccccacctccactcccacctcacccggcctcttcgcctttcccaccctcctgccccacactccccgccttagagcctcgtccctccctcactgaaggacctgagctggccaggccctgagagtctggtctgcgccttgggatggggagtcccaaagcgggacgccgcaggtgtttggcacccaaatcacatctcacctccgaactgttcaagtgtccccagacccttcttgcctgctgggctccccccagtgggatgggacagggaggccacacgcactggtgccaaaaccaggcctctgctgccgcccttcctggaggctgcctatgttgggggggaccctgcctcagctgacccggcctctctgccccacccaagcccaaacttggtttctgtgagaatagtggaggaaggtgagatggccagtttgaagcctgtgcctcccagcttaaatcctagcaggagagaggctctggggcagcccccatgggctcctgcccctttcaggcctacagccacatccccaagcccaccaggtgtcaggatagtcacagtgataccagttcagacactaccccatatacacctggaacattgaggatggaaactggactcacattcgacataccccactgggcacacgcacaaacacacacactatggggtggggtgggtgtaggggcttacaaagccttacacagggcgaggggttggtgggagggttggcacctgcacactccatctcctgctcaccacctgcctctaatctgagctgcagcctggctggtcctcccatttctaaagctgaatgtcaaacagtgccaaatgctggggcagggggtgaagaaccctctgtcccacccctagccaccagtgtcctccaagtgccccctcacctctccaggtgctcattgtaaccatttctcactagtgtcaggcccccagtgggaccacatgccactgcctgcacctttcggcagaggaacccccaccagacatcaccctttgccttagcaggggtgactttgtctctcctggctgggccatccttccgccaatctggcccttacacactcaggcctgtgcccactccctatctccttcccacccctacacacacactccctgcttgcaggaggccaaactgtccctcccttgctgaacacacacacacacacacacacacaggtggggactgggcacagctcttcacaccattcattctggtcatttcccccaaaggcatcccagcctgggggccagtggggaactgagggcaaggggatatagtgatggggctcagatggactgggaggagggggagggtgatgcattaattaatggcttcgttaattaatgtcatgttgcttgtcgctttctcagtgtgtgtgtgtggtccatgcccactgctggtgccagggtgggtgtccatgtgcacccggcctggatgccagctgtgtccttcgggggcgtgcgtgtaactgtagtgtagtcaggtgctcaatggagaatataaacatatacagaaaaatatatattttaagtttaaaaaacagaaaaacagacaaaacaatccccatcaggtagctgtctaacccccagctgggtctaatccttctcattacccacccgacctggctgcccctcaccttgggctgggggactggggggccatttccttttctctgccctttttttgttgttctattttgtacagacaagttggaaaaacaacagcgacaaaaaagtcaagaaactttgtaaaatatcgtgtgtgtgattccttgtaaaatattttcaaatggtttattacagaagatcagttattaaataatgttcatattttcacttcaaatggttcccatccactgtatcagcttgggggtgaggactgggtagctatgaagacagttggccaagacctcagagtcccacttagtgctctgcagggggtgaagaccatggtagcccaggtccctgtcaaccacagggcatggcacttgcttccaccagttataataggtgccaggcccttgacatacattgtctcataacatctcaaaaagctgtcttttaaaaacaagcaagacaggctgggtgcg

SEQ ID NO: 365271 - DNA, 5874 bp, Homo sapiens
  misc_feature (2)..(3): n is a, c, g, or t
  misc_feature (5)..(6): n is a, c, g, or t
anngnngcgaagcgagtggctgcagagggctgcatcctgccgtccccagccccccacaaccgtacagccgtgcccaggtttccgcttagggaaccaggaggtccaggccctttctgccagcagccgggcgtgcaagcccccgacagagagaaatcttaaagatagctagagccacgggggctgatgcagcactgggcccggcgtctggagcaggaggtcgacggcgtgatgcggatttttggaggcgtccagcagctccgtgagatttacaaggacaaccggaacctgttcgaggtacaggagaatgagcctcagaagttggtggagaaggtggcaggggacattgagagccttctggacaggaaggtgcaggccctgaagagactggctgatgctgcagagaacttccagaaagcacaccgctggcaggacaacatcaaggaggaagacatcgtgtactatgacgccaaggctgacgctgagctggacgaccctgagagtgaggatgtggaaagggggtctaaggccagcaccctaaggctggacttcatcgaggacccaaacttcaagaacaaggtcaactattcatacgcggctgtacagatccctacggacatctacaaaggctccactgtcatcctcaatgagctcaactggacagaggccctggagaatgtgttcatggaaaaccgcagacaagaccccacactgctgtggcaggtcttcggcagcgccacaggagtcactcgctactacccggccaccccgtggcgagcccccaagaagatcgacctgtacgatgtccgaaggagaccctggtatatccagggggcctcgtcacccaaagacatggtcatcatcgtggatgtgagtggcagtgtgagcggcctgaccctgaagctgatgaagacatctgtctgcgagatgctggacacgctgtctgatgatgactatgtgaatgtggcctcgttcaacgagaaggcacagcctgtgtcatgcttcacacacctggtgcaggccaatgtgcgcaacaagaaggtgttcaaggaagctgtgcagggcatggtggccaagggcaccacaggctacaaggccggctttgagtatgcctttgaccagctgcagaactccaacatcactcgggccaactgcaacaagatgatcatgatgttcacggatggtggtgaggaccgcgtgcaggacgtctttgagaagtacaattggccaaaccggacggtgcgcgtgtttactttctccgtggggcagcataactatgacgtcacaccgctgcagtggatggcctgtgccaacaaaggctactattttgagatcccttccatcggagccatccgcatcaacacacaggaatatctagatgtgttgggcaggcccatggtgctggcaggcaaggaggccaagcaggtgcagtggaccaacgtgtatgaggatgcactgggactggggttggtggtaacagggaccctccctgttttcaacctgacacaggatggccctggggaaaagaagaaccagctgatcctgggcgtgatgggcattgacgtggctctgaatgacatcaagaggctgacccccaactacacgcttggagccaacggctatgtgtttgccattgacctgaacggctacgtgttgctgcaccccaatctcaagccccagaccaccaacttccgggagcctgtgactctggacttcctggatgcggagctagaggatgagaacaaggaagagatccgtcggagcatgattgatggcaacaagggccacaagcagatcagaacgttggtcaagtccctggatgagaggtacatagatgaggtgacacggaactacacctgggtgcctataaggagcactaactacagcctggggctggtgctcccaccctacagcaccttctacctccaagccaatctcagtgaccagatcctgcaggtcaagtattttgagttcctgctccccagcagctttgagtctgaaggacacgttttcattgctcccagagagtactgcaaggacctgaatgcctcagacaacaacaccgagttcctgaaaaactttattgagctcatggagaaagtgactccagactccaagcagtgtgagtgcctggcagggcagctggctctgggcagtgcccaggcagcatggggccagcccagaggaacccagaggccgggcaggtgtggaaataagcaggcacaagctaagggctgggcctgggccagggccaggtcatggaggaggctcctggtggagccttaagggtgggggtgagggtgggcaaggagctgcaagaagatgcccccacccccacccctcccctcctgttccaggcaacaacttccttctgcacaacctgatcttggacacgggcatcacgcagcagctggtagagcgtgtgtggagggaccaggatctcaacaccagtctgcctcttgggtgctccagggcagctgaggactggacagagaaccctgagcccttcaatgccagcttctaccgccgcagcctggataaccacggttatgtcttcaagcccccacaccaggatgccctgttaaggccgctggagctggagaatgacactgtgggcatcctcgtcagcacagctgtggagctcagcctaggcaggcgcacactgaggccagcagtggtgggcgtcaagctggacctagaggcttgggctgagaagttcaaggtgctagccagcaaccgtacccaccaagaccagcctcagaagtgcggccccaacagccactgtgagatggactgcgaggttaacaatgaggacttactctgtgtcctcattgatgatggaggattcctggtgctgtcaaaccagaaccatcagtgggaccaggtgggcaggttcttcagtgaggtggatgccaacctgatgctggcactctacaataactccttctacacccgcaaggagtcctatgactatcaggcagcctgtgcccctcagccccctggcaacctgggtgctgcaccccggggtgtctttgtgcccaccgttgcagatttccttaacctggcctggtggacctctgctgccgcctggtccctgttccagcagcttctctacggcctcatctaccacagctggttccaagcaggtaggtagggctttggaggcgcctcctcaagtccgggtccccaatctgagctaagacgactccatggggagggtggggtctacgactgagggaggccggagaccttgccagggtctgtgggcggagctgaggcgctctgggccctcgcagaccccgcggaggccgaggggagccccgagacgcgcgagagcagctgcgtcatgaaacagacccagtactacttcggctcggtaaacgcctcctacaacgccatcatcgactgcggaaactgctccaggctgttccacgcgcagagactgaccaacaccaatcttctctttgtggtggccgagaagccgctgtgcagccagtgcgaggctggccggctgctgcagaaggagacgcactgcccagcggacggcccggagcagtgtgagctagtgcagagaccgcgataccggagaggcccgcacatctgcttcgactacaacgcgacagaagatacctcagactgtggccgcggggcctccttcccgccgtcgctgggcgtcctggtctccctgcaactgctgctcctcctgggcctgccgccccggccgcagcctcaagtcctcgtccacgcctctcgccgcctctgagcaccctgccccaccccacctccactcccacctcacccggcctcttcgcctttcccaccctcctgccccacactccccgccttagagcctcgtccctccctcactgaaggacctgagctggccaggccctgagagtctggtctgcgccttgggatggggagtcccaaagcgggacgccgcaggtgtttggcacccaaatcacatctcacctccgaactgttcaagtgtccccagacccttcttgcctgctgggctccccccagtgggatgggacagggaggccacacgcactggtgccaaaaccaggcctctgctgccgcccttcctggaggctgcctatgttgggggggaccctgcctcagctgacccggcctctctgccccacccaagcccaaacttggtttctgtgagaatagtggaggaaggtgagatggccagtttgaagcctgtgcctcccagcttaaatcctagcaggagagaggctctggggcagcccccatgggctcctgcccctttcaggcctacagccacatccccaagcccaccaggtgtcaggatagtcacagtgataccagttcagacactaccccatatacacctggaacattgaggatggaaactggactcacattcgacataccccactgggcacacgcacaaacacacacactatggggtggggtgggtgtaggggcttacaaagccttacacagggcgaggggttggtgggagggttggcacctgcacactccatctcctgctcaccacctgcctctaatctgagctgcagcctggctggtcctcccatttctaaagctgaatgtcaaacagtgccaaatgctggggcagggggtgaagaaccctctgtcccacccctagccaccagtgtcctccaagtgccccctcacctctccaggtgctcattgtaaccatttctcactagtgtcaggcccccagtgggaccacatgccactgcctgcacctttcggcagaggaacccccaccagacatcaccctttgccttagcaggggtgactttgtctctcctggctgggccatccttccgccaatctggcccttacacactcaggcctgtgcccactccctatctccttcccacccctacacacacactccctgcttgcaggaggccaaactgtccctcccttgctgaacacacacacacacacacacacacaggtggggactgggcacagctcttcacaccattcattctggtcatttcccccaaaggcatcccagcctgggggccagtggggaactgagggcaaggggatatagtgatggggctcagatggactgggaggagggggagggtgatgcattaattaatggcttcgttaattaatgtcatgttgcttgtcgctttctcagtgtgtgtgtgtggtccatgcccactgctggtgccagggtgggtgtccatgtgcacccggcctggatgccagctgtgtccttcgggggcgtgcgtgtaactgtagtgtagtcaggtgctcaatggagaatataaacatatacagaaaaatatatattttaagtttaaaaaacagaaaaacagacaaaacaatccccatcaggtagctgtctaacccccagctgggtctaatccttctcattacccacccgacctggctgcccctcaccttgggctgggggactggggggccatttccttttctctgccctttttttgttgttctattttgtacagacaagttggaaaaacaacagcgacaaaaaagtcaagaaactttgtaaaatatcgtgtgtgtgattccttgtaaaatattttcaaatggtttattacagaagatcagttattaaataatgttcatattttcacttcaaatggttcccatccactgtatcagcttgggggtgaggactgggtagctatgaagacagttggccaagacctcagagtcccacttagtgctctgcagggggtgaagaccatggtagcccaggtccctgtcaaccacagggcatggcacttgcttccaccagttataataggtgccaggcccttgacatacattgtctcataacatctcaaaaagctgtcttttaaaaacaagcaagacaggctgggtgcg

SEQ ID NO: 365272 - DNA, 2906 bp, Homo sapiens
agtcctgagcgggaggtgggtagagaaggtgctccctggccgggagggctcagaagagaagtagggcatggcatcgtcctctgctgaccacctgcactcggctcccccgtgcgctgcaggtccctgttccagcagcttctctacggcctcatctaccacagctggttccaagcaggtaggtagggctttggaggcgcctcctcaagtccgggtccccaatctgagctaagacgactccatggggagggtggggtctacgactgagggaggccggagaccttgccagggtctgtgggcggagctgaggcgctctgggccctcgcagaccccgcggaggccgaggggagccccgagacgcgcgagagcagctgcgtcatgaaacagacccagtactacttcggctcggtaaacgcctcctacaacgccatcatcgactgcggaaactgctccaggctgttccacgcgcagagactgaccaacaccaatcttctctttgtggtggccgagaagccgctgtgcagccagtgcgaggctggccggctgctgcagaaggagacgcactgcccagcggacggcccggagcagtgtgagctagtgcagagaccgcgataccggagaggcccgcacatctgcttcgactacaacgcgacagaagatacctcagactgtggccgcggggcctccttcccgccgtcgctgggcgtcctggtctccctgcaactgctgctcctcctgggcctgccgccccggccgcagcctcaagtcctcgtccacgcctctcgccgcctctgagcaccctgccccaccccacctccactcccacctcacccggcctcttcgcctttcccaccctcctgccccacactccccgccttagagcctcgtccctccctcactgaaggacctgagctggccaggccctgagagtctggtctgcgccttgggatggggagtcccaaagcgggacgccgcaggtgtttggcacccaaatcacatctcacctccgaactgttcaagtgtccccagacccttcttgcctgctgggctccccccagtgggatgggacagggaggccacacgcactggtgccaaaaccaggcctctgctgccgcccttcctggaggctgcctatgttgggggggaccctgcctcagctgacccggcctctctgccccacccaagcccaaacttggtttctgtgagaatagtggaggaaggtgagatggccagtttgaagcctgtgcctcccagcttaaatcctagcaggagagaggctctggggcagcccccatgggctcctgcccctttcaggcctacagccacatccccaagcccaccaggtgtcaggatagtcacagtgataccagttcagacactaccccatatacacctggaacattgaggatggaaactggactcacattcgacataccccactgggcacacgcacaaacacacacactatggggtggggtgggtgtaggggcttacaaagccttacacagggcgaggggttggtgggagggttggcacctgcacactccatctcctgctcaccacctgcctctaatctgagctgcagcctggctggtcctcccatttctaaagctgaatgtcaaacagtgccaaatgctggggcagggggtgaagaaccctctgtcccacccctagccaccagtgtcctccaagtgccccctcacctctccaggtgctcattgtaaccatttctcactagtgtcaggcccccagtgggaccacatgccactgcctgcacctttcggcagaggaacccccaccagacatcaccctttgccttagcaggggtgactttgtctctcctggctgggccatccttccgccaatctggcccttacacactcaggcctgtgcccactccctatctccttcccacccctacacacacactccctgcttgcaggaggccaaactgtccctcccttgctgaacacacacacacacacacacacacaggtggggactgggcacagctcttcacaccattcattctggtcatttcccccaaaggcatcccagcctgggggccagtggggaactgagggcaaggggatatagtgatggggctcagatggactgggaggagggggagggtgatgcattaattaatggcttcgttaattaatgtcatgttgcttgtcgctttctcagtgtgtgtgtgtggtccatgcccactgctggtgccagggtgggtgtccatgtgcacccggcctggatgccagctgtgtccttcgggggcgtgcgtgtaactgtagtgtagtcaggtgctcaatggagaatataaacatatacagaaaaatatatattttaagtttaaaaaacagaaaaacagacaaaacaatccccatcaggtagctgtctaacccccagctgggtctaatccttctcattacccacccgacctggctgcccctcaccttgggctgggggactggggggccatttccttttctctgccctttttttgttgttctattttgtacagacaagttggaaaaacaacagcgacaaaaaagtcaagaaactttgtaaaatatcgtgtgtgtgattccttgtaaaatattttcaaatggtttattacagaagatcagttattaaataatgttcatattttcacttcaaatggttcccatccactgtatcagcttgggggtgaggactgggtagctatgaagacagttggccaagacctcagagtcccacttagtgctctgcagggggtgaagaccatggtagcccaggtccctgtcaaccacagggcatggcacttgcttccaccagttataataggtgccaggcccttgacatacattgtctcataacatctcaaaaagctgtcttttaaaaacaagcaagacaggctgggtgcg

SEQ ID NO: 365273 - DNA, 2949 bp, Homo sapiens
  misc_feature (2)..(3): n is a, c, g, or t
  misc_feature (5)..(6): n is a, c, g, or t
anngnngcgaagcgagtggctgcagagggctgcatcctgccgtccccagccccccacaaccgtacagccgtgcccaggtttccgcttagggaaccaggaggtccaggccctttctgccagcagccgggcgtgcaagcccccgacagagagaaatcttaaagatagctagagccacgggggctgatgcagcactgggcccggcgtctggagcaggaggtcgacggcgtgatgcggatttttggaggcgtccagcagctccgtgagatttacaaggacaaccggaacctgttcgaggtacaggagaatgagcctcagaagttggtggagaaggtggcaggggacattgagagccttctggacaggaaggtgcaggccctgaagagactggctgatgctgcagagaacttccagaaagcacaccgctggcaggacaacatcaaggaggaagacatcgtgtactatgacgccaaggctgacgctgagctggacgaccctgagagtgaggatgtggaaagggggtctaaggccagcaccctaaggctggacttcatcgaggacccaaacttcaagaacaaggtcaactattcatacgcggctgtacagatccctacggacatctacaaaggctccactgtcatcctcaatgagctcaactggacagaggccctggagaatgtgttcatggaaaaccgcagacaagaccccacactgctgtggcaggtcttcggcagcgccacaggagtcactcgctactacccggccaccccgtggcgagcccccaagaagatcgacctgtacgatgtccgaaggagaccctggtatatccagggggcctcgtcacccaaagacatggtcatcatcgtggatgtgagtggcagtgtgagcggcctgaccctgaagctgatgaagacatctgtctgcgagatgctggacacgctgtctgatgatgactatgtgaatgtggcctcgttcaacgagaaggcacagcctgtgtcatgcttcacacacctggtgcaggccaatgtgcgcaacaagaaggtgttcaaggaagctgtgcagggcatggtggccaagggcaccacaggctacaaggccggctttgagtatgcctttgaccagctgcagaactccaacatcactcgggccaactgcaacaagatgatcatgatgttcacggatggtggtgaggaccgcgtgcaggacgtctttgagaagtacaattggccaaaccggacggtgcgcgtgtttactttctccgtggggcagcataactatgacgtcacaccgctgcagtggatggcctgtgccaacaaaggctactattttgagatcccttccatcggagccatccgcatcaacacacaggaatatctagatgtgttgggcaggcccatggtgctggcaggcaaggaggccaagcaggtgcagtggaccaacgtgtatgaggatgcactgggactggggttggtggtaacagggaccctccctgttttcaacctgacacaggatggccctggggaaaagaagaaccagctgatcctgggcgtgatgggcattgacgtggctctgaatgacatcaagaggctgacccccaactacacgcttggagccaacggctatgtgtttgccattgacctgaacggctacgtgttgctgcaccccaatctcaagccccagaccaccaacttccgggagcctgtgactctggacttcctggatgcggagctagaggatgagaacaaggaagagatccgtcggagcatgattgatggcaacaagggccacaagcagatcagaacgttggtcaagtccctggatgagaggtacatagatgaggtgacacggaactacacctgggtgcctataaggagcactaactacagcctggggctggtgctcccaccctacagcaccttctacctccaagccaatctcagtgaccagatcctgcaggtcaagtattttgagttcctgctccccagcagctttgagtctgaaggacacgttttcattgctcccagagagtactgcaaggacctgaatgcctcagacaacaacaccgagttcctgaaaaactttattgagctcatggagaaagtgactccagactccaagcagtgtgagtgcctggcagggcagctggctctgggcagtgcccaggcagcatggggccagcccagaggaacccagaggccgggcaggtgtggaaataagcaggcacaagctaagggctgggcctgggccagggccaggtcatggaggaggctcctggtggagccttaagggtgggggtgagggtgggcaaggagctgcaagaagatgcccccacccccacccctcccctcctgttccaggcaacaacttccttctgcacaacctgatcttggacacgggcatcacgcagcagctggtagagcgtgtgtggagggaccaggatctcaacaccagtctgcctcttgggtgctccagggcagctgaggactggacagagaaccctgagcccttcaatgccagcttctaccgccgcagcctggataaccacggttatgtcttcaagcccccacaccaggatgccctgttaaggccgctggagctggagaatgacactgtgggcatcctcgtcagcacagctgtggagctcagcctaggcaggcgcacactgaggccagcagtggtgggcgtcaagctggacctagaggcttgggctgagaagttcaaggtgctagccagcaaccgtacccaccaagaccagcctcagaagtgcggccccaacagccactgtgagatggactgcgaggttaacaatgaggacttactctgtgtcctcattgatgatggaggattcctggtgctgtcaaaccagaaccatcagtgggaccaggtgggcagctatggtgcaagcctgccagggaccttggggaaaaggggtaggaccacctgagggtaagg

SEQ ID NO: 365274 - DNA, 812 bp, Homo sapiens
gcacgagggtccaaggctggtcccacacttatcagcagcaacaactgtcagttcatcctgcatgggaaaaatgttggaatgggagtctgaaatggggctactgtttcagtcctaacgtgctgtgtgacattgggacaacactttccctctctggacctcagtttccctctgtatacaaggatcagattcttgctgtgacccaagaactcctgaaatcatatagaaaggctggggtgggccctgtcattcgtggttgatttcaatacactcaagtgccattcatcctttaagaaaaacatctggatatcaaggtggaaatggcccatttaatgattgattatatcattttgtggatatagttataatcaatcattaaatgggccatttccttttctctgccctttttttgttgttctattttgtacagacaagttggaaaaacaacagcgacaaaaaagtcaagaaactttgtaaaatatcgtgtgtgtgattccttgtaaaatattttcaaatggtttattacagaagatcagttattaaataatgttcatattttcacttcaaatggttcccatccactgtatcagcttgggggtgaggactgggtagctatgaagacagttggccaagacctcagagtcccacttagtgctctgcagggggtgaagaccatggtagcccaggtccctgtcaaccacagggcatggcacttgcttccaccagttataataggtgccaggcccttgacatacattgtctcataacatctcaaaaagctgtcttttaaaaacaagcaagacaggctgggtgcg

SEQ ID NO: 365275 - DNA, 479 bp, Homo sapiens
  misc_feature (2)..(3): n is a, c, g, or t
  misc_feature (5)..(6): n is a, c, g, or t
anngnngcgaagcgagtggctgcagagggctgcatcctgccgtccccagccccccacaaccgtacagccgtgcccaggtttccgcttagggaaccaggaggtccaggccctttctgccagcagccgggcgtgcaagcccccgacagagagaaatcttaaagatagctagagccacgggggctgatgcagcactgggcccggcgtctggagcaggaggtcgacggcgtgatgcggatttttggaggcgtccagcagctccgtgagatttacaaggacaaccggaacctgttcgaggtacaggagaatgagcctcagaagttggtggagaaggtggcaggggacattgagagccttctggacaggaaggtgcaggccctgaaggtagagactggcggaaggcactgctgtccttctgctctgttcctttttttttttttttgggggggggggtcggggggggtttttttgttttttagggt

SEQ ID NO: 365276 - DNA, 189 bp, Homo sapiens
catctgcttcgactacaacgcgacagtgaggagagggggcggtggacccgaaatcccgcggccttgcgcccgcccaggccgaccagctccttgtctctccccgcagggaagatacctcagactgtggccgcggggcctccttcccgccgtcgctgggcgtcctggtctccctgcaactgctgctcctcc

SEQ ID NO: 365277 - DNA, 5716 bp, Homo sapiens
  misc_feature (24)..(24): n is a, c, g, or t
gccagcgctgcagggagatagcgngcagcgcagcccgcagaggcgctgcggcccgtgcagccccggaggcccctcgcggagaaggcggcggcggaggagaggccgagttaccgcccgccgcccgctgccccccctccccgcggcgccgcatcttgaatggaaacatggcggtgccggctcggacctgcggcgcctctcggcccggcccagcgcggactgcgcgcccctggcccggctgcggcccccaccctggccccggcacccggcgcccgacgtccgggcccccgcgcccgctgtggctgctgctgccgcttctaccgctgctcgccgcccccggcgcctctgcctacagcttcccccagcagcacacgatgcagcactgggcccggcgtctggagcaggaggtcgacggcgtgatgcggatttttggaggcgtccagcagctccgtgagatttacaaggacaaccggaacctgttcgaggtacaggagaatgagcctcagaagttggtggagaaggtggcaggggacattgagagccttctggacaggaaggtgcaggccctgaagagactggctgatgctgcagagaacttccagaaagcacaccgctggcaggacaacatcaaggaggaagacatcgtgtactatgacgccaaggctgacgctgagctggacgaccctgagagtgaggatgtggaaagggggtctaaggccagcaccctaaggctggacttcatcgaggacccaaacttcaagaacaaggtcaactattcatacgcggctgtacagatccctacggacatctacaaaggctccactgtcatcctcaatgagctcaactggacagaggccctggagaatgtgttcatggaaaaccgcagacaagaccccacactgctgtggcaggtcttcggcagcgccacaggagtcactcgctactacccggccaccccgtggcgagcccccaagaagatcgacctgtacgatgtccgaaggagaccctggtatatccagggggcctcgtcacccaaagacatggtcatcatcgtggatgtgagtggcagtgtgagcggcctgaccctgaagctgatgaagacatctgtctgcgagatgctggacacgctgtctgatgatgactatgtgaatgtggcctcgttcaacgagaaggcacagcctgtgtcatgcttcacacacctggtgcaggccaatgtgcgcaacaagaaggtgttcaaggaagctgtgcagggcatggtggccaagggcaccacaggctacaaggccggctttgagtatgcctttgaccagctgcagaactccaacatcactcgggccaactgcaacaagatgatcatgatgttcacggatggtggtgaggaccgcgtgcaggacgtctttgagaagtacaattggccaaaccggacggtgcgcgtgtttactttctccgtggggcagcataactatgacgtcacaccgctgcagtggatggcctgtgccaacaaaggctactattttgagatcccttccatcggagccatccgcatcaacacacaggaatatctagatgtgttgggcaggcccatggtgctggcaggcaaggaggccaagcaggtgcagtggaccaacgtgtatgaggatgcactgggactggggttggtggtaacagggaccctccctgttttcaacctgacacaggatggccctggggaaaagaagaaccagctgatcctgggcgtgatgggcattgacgtggctctgaatgacatcaagaggctgacccccaactacacgcttggagccaacggctatgtgtttgccattgacctgaacggctacgtgttgctgcaccccaatctcaagccccagaccaccaacttccgggagcctgtgactctggacttcctggatgcggagctagaggatgagaacaaggaagagatccgtcggagcatgattgatggcaacaagggccacaagcagatcagaacgttggtcaagtccctggatgagaggtacatagatgaggtgacacggaactacacctgggtgcctataaggagcactaactacagcctggggctggtgctcccaccctacagcaccttctacctccaagccaatctcagtgaccagatcctgcaggtcaagtattttgagttcctgctccccagcagctttgagtctgaaggacacgttttcattgctcccagagagtactgcaaggacctgaatgcctcagacaacaacaccgagttcctgaaaaactttattgagctcatggagaaagtgactccagactccaagcagtgcaacaacttccttctgcacaacctgatcttggacacgggcatcacgcagcagctggtagagcgtgtgtggagggaccaggatctcaacacgtacagcctactggccgtgttcgctgccacagacggtggcatcacccgagtcttccccaacaaggcagctgaggactggacagagaaccctgagcccttcaatgccagcttctaccgccgcagcctggataaccacggttatgtcttcaagcccccacaccaggatgccctgttaaggccgctggagctggagaatgacactgtgggcatcctcgtcagcacagctgtggagctcagcctaggcaggcgcacactgaggccagcagtggtgggcgtcaagctggacctagaggcttgggctgagaagttcaaggtgctagccagcaaccgtacccaccaagaccagcctcagaagtgcggccccaacagccactgtgagatggactgcgaggttaacaatgaggacttactctgtgtcctcattgatgatggaggattcctggtgctgtcaaaccagaaccatcagtgggaccaggtgggcaggttcttcagtgaggtggatgccaacctgatgctggcactctacaataactccttctacacccgcaaggagtcctatgactatcaggcagcctgtgcccctcagccccctggcaacctgggtgctgcaccccggggtgtctttgtgcccaccgttgcagatttccttaacctggcctggtggacctctgctgccgcctggtccctgttccagcagcttctctacggcctcatctaccacagctggttccaagcagaccccgcggaggccgaggggagccccgagacgcgcgagagcagctgcgtcatgaaacagacccagtactacttcggctcggtaaacgcctcctacaacgccatcatcgactgcggaaactgctccaggctgttccacgcgcagagactgaccaacaccaatcttctctttgtggtggccgagaagccgctgtgcagccagtgcgaggctggccggctgctgcagaaggagacgcactgcccagcggacggcccggagcagtgtgagctagtgcagagaccgcgataccggagaggcccgcacatctgcttcgactacaacgcgacagaagatacctcagactgtggccgcggggcctccttcccgccgtcgctgggcgtcctggtctccctgcaactgctgctcctcctgggcctgccgccccggccgcagcctcaagtcctcgtccacgcctctcgccgcctctgagcaccctgccccaccccacctccactcccacctcacccggcctcttcgcctttcccaccctcctgccccacactccccgccttagagcctcgtccctccctcactgaaggacctgagctggccaggccctgagagtctggtctgcgccttgggatggggagtcccaaagcgggacgccgcaggtgtttggcacccaaatcacatctcacctccgaactgttcaagtgtccccagacccttcttgcctgctgggctccccccagtgggatgggacagggaggccacacgcactggtgccaaaaccaggcctctgctgccgcccttcctggaggctgcctatgttgggggggaccctgcctcagctgacccggcctctctgccccacccaagcccaaacttggtttctgtgagaatagtggaggaaggtgagatggccagtttgaagcctgtgcctcccagcttaaatcctagcaggagagaggctctggggcagcccccatgggctcctgcccctttcaggcctacagccacatccccaagcccaccaggtgtcaggatagtcacagtgataccagttcagacactaccccatatacacctggaacattgaggatggaaactggactcacattcgacataccccactgggcacacgcacaaacacacacactatggggtggggtgggtgtaggggcttacaaagccttacacagggcgaggggttggtgggagggttggcacctgcacactccatctcctgctcaccacctgcctctaatctgagctgcagcctggctggtcctcccatttctaaagctgaatgtcaaacagtgccaaatgctggggcagggggtgaagaaccctctgtcccacccctagccaccagtgtcctccaagtgccccctcacctctccaggtgctcattgtaaccatttctcactagtgtcaggcccccagtgggaccacatgccactgcctgcacctttcggcagaggaacccccaccagacatcaccctttgccttagcaggggtgactttgtctctcctggctgggccatccttccgccaatctggcccttacacactcaggcctgtgcccactccctatctccttcccacccctacacacacactccctgcttgcaggaggccaaactgtccctcccttgctgaacacacacacacacacacacacacaggtggggactgggcacagctcttcacaccattcattctggtcatttcccccaaaggcatcccagcctgggggccagtggggaactgagggcaaggggatatagtgatggggctcagatggactgggaggagggggagggtgatgcattaattaatggcttcgttaattaatgtcatgttgcttgtcgctttctcagtgtgtgtgtgtggtccatgcccactgctggtgccagggtgggtgtccatgtgcacccggcctggatgccagctgtgtccttcgggggcgtgcgtgtaactgtagtgtagtcaggtgctcaatggagaatataaacatatacagaaaaatatatattttaagtttaaaaaacagaaaaacagacaaaacaatccccatcaggtagctgtctaacccccagctgggtctaatccttctcattacccacccgacctggctgcccctcaccttgggctgggggactggggggccatttccttttctctgccctttttttgttgttctattttgtacagacaagttggaaaaacaacagcgacaaaaaagtcaagaaactttgtaaaatatcgtgtgtgtgattccttgtaaaatattttcaaatggtttattacagaagatcagttattaaataatgttcatattttcacttcaaatggttcccatccactgtatcagcttgggggtgaggactgggtagctatgaagacagttggccaagacctcagagtcccacttagtgctctgcagggggtgaagaccatggtagcccaggtccctgtcaaccacagggcatggcacttgcttccaccagttataataggtgccaggcccttgacatacattgtctcataacatctcaaaaagctgtcttttaaaaacaagcaagacaggctgggtgcg

SEQ ID NO: 365278 - DNA, 5774 bp, Homo sapiens
  misc_feature (24)..(24): n is a, c, g, or t
  misc_feature (2189)..(2189): n is a, c, g, or t
gccagcgctgcagggagatagcgngcagcgcagcccgcagaggcgctgcggcccgtgcagccccggaggcccctcgcggagaaggcggcggcggaggagaggccgagttaccgcccgccgcccgcgcccccccaaccccgccgccgccgccgccgccgccactgccccccctccccgcggcgccgcatcttgaatggaaacatggcggtgccggctcggacctgcggcgcctctcggcccggcccagcgcggactgcgcgcccctggcccggctgcggcccccaccctggccccggcacccggcgcccgacgtccgggcccccgcgcccgctgtggctgctgctgccgcttctaccgctgctcgccgcccccggcgcctctgcctacagcttcccccagcagcacacgatgcagcactgggcccggcgtctggagcaggaggtcgacggcgtgatgcggatttttggaggcgtccagcagctccgtgagatttacaaggacaaccggaacctgttcgaggtacaggagaatgagcctcagaagttggtggagaaggtggcaggggacattgagagccttctggacaggaaggtgcaggccctgaagagactggctgatgctgcagagaacttccagaaagcacaccgctggcaggacaacatcaaggaggaagacatcgtgtactatgacgccaaggctgacgctgagctggacgaccctgagagtgaggatgtggaaagggggtctaaggccagcaccctaaggctggacttcatcgaggacccaaacttcaagaacaaggtcaactattcatacgcggctgtacagatccctacggacatctacaaaggctccactgtcatcctcaatgagctcaactggacagaggccctggagaatgtgttcatggaaaaccgcagacaagaccccacactgctgtggcaggtcttcggcagcgccacaggagtcactcgctactacccggccaccccgtggcgagcccccaagaagatcgacctgtacgatgtccgaaggagaccctggtatatccagggggcctcgtcacccaaagacatggtcatcatcgtggatgtgagtggcagtgtgagcggcctgaccctgaagctgatgaagacatctgtctgcgagatgctggacacgctgtctgatgatgactatgtgaatgtggcctcgttcaacgagaaggcacagcctgtgtcatgcttcacacacctggtgcaggccaatgtgcgcaacaagaaggtgttcaaggaagctgtgcagggcatggtggccaagggcaccacaggctacaaggccggctttgagtatgcctttgaccagctgcagaactccaacatcactcgggccaactgcaacaagatgatcatgatgttcacggatggtggtgaggaccgcgtgcaggacgtctttgagaagtacaattggccaaaccggacggtgcgcgtgtttactttctccgtggggcagcataactatgacgtcacaccgctgcagtggatggcctgtgccaacaaaggctactattttgagatcccttccatcggagccatccgcatcaacacacaggaatatctagatgtgttgggcaggcccatggtgctggcaggcaaggaggccaagcaggtgcagtggaccaacgtgtatgaggatgcactgggactggggttggtggtaacagggaccctccctgttttcaacctgacacaggatggccctggggaaaagaagaaccagctgatcctgggcgtgatgggcattgacgtggctctgaatgacatcaagaggctgacccccaactacacgcttggagccaacggctatgtgtttgccattgacctgaacggctacgtgttgctgcaccccaatctcaagccccagaccaccaacttccgggagcctgtgactctggacttcctggatgcggagctagaggatgagaacaaggaagagatccgtcggagcatgattgatggcaacaagggccacaagcagatcagaacgttggtcaagtccctggatgagaggtacatagatgaggtgacacggaactacacctgggtgcctataaggagcactaactacagcctggggctggtgctcccaccctacagcaccttctacctccaagccaatctcagtgaccagatcctgcaggtcaagttgcnaatcagcaaactgaaggattttgagttcctgctccccagcagctttgagtctgaaggacacgttttcattgctcccagagagtactgcaaggacctgaatgcctcagacaacaacaccgagttcctgaaaaactttattgagctcatggagaaagtgactccagactccaagcagtgcaacaacttccttctgcacaacctgatcttggacacgggcatcacgcagcagctggtagagcgtgtgtggagggaccaggatctcaacacgtacagcctactggccgtgttcgctgccacagacggtggcatcacccgagtcttccccaacaaggcagctgaggactggacagagaaccctgagcccttcaatgccagcttctaccgccgcagcctggataaccacggttatgtcttcaagcccccacaccaggatgccctgttaaggccgctggagctggagaatgacactgtgggcatcctcgtcagcacagctgtggagctcagcctaggcaggcgcacactgaggccagcagtggtgggcgtcaagctggacctagaggcttgggctgagaagttcaaggtgctagccagcaaccgtacccaccaagaccagcctcagaagtgcggccccaacagccactgtgagatggactgcgaggttaacaatgaggacttactctgtgtcctcattgatgatggaggattcctggtgctgtcaaaccagaaccatcagtgggaccaggtgggcaggttcttcagtgaggtggatgccaacctgatgctggcactctacaataactccttctacacccgcaaggagtcctatgactatcaggcagcctgtgcccctcagccccctggcaacctgggtgctgcaccccggggtgtctttgtgcccaccgttgcagatttccttaacctggcctggtggacctctgctgccgcctggtccctgttccagcagcttctctacggcctcatctaccacagctggttccaagcagaccccgcggaggccgaggggagccccgagacgcgcgagagcagctgcgtcatgaaacagacccagtactacttcggctcggtaaacgcctcctacaacgccatcatcgactgcggaaactgctccaggctgttccacgcgcagagactgaccaacaccaatcttctctttgtggtggccgagaagccgctgtgcagccagtgcgaggctggccggctgctgcagaaggagacgcactgcccagcggacggcccggagcagtgtgagctagtgcagagaccgcgataccggagaggcccgcacatctgcttcgactacaacgcgacagaagatacctcagactgtggccgcggggcctccttcccgccgtcgctgggcgtcctggtctccctgcaactgctgctcctcctgggcctgccgccccggccgcagcctcaagtcctcgtccacgcctctcgccgcctctgagcaccctgccccaccccacctccactcccacctcacccggcctcttcgcctttcccaccctcctgccccacactccccgccttagagcctcgtccctccctcactgaaggacctgagctggccaggccctgagagtctggtctgcgccttgggatggggagtcccaaagcgggacgccgcaggtgtttggcacccaaatcacatctcacctccgaactgttcaagtgtccccagacccttcttgcctgctgggctccccccagtgggatgggacagggaggccacacgcactggtgccaaaaccaggcctctgctgccgcccttcctggaggctgcctatgttgggggggaccctgcctcagctgacccggcctctctgccccacccaagcccaaacttggtttctgtgagaatagtggaggaaggtgagatggccagtttgaagcctgtgcctcccagcttaaatcctagcaggagagaggctctggggcagcccccatgggctcctgcccctttcaggcctacagccacatccccaagcccaccaggtgtcaggatagtcacagtgataccagttcagacactaccccatatacacctggaacattgaggatggaaactggactcacattcgacataccccactgggcacacgcacaaacacacacactatggggtggggtgggtgtaggggcttacaaagccttacacagggcgaggggttggtgggagggttggcacctgcacactccatctcctgctcaccacctgcctctaatctgagctgcagcctggctggtcctcccatttctaaagctgaatgtcaaacagtgccaaatgctggggcagggggtgaagaaccctctgtcccacccctagccaccagtgtcctccaagtgccccctcacctctccaggtgctcattgtaaccatttctcactagtgtcaggcccccagtgggaccacatgccactgcctgcacctttcggcagaggaacccccaccagacatcaccctttgccttagcaggggtgactttgtctctcctggctgggccatccttccgccaatctggcccttacacactcaggcctgtgcccactccctatctccttcccacccctacacacacactccctgcttgcaggaggccaaactgtccctcccttgctgaacacacacacacacacacacacacaggtggggactgggcacagctcttcacaccattcattctggtcatttcccccaaaggcatcccagcctgggggccagtggggaactgagggcaaggggatatagtgatggggctcagatggactgggaggagggggagggtgatgcattaattaatggcttcgttaattaatgtcatgttgcttgtcgctttctcagtgtgtgtgtgtggtccatgcccactgctggtgccagggtgggtgtccatgtgcacccggcctggatgccagctgtgtccttcgggggcgtgcgtgtaactgtagtgtagtcaggtgctcaatggagaatataaacatatacagaaaaatatatattttaagtttaaaaaacagaaaaacagacaaaacaatccccatcaggtagctgtctaacccccagctgggtctaatccttctcattacccacccgacctggctgcccctcaccttgggctgggggactggggggccatttccttttctctgccctttttttgttgttctattttgtacagacaagttggaaaaacaacagcgacaaaaaagtcaagaaactttgtaaaatatcgtgtgtgtgattccttgtaaaatattttcaaatggtttattacagaagatcagttattaaataatgttcatattttcacttcaaatggttcccatccactgtatcagcttgggggtgaggactgggtagctatgaagacagttggccaagacctcagagtcccacttagtgctctgcagggggtgaagaccatggtagcccaggtccctgtcaaccacagggcatggcacttgcttccaccagttataataggtgccaggcccttgacatacattgtctcataacatctcaaaaagctgtcttttaaaaacaagcaagacaggctgggtgcg

SEQ ID NO: 365279 - DNA, 2405 bp, Homo sapiens
gatgggggtgggtcagggcggggcaaactcaacgccccgcctttccgggctgcccgcaggctgttccacgcgcagagactgaccaacaccaatcttctctttgtggtggccgagaagccgctgtgcagccagtgcgaggctggccggctggaagatacctcagactgtggccgcggggcctccttcccgccgtcgctgggcgtcctggtctccctgcaactgctgctcctcctgggcctgccgccccggccgcagcctcaagtcctcgtccacgcctctcgccgcctctgagcaccctgccccaccccacctccactcccacctcacccggcctcttcgcctttcccaccctcctgccccacactccccgccttagagcctcgtccctccctcactgaaggacctgagctggccaggccctgagagtctggtctgcgccttgggatggggagtcccaaagcgggacgccgcaggtgtttggcacccaaatcacatctcacctccgaactgttcaagtgtccccagacccttcttgcctgctgggctccccccagtgggatgggacagggaggccacacgcactggtgccaaaaccaggcctctgctgccgcccttcctggaggctgcctatgttgggggggaccctgcctcagctgacccggcctctctgccccacccaagcccaaacttggtttctgtgagaatagtggaggaaggtgagatggccagtttgaagcctgtgcctcccagcttaaatcctagcaggagagaggctctggggcagcccccatgggctcctgcccctttcaggcctacagccacatccccaagcccaccaggtgtcaggatagtcacagtgataccagttcagacactaccccatatacacctggaacattgaggatggaaactggactcacattcgacataccccactgggcacacgcacaaacacacacactatggggtggggtgggtgtaggggcttacaaagccttacacagggcgaggggttggtgggagggttggcacctgcacactccatctcctgctcaccacctgcctctaatctgagctgcagcctggctggtcctcccatttctaaagctgaatgtcaaacagtgccaaatgctggggcagggggtgaagaaccctctgtcccacccctagccaccagtgtcctccaagtgccccctcacctctccaggtgctcattgtaaccatttctcactagtgtcaggcccccagtgggaccacatgccactgcctgcacctttcggcagaggaacccccaccagacatcaccctttgccttagcaggggtgactttgtctctcctggctgggccatccttccgccaatctggcccttacacactcaggcctgtgcccactccctatctccttcccacccctacacacacactccctgcttgcaggaggccaaactgtccctcccttgctgaacacacacacacacacacacacacaggtggggactgggcacagctcttcacaccattcattctggtcatttcccccaaaggcatcccagcctgggggccagtggggaactgagggcaaggggatatagtgatggggctcagatggactgggaggagggggagggtgatgcattaattaatggcttcgttaattaatgtcatgttgcttgtcgctttctcagtgtgtgtgtgtggtccatgcccactgctggtgccagggtgggtgtccatgtgcacccggcctggatgccagctgtgtccttcgggggcgtgcgtgtaactgtagtgtagtcaggtgctcaatggagaatataaacatatacagaaaaatatatattttaagtttaaaaaacagaaaaacagacaaaacaatccccatcaggtagctgtctaacccccagctgggtctaatccttctcattacccacccgacctggctgcccctcaccttgggctgggggactggggggccatttccttttctctgccctttttttgttgttctattttgtacagacaagttggaaaaacaacagcgacaaaaaagtcaagaaactttgtaaaatatcgtgtgtgtgattccttgtaaaatattttcaaatggtttattacagaagatcagttattaaataatgttcatattttcacttcaaatggttcccatccactgtatcagcttgggggtgaggactgggtagctatgaagacagttggccaagacctcagagtcccacttagtgctctgcagggggtgaagaccatggtagcccaggtccctgtcaaccacagggcatggcacttgcttccaccagttataataggtgccaggcccttgacatacattgtctcataacatctcaaaaagctgtcttttaaaaacaagcaagacaggctgggtgcg

SEQ ID NO: 365280 - DNA, 2561 bp, Homo sapiens
  misc_feature (2)..(3): n is a, c, g, or t
  misc_feature (5)..(6): n is a, c, g, or t
anngnngcgaagcgagtggctgcagagggctgcatcctgccgtccccagccccccacaaccgtacagccgtgcccaggtttccgcttagggaaccaggaggtccaggccctttctgccagcagccgggcgtgcaagcccccgacagagagaaatcttaaagatagctagagccacgggggctgatgcagcactgggcccggcgtctggagcaggaggtcgacggcgtgatgcggatttttggaggcgtccagcagctccgtgagatttacaaggacaaccggaacctgttcgaggtacaggagaatgagcctcagaagttggtggagaaggtggcaggggacattgagagccttctggacaggaaggtgcaggccctgaagagactggctgatgctgcagagaacttccagaaagcacaccgctggcaggacaacatcaaggaggaagacatcgtgtactatgacgccaaggctgacgctgagctggacgaccctgagagtgaggatgtggaaagggggtctaaggccagcaccctaaggctggacttcatcgaggacccaaacttcaagaacaaggtcaactattcatacgcggctgtacagatccctacggacatctacaaaggctccactgtcatcctcaatgagctcaactggacagaggccctggagaatgtgttcatggaaaaccgcagacaagaccccacactgctgtggcaggtcttcggcagcgccacaggagtcactcgctactacccggccaccccgtggcgagcccccaagaagatcgacctgtacgatgtccgaaggagaccctggtatatccagggggcctcgtcacccaaagacatggtcatcatcgtggatgtgagtggcagtgtgagcggcctgaccctgaagctgatgaagacatctgtctgcgagatgctggacacgctgtctgatgatgactatgtgaatgtggcctcgttcaacgagaaggcacagcctgtgtcatgcttcacacacctggtgcaggccaatgtgcgcaacaagaaggtgttcaaggaagctgtgcagggcatggtggccaagggcaccacaggctacaaggccggctttgagtatgcctttgaccagctgcagaactccaacatcactcgggccaactgcaacaagatgatcatgatgttcacggatggtggtgaggaccgcgtgcaggacgtctttgagaagtacaattggccaaaccggacggtgcgcgtgtttactttctccgtggggcagcataactatgacgtcacaccgctgcagtggatggcctgtgccaacaaaggctactattttgagatcccttccatcggagccatccgcatcaacacacaggaatatctagatgtgttgggcaggcccatggtgctggcaggcaaggaggccaagcaggtgcagtggaccaacgtgtatgaggatgcactgggactggggttggtggtaacagggaccctccctgttttcaacctgacacaggatggccctggggaaaagaagaaccagctgatcctgggcgtgatgggcattgacgtggctctgaatgacatcaagaggctgacccccaactacacgcttggagccaacggctatgtgtttgccattgacctgaacggctacgtgttgctgcaccccaatctcaagccccagaccaccaacttccgggagcctgtgactctggacttcctggatgcggagctagaggatgagaacaaggaagagatccgtcggagcatgattgatggcaacaagggccacaagcagatcagaacgttggtcaagtccctggatgagaggtacatagatgaggtgacacggaactacacctgggtgcctataaggagcactaactacagcctggggctggtgctcccaccctacagcaccttctacctccaagccaatctcagtgaccagatcctgcaggtcaagtattttgagttcctgctccccagcagctttgagtctgaaggacacgttttcattgctcccagagagtactgcaaggacctgaatgcctcagacaacaacaccgagttcctgaaaaactttattgagctcatggagaaagtgactccagactccaagcagtgtgagtgcctggcagggcagctggctctgggcagtgcccaggcagcatggggccagcccagaggaacccagaggccgggcaggtgtggaaataagcaggcacaagctaagggctgggcctgggccagggccaggtcatggaggaggctcctggtggagccttaagggtgggggtgagggtgggcaaggagctgcaagaagatgcccccacccccacccctcccctcctgttccaggcaacaacttccttctgcacaacctgatcttggacacgggcatcacgcagcagctggtagagcgtgtgtggagggaccaggatctcaacacgacttactctgtgtcctcattgatgatggaggattcctggtgctgtcaaaccagaaccatcagtgggaccaggtgaggatcaggaagagagtgaaagaagagagtagggatttgag

SEQ ID NO: 365281 - DNA, 831 bp, Homo sapiens
ttcgttccgctcaagttcctccgccgcgacctcaggacaggccgaagaggcgcgcactactcacgtgtcttccaagtgctgctccaaggtcgcctccatcccacccaccgaccactccggctcagaacccagcggcacggcacgtccttctccaccacaggcctcagtcacttgacgcgagcggggcgtggaccgtaacggcgcctccaaagggacaaaattgatcacggtgcaacgtccgcgttctttactggaaaacatcactgcgcttccgtcgcacagagcctgacgaaggcttgggctccccgcgcggtgaccgtcgaggtgacctgcacctggctccatggcggaaccggccggcacggattattcccctctcgggagaggtctgcagccgggcctcagtgcttcagttcgtggcctggcattttgtgaagagtgtcttcatctctgcatccctagtgcaacagagcatgacaaaaattcaacaaatatttattgaagagtcttgatgtcttttgggaaaggaactctatggttacctttactctaagattagatgggtgttactgattcttacctcagagaagagaatgtcatggagacaaaatgacctgcttagagttctgcaccccccagcatggagagcagagcgcaaagatttcttccggactcccacattccccttggaatccaagaactggtctactgtcacaacactttagtaccctcttgtaagcctgtggacaaatcctctgatgccttgatacctcggttttcccccactataaatgggaagataaattcactagaaacagtaaaaccttgcag

SEQ ID NO: 365282 - DNA, 905 bp, Homo sapiens
ttcgttccgctcaagttcctccgccgcgacctcaggacaggccgaagaggcgcgcactactcacgtgtcttccaagtgctgctccaaggtcgcctccatcccacccaccgaccactccggctcagaacccagcggcacggcacgtccttctccaccacaggcctcagtcacttgacgcgagcggggcgtggaccgtaacggcgcctccaaagggacaaaattgatcacggtgcaacgtccgcgttctttactggaaaacatcactgcgcttccgtcgcacagagcctgacgaaggcttgggctccccgcgcggtgaccgtcgaggtgacctgcacctggctccatggcggaaccggccggcacggattattcccctctcgggagaggtctgcagccgggcctcagtgcttcagttcgtggcctggcattttgtagatggagtctcagtgtgtagcccagtctcaagtgaccctccctcgttggcttcccaaagcgctgagattgcaggaagagtgtcttcatctctgcatccctagtgcaacagagcatgacaaaaattcaacaaatatttattgaagagtcttgatgtcttttgggaaaggaactctatggttacctttactctaagattagatgggtgttactgattcttacctcagagaagagaatgtcatggagacaaaatgacctgcttagagttctgcaccccccagcatggagagcagagcgcaaagatttcttccggactcccacattccccttggaatccaagaactggtctactgtcacaacactttagtaccctcttgtaagcctgtggacaaatcctctgatgccttgatacctcggttttcccccactataaatgggaagataaattcactagaaacagtaaaaccttgcag

SEQ ID NO: 365283 - DNA, 911 bp, Homo sapiens
ttcgttccgctcaagttcctccgccgcgacctcaggacaggccgaagaggcgcgcactactcacgtgtcttccaagtgctgctccaaggtcgcctccatcccacccaccgaccactccggctcagaacccagcggcacggcacgtccttctccaccacaggcctcagtcacttgacgcgagcggggcgtggaccgtaacggcgcctccaaagggacaaaattgatcacggtgcaacgtccgcgttctttactggaaaacatcactgcgcttccgtcgcacagagcctgacgaaggcttgggctccccgcgcggtgaccgtcgaggtgacctgcacctggctccatggcggaaccggccggcacggattattcccctctcgggagaggtctgcagccgggcctcagtgcttcagttcgtggcctggcattttgtgaagagtgtcttcatctctgcatccctagtgcaacagagcatgacaaaaattcaacaaatatttattgaagagtcttgatgtcttttgggaaaggaactctatggttacctttactctaagttaaaaacaacaacaacaacaacaacaacacaaaaccctgaggctcagaagataaatatttgctgaagatcactgtgcttattagatgggtgttactgattcttacctcagagaagagaatgtcatggagacaaaatgacctgcttagagttctgcaccccccagcatggagagcagagcgcaaagatttcttccggactcccacattccccttggaatccaagaactggtctactgtcacaacactttagtaccctcttgtaagcctgtggacaaatcctctgatgccttgatacctcggttttcccccactataaatgggaagataaattcactagaaacagtaaaaccttgcag

SEQ ID NO: 365284 - DNA, 1176 bp, Homo sapiens
ttcgttccgctcaagttcctccgccgcgacctcaggacaggccgaagaggcgcgcactactcacgtgtcttccaagtgctgctccaaggtcgcctccatcccacccaccgaccactccggctcagaacccagcggcacggcacgtccttctccaccacaggcctcagtcacttgacgcgagcggggcgtggaccgtaacggcgcctccaaagggacaaaattgatcacggtgcaacgtccgcgttctttactggaaaacatcactgcgcttccgtcgcacagagcctgacgaaggcttgggctccccgcgcggtgaccgtcgaggtgacctgcacctggctccatggcggaaccggccggcacggattattcccctctcgggagaggtctgcagccgggcctcagtgcttcagttcgtggcctggcattttgtgaagagtgtcttcatctctgcatccctagtgcaacagagcatgacaaaaattcaacaaatatttattgaagagtcttgatgtcttttgggaaaggaactctatggttacctttactctaagattagatgggtgttactgattcttacctcagagaagagaatgtcatggagacaaaatgacctgcttagagttctgcaccccccagcatggagagcagagcgcaaagatttcttccggactcccacattccccttggaatccaagaactggtctactgtcacaacactttagtaccctcttctcccaaggaggcagcagaaactggggtaatcacaacggtcaacagcagcaaaggcagcactttctgatttacttgactgctatggatgccacctctctccacgcctcagtttaatatctgtaagacctgaaagcctctgaagttcactccttcggccccactcccttcctgctgcctttgggctctcctcatgtgactctgcctgttgaaactgtctgctagctggcccagcatctccaggcatggcctcactcatccacctctcccttgctgaaggtctcctcatgtaacacacgatttcctttagatggtccttcatcaccagcaagatgaaacctaaattcattggcatggtagacaaaactctagccttgcctcccagaggccagtctctgtctccgccactccccaggtggactgcattgtgtttctgctgccata

SEQ ID NO: 365285 - DNA, 1200 bp, Homo sapiens
ttcgttccgctcaagttcctccgccgcgacctcaggacaggccgaagaggcgcgcactactcacgtgtcttccaagtgctgctccaaggtcgcctccatcccacccaccgaccactccggctcagaacccagcggcacggcacgtccttctccaccacaggcctcagtcacttgacgcgagcggggcgtggaccgtaacggcgcctccaaagggacaaaattgatcacggtgcaacgtccgcgttctttactggaaaacatcactgcgcttccgtcgcacagagcctgacgaaggcttgggctccccgcgcggtgaccgtcgaggtgacctgcacctggctccatggcggaaccggccggcacggattattcccctctcgggagaggtctgcagccgggcctcagtgcttcagttcgtggcctggcattttgtgaagagtgtcttcatctctgcatccctagtgcaacagagcatgacaaaaattcaacaaatatttattgaagagtcttgatgtcttttgggaaaggaactctatggttacctttactctaagattagatgggtgttactgattcttacctcagagaagagaatgtcatggagacaaaatgacctgcttagagttctgcaccccccagcatggagagcagagcgcaaagatttcttccggactcccacattccccttggaatccaagaactggtctactgtcacaacactttagtaccctcttctcccaaggaggcagcagaaactggggtaatcacaacggtcaacagcagcaaaggcagcactttctgatttacttgactgctatggatgccacctctctccacgcctcagtttaatatctgtaaggcagtactgctgtcagtgaatcagctttatctgtgcagtgggcaagaaggacccactgggtgactacaatatggcactttggtatgttggttattttaagttagaggcctttgatgctggaagaagctttactctgatatctccttatctaccacaagactggatctgccaaagagaacacaattgcgttccattcccttcctgaaatctcattatctatggcagaaaagaagactggggaatgtaatacacagtattacacagtaatgtaacatactacacagtatttacacaaaacatgtaacacagaatgtactacacagtattttcacaaaacaaaa

SEQ ID NO: 365286 - DNA, 663 bp, Homo sapiens
agcctgacgaaggcttgggctccccgcgcggtgaccgtcgaggtgacctgcacctggctccatggcggaaccggccggcacggattattcccctctcgggagaggtctgcagccgggcctcagtgcttcagttcgtggcctggcattttgtgtcagtgttttttaacctttggaccctagttcaaccgactccgagacctaggggacagatcttaagttttacaataacccaggggtcagacagggtctgatctagcctgtggggcaagtacggggaagacacgggacctcttggagggggtcagtaggcttgtagggggaaagacgcacacagagactaaaggacgagatggagcaaggttcaaccccctagctgagtgttggcagtgtcgggattttaacgaagacattggtgcttattatggtgaggggactcaggacagtttaggggaagagagtggcatttgagtcctaactcgtaaggaagactgggtaggactacttgaaaataacttttaaaaattaattataaagctggtaaaaataggaaaacatctatggccccactgtccaaagacgacttttaacttcttggagaatatcctttcagatagttgtctttgtaaatgtatacttttaatgttttttcgtttgcctttttaa

SEQ ID NO: 365287 - DNA, 448 bp, Homo sapiens
gcataagctacagcacccagcccttacgtttacttttcattgacaggaagagtgtcttcatctctgcatccctagtgcaacagagcatgacaaaaattcaacaaatatttattgaagagtcttgatgtcttttgggaaaggaactctatggttacctttactctaaggtaaagaaatttaggtcctgaactttaaccaccttctcctcttctttcttccctctttcataaatgagctcttggaaaattaaaatgccaggagggtccagcagagaatacccaagcccacatgtcctgatgggaagtgggggataagtagagagggaaacacagaccctgtaggccatctcactgctgctggcccaggggaccctaactccttttgttgactcatcagaagtagaatcctcctgagggtctgtttaagaagcacagctctggtagaaagg

SEQ ID NO: 365288 - DNA, 985 bp, Homo sapiens
ttcgttccgctcaagttcctccgccgcgacctcaggacaggccgaagaggcgcgcactactcacgtgtcttccaagtgctgctccaaggtcgcctccatcccacccaccgaccactccggctcagaacccagcggcacggcacgtccttctccaccacaggcctcagtcacttgacgcgagcggggcgtggaccgtaacggcgcctccaaagggacaaaattgatcacggtgcaacgtccgcgttctttactggaaaacatcactgcgcttccgtcgcacagagcctgacgaaggcttgggctccccgcgcggtgaccgtcgaggtgacctgcacctggctccatggcggaaccggccggcacggattattcccctctcgggagaggtctgcagccgggcctcagtgcttcagttcgtggcctggcattttgtagatggagtctcagtgtgtagcccagtctcaagtgaccctccctcgttggcttcccaaagcgctgagattgcaggaagagtgtcttcatctctgcatccctagtgcaacagagcatgacaaaaattcaacaaatatttattgaagagtcttgatgtcttttgggaaaggaactctatggttacctttactctaagttaaaaacaacaacaacaacaacaacaacacaaaaccctgaggctcagaagataaatatttgctgaagatcactgtgcttattagatgggtgttactgattcttacctcagagaagagaatgtcatggagacaaaatgacctgcttagagttctgcaccccccagcatggagagcagagcgcaaagatttcttccggactcccacattccccttggaatccaagaactggtctactgtcacaacactttagtaccctcttgtaagcctgtggacaaatcctctgatgccttgatacctcggttttcccccactataaatgggaagataaattcactagaaacagtaaaaccttgcag

SEQ ID NO: 365289 - DNA, 846 bp, Homo sapiens
ttcgttccgctcaagttcctccgccgcgacctcaggacaggccgaagaggcgcgcactactcacgtgtcttccaagtgctgctccaaggtcgcctccatcccacccaccgaccactccggctcagaacccagcggcacggcacgtccttctccaccacaggcctcagtcacttgacgcgagcggggcgtggaccgtaacggcgcctccaaagggacaaaattgatcacggtgcaacgtccgcgttctttactggaaaacatcactgcgcttccgtcgcacagagcctgacgaaggcttgggctccccgcgcggtgaccgtcgaggtgacctgcacctggctccatggcggaaccggccggcacggattattcccctctcgggagaggtctgcagccgggcctcagtgcttcagttcgtggcctggcattttgtgaagagtgtcttcatctctgcatccctagtgcaacagagcatgacaaaaattcaacaaatatttattgaagagtcttgatgtcttttgggaaaggaactctatggttacctttactctaaggcattgtgaagaccctgtttctctagctgtgcagctgcaaggtcactaggcagataaactcaagccataaaacatgtttttccttgaaaagtaagaaataatgtaatgcatgtgtcaaatgaataactatttctcgcttctgtaatatgcttcccttcgcacagatctccccctgccccatgaaatgctttaaaggtaacttaactctttgttcggggctcagtcctttggatgttaatctgactggcttggtgcacctaaataataaataacatatatcctcctcaacccc

SEQ ID NO: 365290 - DNA, 1149 bp, Homo sapiens
ttctattgattgaaataatattcctaactcatttctgcttttatccaccctggttctaactgataattcctggaccactggagcatttaaattgctctttgcacttctagtttttgttcataatagtgtagcctccatgccactcctagatcacttactaaaaaaaataccagttggattatgttactttgttgctgaaaaatctagaattaaggaatgatattgaaatactaacattagacttctgtggtgaacctttttgtgtcattcatcaaagtgtttttgcaagtctggatttttataccctgctttttcttaaagcaagagaaacttttttctgtggtcactgacatatacagattttcataaaacttgagttactcttaagcaatttttagatagagttggacctgttaggaaaagagtcttgatgtcatctttatcatcttataagtgagcaccttccctgagactctttaacttcttgaaaaaagttgatgctgttttatttgaaaaatcgtcaagactattaaaaggcaaataggggaaactgttaagaaattgaaatacagttgcaaaaacatactgataacagtgacttttagttctgtatcatttgagttcttgtgccttttttctgtgcacattgtacttctatttttgtccagtaaaactttaagaaaacccagaagttgctacaaatgataaagataaggttttgtttctctcaaaaaggttgttatatgctgctgttccaggacatatcaggatgacaactatgtataatatttaaagccacatctttagtaggttcacagatactttatatactataaaaagtatgactgtgtatatattcctaatgcttatgtaagatgttcgtttagagatataaaataatatctagtatgatagaaaacagtttagattaaacatgaaatacagtttacttgtaattcactttgttctttatttttttaagggaccagttactctccacaagaaaattcacacaaccacagtgctcttcatagttcaaattcacattcttctaatccaagcaataacccaagcaaaacttcagatgcaagtaagtattataaacatgtccaatatggtttctttggaattttttgcaaaaaaaaaaaa

SEQ ID NO: 365291 - DNA, 855 bp, Homo sapiens
  misc_feature (16)..(16): n is a, c, g, or t
  misc_feature (29)..(30): n is a, c, g, or t
aacgttaggctaggtncgaggctgggtgnnggtatgtatgcgaggaaacagcagagactcagtgatggctgtcacgaccggaggggggactcgcagccttaccaggcacttaagtattcatcgaagagtcaccccagtagcggtgatcacagacatgaaaagatgcgagacgccggagatccttcaccaccaaataaaatgttgcggagatctgatagtcctgaaaacaaatacagtgacagcacaggtcacagtaaggccaaaaatgtgcatactcacagagttagagagagggatggtgggaccagttactctccacaagaaaattcacacaaccacagtgctcttcatagttcaaattcacattcttctaatccaagcaataacccaagcaaaacttcagatgcaccttatgattctgcagatgactggtctgagcatattagctcttctgggaaaaagtactactacaattgtcgaacagaagtttcacaatgggaaaaaccaaaagagtggcttgaaagagaacagagacaaaaagaagcaaacaagatggcagtcaacagcttcccaaaagatagggattacagaagagaggtgatgcaagcaacagccactagtgggtttgccagtggaaaatctacatcaggagacaaacccgtatcacattcttgcacaactccttccacgtcttctgcctctggactgaaccccacatctgcacctccaacatctgcttcagcggtccctgtttctcctgttccacagttaccccctttttttggcccttttttacctggcccgtttgggcccgggtaaattacagggtttaacagtccagcgcgggaaccccgg

SEQ ID NO: 365292 - DNA, 741 bp, Homo sapiens
agtactgaatagcctctagggaacttgagtggcctttccctccccctgcccccccccccccccccccgttttaaaagatcagtagtctctattcaaacttttaaaatgtcgtggtattgtaacaatatatttgatgaaagaaggttacagactcccctgaagaaccagctttcctacgctttttatttttctaacttgtctaacctgattttaaaatgactgcaattccagactaaaaacatgcttcagccctgtttcaagacattatgcttcttttaacagtccaaattagtagttttatttttcttctaaatctttgtttcacacttgtaaaatcttgggaaggaggttcttaaaactttgccaggaattgttacccatttccaaaaacagtttattatgttcaaaaaccaccatatctttgagggactgtttgaaaggggagagggcaacgcgggaaataattcactctgcgcaccggaactattgtagttcaggacttccagctactgtatttagatgttgggtttgaatatacagatttcttttcaatacctgtaaatatggctatattcttgtatttgtacgggagtgtacaaaatgacactgaaaagtaataaatatgttttgactatattgtgcagttatttcagaactgtgttttgaaagtcttagaatgcataatttgcatttgagtaaggaaatttaaaatacagattactgctgagattttaatcagtc

SEQ ID NO: 365293 - DNA, 1564 bp, Homo sapiens
acatatttatggggtacatagtgatgtttcgatacatacagtatatttttataatgttcaaaagagtaatttgcatatcatctcatttatttgtgttgggaacactcaaaatcctcttttctagctatttgacaaaatataatcaatgttatttcagtaagctcctttgaaaaaataaggaattcaaccaggatagttgagattctaccagatttcctgggggcaattagatacttaactaatctttgtgagattcgtttcgtggaaactagacctttcagatctttctaatttcattatgttacgttgtctataaaactacctggaagagactgtacctgagaatttttgaaagaccatttttagttatgggaaaaagagtgatactgctaatcctgtatattacatgagaacaagattctggtttatgtgtacttgatccatcttgttgattttgaaggtgaaacaaacttacagcttttaattagctttctgtttatgtttacatattttggttccttttctcactgagtaacagttaatacaggcaagattgttctcttttataccatatataattagtattgtgccttagaatttagaactgatgatttcatgccatcatctagtcgagagtgcattccccacccccatgttactggatttcaacaattaaaattgtggtgggagattttgtcatgctttctaaaatcaaggtgatgttaatttcacagttttctttctgtgcctaacaatctaatttttattctgcttaattttgatattttataaagttctgttgtctttgaagattttcataaactaaggtcttataaatacttacacagataattgcattctagttcagagtacctttatctcataagtgttttcctgtatgtgtgctttgatgttgttgatatttcatgtgattaaatagtattaacattttctaattgtaaaaaatatatttttaagccttatgattctgcagatgactggtctgagcatattagctcttctgggaaaaagtactactacaattgtcgaacagaagtttcacaatgggaaaaaccaaaagagtggcttgaaaggtaattagcttttaatctaattaaacattatttctctagcttggttctactggttaacatcttacagcattaaacattctaatttagcttttttatagtgctgcccatctacactttttagttgcggtggttggttgccccttcgtgttttccatagtttgtctttacttttaaaaacaaaaaacctggctgggtgcagtggctcatgcctgtaatcccagaactttgggaggccaagacgggaggatcacttgagcccaggagtttgaggccagccctggcaacatagtgagaccctgcctctacaaaaagttagctgtgagtggtagcatgcacttgtagtcctagctactaagaggctgaggtgggaggatggcttgagcctaagaggccaaagctgcagtgagccatcatggtgccactacactctagcctgagcaacagagcaagatgctatctcaaaaaaaaaa

SEQ ID NO: 365294 - DNA, 1173 bp, Homo sapiens
ggaaactcatgcccttaatgtaatttttatatgtttatctttttttttatttttagagaacagagacaaaaagaagcaaacaagatggcagtcaacagcttcccaaaagatagggattacagaagagaggtgatgcaagcaacagccactagtgggtttgccagtggaagtaagtattaattttttttctttgaaatgtatgtttgacttattcgtatttatttttcaaatctgtatccattgccatctacatatgtaaattaaaataaatagaaacatacggagattcttttatgttggatttattataccctccaccattttggtccctgaaaagggaaaagatacacggtcgagtagtacaggtatgtgtttcccactacacattatggctataatggagttgaattgcaaacagtaaaattttgttttggattggtttcccctgatccccccagacaggagcttcctctcccaccctacctgcctgcccttaagttgtgtcctattaaactggacacaaatctcaccggcttttagtctaataattgaatcatagctacacacagtgacaccagaatagctacttgtttttttatgttaccagtgagtaacttgtttatccttgtatgtagaaactaatttcaccatgatcacagatctgtgtaacatctctagtttgaatttccacacaattttaaaatgtctactagaaaacttacacctttttgttccaaggtgctcttcatctataaaaccgtgggcatacttcagtgttcttctgaggccaaattttgtgctcgtgggacaattttgtataacatacatttattttgtaattcattctccaaatttgaagctttattaaaggtattctatttccactggcttcccttaacttgaataaaatttactcccagtgccgtggctcatgcctgctgcaatcccagccctttgggaggccgaggcaggaggatggcttgaggccaagagtttgagaccggcctgtgcaacatggcgagacccagtgtccacagaattaaaaattaaccacgcagctgtaatcccagccacttgggaggctgaggcaagaagatgacttgagccctggcatttggctatgatcttgccactgcactctagcctggcaacagagtcagactctgtctcaaa

SEQ ID NO: 365295 - DNA, 4068 bp, Homo sapiens
agggccggtggcgcgcggcgtccggtgaggggcagcggcccgggctcggttccggcttccagcagcggcccgaaggcgccggagcacgctccccgctccccagaacgcagcttccgcggctgcagcccaggcagctcttcgggaagcgtccgcccgtggtctcgccagggggtttccgacctccccgcccgacagcgcaggggcgggggccgcggccggagagctcgcccgagagcaccccctcccgctgcgcctctgggcgcacgcgcagccgctgcagcctcccttatttagtccgcgatggcttccctcgcgccccaccgtcctcttccggaaggcggctccctccctgcgcagcccggagcccctgagatcagcctcgagcaggcgcccgagcgagactatccctaaacgggaacggcggtggccgactcgcgagtgaggaaaagaaggaaagggcagactggtcgcgaagagaagatccaggcctcagaggaggagaaaggccggagccagccgaggtttgccgagggcggtgttccggacccgcgcggtgcggggaggaaggccgagggtgggagaggaggggcccggcggaaactgccgaggtttcccgaaggcggcagcgtccgagttgcccggatgtagttggtggagcggcagccgccgcctgcgcgcccgcccgcctttcgcggccgctctcccccctccccgacacacactcacaggccgggcattgatggtaatgtatgcgaggaaacagcagagactcagtgatggctgtcacgaccggaggggggactcgcagccttaccaggcacttaagtattcatcgaagagtcaccccagtagcggtgatcacagacatgaaaagatgcgagacgccggagatccttcaccaccaaataaaatgttgcggagatctgatagtcctgaaaacaaatacagtgacagcacaggtcacagtaaggccaaaaatgtgcatactcacagagttagagagagggatggtgggaccagttactctccacaagaaaattcacacaaccacagtgctcttcatagttcaaattcacattcttctaatccaagcaataacccaagcaaaacttcagatgcaccttatgattctgcagatgactggtctgagcatattagctcttctgggaaaaagtactactacaattgtcgaacagaagtttcacaatgggaaaaaccaaaagagtggcttgaaagagaacagagacaaaaagaagcaaacaagatggcagtcaacagcttcccaaaagatagggattacagaagagaggtgatgcaagcaacagccactagtgggtttgccagtggaatggaagacaagcattccagtgatgccagtagtttgctcccacagaatattttgtctcaaacaagcagacacaatgacagagactacagactgccaagagcagagactcacagtagttctacgccagtacagcaccccatcaaaccagtggttcatccaactgctaccccaagcactgttccttctagtccatttacgctacagtctgatcaccagccaaagaaatcatttgatgctaatggagcatctactttatcaaaactgcctacacccacatcttctgtccctgcacagaaaacagaaagaaaagaatctacatcaggagacaaacccgtatcacattcttgcacaactccttccacgtcttctgcctctggactgaaccccacatctgcacctccaacatctgcttcagcggtccctgtttctcctgttccacagtcgccaatacctcccttacttcaggacccaaatcttcttagacaattgcttcctgctttgcaagccacgctgcagcttaataattctaatgtggacatatctaaaataaatgaagttcttacagcagctgtgacacaagcctcactgcagtctataattcataagtttcttactgctggaccatctgctttcaacataacgtctctgatttctcaagctgctcagctctctacacaagcccagccatctaatcagtctccgatgtctttaacatctgatgcgtcatccccaagatcatatgtttctccaagaataagcacacctcaaactaacacagtccctatcaaacctttgatcagtactcctcctgtttcatcacagccaaaggttagtactccagtagttaagcaaggaccagtgtcacagtcagccacacagcagcctgtaactgctgacaagcagcaaggtcatgaacctgtctctcctcgaagtcttcagcgctcaagtagccagagaagtccatcacctggtcccaatcatacttctaatagtagtaatgcatcaaatgcaacagttgtaccacagaattcttctgcccgatccacgtgttcattaacgcctgcactagcagcacacttcagtgaaaatctcataaaacacgttcaaggatggcctgcagatcatgcagagaagcaggcatcaagattacgcgaagaagcgcataacatgggaactattcacatgtccgaaatttgtactgaattaaaaaatttaagatctttagtccgagtatgtgaaattcaagcaactttgcgagagcaaaggatactatttttgagacaacaaattaaggaacttgaaaagctaaaaaatcagaattccttcatggtgtgaagatgtgaataattgcacatggttttgagaacaggaactgtaaatctgttgcccaatcttaacatttttgagctgcatttaagtagactttggaccgttaagctgggcaaaggaaatgacaaggggacggggtctgtgagagtcaattcaggggaaagatacaagattgatttgtaaaacccttgaaatgtagatttcttgtagatgtatccttcacgttgtaaatatgttttgtagagtgaagccatgggaagccatgtgtaacagagcttagacatccaaaactaatcaatgctgaggtggctaaatacctagccttttacatgtaaacctgtctgcaaaattagcttttttaaaaaaaaaaaaaaaaaaattgggggggttaatttatcattcagaaatcttgcattttcaaaaattcagtgcaagcgccaggcgatttgtgtctaaggatacgattttgaaccatatgggcagtgtacaaaatatgaaacaactgtttccacacttgcacctgatcaagagcagtgcttctccatttgttttgcagagaaatgtttttcatttcccgtgtgtttccatttccttctgaaattctgattttatccatttttttaaggctcctctttatctcctttcttaaggcactgttgctatggcacttttctataaccttttcattcctgtgtacagtagcttaaaattgcagtgattgagcataacctacttgtttgtataaattattgaaatccatttgcaccctgtaagaatggacttaaaagtactgctggacaggcatgtgtgctcaaagtacattgattgctcaaatataaggaaatggcccaatgaacgtggttgtgggaggggaaagaggaaacagagctagtcagatgtgaattgtatctgttgtaataaacatgttaaaacaaacaaaaattgttatttttcttttccttcggtcagtgcacattagcatttgaactacctggggattctttatcagaactgttcttgttgaatatttatacttaattgaaataattccttaagggaggttttgtttaaaacgtattaacaggaaattgtgtatgagatatttaatgaaataagaaattcaacaagaatgattaagtcacttcccaagtggttgtcatttgttaaaccctggtttacctgtcttgctattatgacatttcatttggaaggatgtttgtgttgtagctaactgttcaagtctggtgctgactgctgttcttagccatcacaaaacgctaaatttgtgtaattggagcttcctgctgttatctggaaatagcaggaaagcgcagctttgtatattgtttcctaaagtatattaaaataaaaaaagaaactattgctactat

SEQ ID NO: 365296 - DNA, 3410 bp, Homo sapiens
tggcgaattcggcacgagggaggaggagaagaaggaccaggcgccgccgcctgcgcgcccgcccgcctttcgcggccgctctcccccctccccgacacacactcacaggccgggcattgatgctgtcacgaccggaggggggactcgcagccttaccaggcacttaagtattcatcgaagagtcaccccagtagcggtgatcacagacatgaaaagatgcgagacgccggagatccttcaccaccaaataaaatgttgcggagatctgatagtcctgaaaacaaatacagtgacagcacaggtcacagtaaggccaaaaatgtgcatactcacagagttagagagagggatggtgggaccagttactctccacaagaaaattcacacaaccacagtgctcttcatagttcaaattcacattcttctaatccaagcaataacccaagcaaaacttcagatgcaccttatgattctgcagatgactggtctgagcatattagctcttctgggaaaaagtactactacaattgtcgaacagaagtttcacaatgggaaaaaccaaaagagtggcttgaaagagaacagagacaaaaagaagcaaacaagatggcagtcaacagcttcccaaaagatagggattacagaagagaggtgatgcaagcaacagccactagtgggtttgccagtggaatggaagacaagcattccagtgatgccagtagtttgctcccacagaatattttgtctcaaacaagcagacacaatgacagagactacagactgccaagagcagagactcacagtagttctacgccagtacagcaccccatcaaaccagtggttcatccaactgctaccccaagcactgttccttctagtccatttacgctacagtctgatcaccagccaaagaaatcatttgatgctaatggagcatctactttatcaaaactgcctacacccacatcttctgtccctgcacagaaaacagaaagaaaagaatctacatcaggagacaaacccgtatcacattcttgcacaactccttccacgtcttctgcctctggactgaaccccacatctgcacctccaacatctgcttcagcggtccctgtttctcctgttccacagtcgccaatacctcccttacttcaggacccaaatcttcttagacaattgcttcctgctttgcaagccacgctgcagcttaataattctaatgtggacatatctaaaataaatgaagttcttacagcagctgtgacacaagcctcactgcagtctataattcataagtttcttactgctggaccatctgctttcaacataacgtctctgatttctcaagctgctcagctctctacacaagcccagccatctaatcagtctccgatgtctttaacatctgatgcgtcatccccaagatcatatgtttctccaagaataagcacacctcaaactaacacagtccctatcaaacctttgatcagtactcctcctgtttcatcacagccaaaggttagtactccagtagttaagcaaggaccagtgtcacagtcagccacacagcagcctgtaactgctgacaagcagcaaggtcatgaacctgtctctcctcgaagtcttcagcgctcaagtagccagagaagtccatcacctggtcccaatcatacttctaatagtagtaatgcatcaaatgcaacagttgtaccacagaattcttctgcccgatccacgtgttcattaacgcctgcactagcagcacacttcagtgaaaatctcataaaacacgttcaaggatggcctgcagatcatgcagagaagcaggcatcaagattacgcgaagaagcgcataacatgggaactattcacatgtccgaaatttgtactgaattaaaaaatttaagatctttagtccgagtatgtgaaattcaagcaactttgcgagagcaaaggatactatttttgagacaacaaattaaggaacttgaaaagctaaaaaatcagaattccttcatggtgtgaagatgtgaataattgcacatggttttgagaacaggaactgtaaatctgttgcccaatcttaacatttttgagctgcatttaagtagactttggaccgttaagctgggcaaaggaaatgacaaggggacggggtctgtgagagtcaattcaggggaaagatacaagattgatttgtaaaacccttgaaatgtagatttcttgtagatgtatccttcacgttgtaaatatgttttgtagagtgaagccatgggaagccatgtgtaacagagcttagacatccaaaactaatcaatgctgaggtggctaaatacctagccttttacatgtaaacctgtctgcaaaattagcttttttaaaaaaaaaaaaaaaaaaattgggggggttaatttatcattcagaaatcttgcattttcaaaaattcagtgcaagcgccaggcgatttgtgtctaaggatacgattttgaaccatatgggcagtgtacaaaatatgaaacaactgtttccacacttgcacctgatcaagagcagtgcttctccatttgttttgcagagaaatgtttttcatttcccgtgtgtttccatttccttctgaaattctgattttatccatttttttaaggctcctctttatctcctttcttaaggcactgttgctatggcacttttctataaccttttcattcctgtgtacagtagcttaaaattgcagtgattgagcataacctacttgtttgtataaattattgaaatccatttgcaccctgtaagaatggacttaaaagtactgctggacaggcatgtgtgctcaaagtacattgattgctcaaatataaggaaatggcccaatgaacgtggttgtgggaggggaaagaggaaacagagctagtcagatgtgaattgtatctgttgtaataaacatgttaaaacaaacaaaaattgttatttttcttttccttcggtcagtgcacattagcatttgaactacctggggattctttatcagaactgttcttgttgaatatttatacttaattgaaataattccttaagggaggttttgtttaaaacgtattaacaggaaattgtgtatgagatatttaatgaaataagaaattcaacaagaatgattaagtcacttcccaagtggttgtcatttgttaaaccctggtttacctgtcttgctattatgacatttcatttggaaggatgtttgtgttgtagctaactgttcaagtctggtgctgactgctgttcttagccatcacaaaacgctaaatttgtgtaattggagcttcctgctgttatctggaaatagcaggaaagcgcagctttgtatattgtttcctaaagtatattaaaataaaaaaagaaactattgctactat

SEQ ID NO: 365297 - DNA, 4106 bp, Homo sapiens
agggccggtggcgcgcggcgtccggtgaggggcagcggcccgggctcggttccggcttccagcagcggcccgaaggcgccggagcacgctccccgctccccagaacgcagcttccgcggctgcagcccaggcagctcttcgggaagcgtccgcccgtggtctcgccagggggtttccgacctccccgcccgacagcgcaggggcgggggccgcggccggagagctcgcccgagagcaccccctcccgctgcgcctctgggcgcacgcgcagccgctgcagcctcccttatttagtccgcgatggcttccctcgcgccccaccgtcctcttccggaaggcggctccctccctgcgcagcccggagcccctgagatcagcctcgagcaggcgcccgagcgagactatccctaaacgggaacggcggtggccgactcgcgagtgaggaaaagaaggaaagggcagactggtcgcgaagagaagatccaggcctcagaggaggagaaaggccggagccagccgaggtttgccgagggcggtgttccggacccgcgcggtgcggggaggaaggccgagggtgggagaggaggggcccggcggaaactgccgaggtttcccgaaggcggcagcgtccgagttgcccggatgtagttggtggagcggcagccgccgcctgcgcgcccgcccgcctttcgcggccgctctcccccctccccgacacacactcacaggccgggcattgatggtaatgtatgcgaggaaacagcagagactcagtgatggctgtcacgaccggaggggggactcgcagccttaccaggcacttaagtattcatcgaagagtcaccccagtagcggtgatcacagacatgaaaagatgcgagacgccggagatccttcaccaccaaataaaatgttgcggagatctgatagtcctgaaaacaaatacagtgacagcacaggtcacagtaaggccaaaaatgtgcatactcacagagttagagagagggatggtgggaccagttactctccacaagaaaattcacacaaccacagtgctcttcatagttcaaattcacattcttctaatccaagcaataacccaagcaaaacttcagatgcaccttatgattctgcagatgactggtctgagcatattagctcttctgggaaaaagtactactacaattgtcgaacagaagtttcacaatgggaaaaaccaaaagagtggcttgaaagagaacagagacaaaaagaagcaaacaagatggcagtcaacagcttcccaaaagatagggattacagaagagaggtgatgcaagcaacagccactagtgggtttgccagtggaatcattccaacatctgttttttcgaactgtgaactaaagtggaagacaagcattccagtgatgccagtagtttgctcccacagaatattttgtctcaaacaagcagacacaatgacagagactacagactgccaagagcagagactcacagtagttctacgccagtacagcaccccatcaaaccagtggttcatccaactgctaccccaagcactgttccttctagtccatttacgctacagtctgatcaccagccaaagaaatcatttgatgctaatggagcatctactttatcaaaactgcctacacccacatcttctgtccctgcacagaaaacagaaagaaaagaatctacatcaggagacaaacccgtatcacattcttgcacaactccttccacgtcttctgcctctggactgaaccccacatctgcacctccaacatctgcttcagcggtccctgtttctcctgttccacagtcgccaatacctcccttacttcaggacccaaatcttcttagacaattgcttcctgctttgcaagccacgctgcagcttaataattctaatgtggacatatctaaaataaatgaagttcttacagcagctgtgacacaagcctcactgcagtctataattcataagtttcttactgctggaccatctgctttcaacataacgtctctgatttctcaagctgctcagctctctacacaagcccagccatctaatcagtctccgatgtctttaacatctgatgcgtcatccccaagatcatatgtttctccaagaataagcacacctcaaactaacacagtccctatcaaacctttgatcagtactcctcctgtttcatcacagccaaaggttagtactccagtagttaagcaaggaccagtgtcacagtcagccacacagcagcctgtaactgctgacaagcagcaaggtcatgaacctgtctctcctcgaagtcttcagcgctcaagtagccagagaagtccatcacctggtcccaatcatacttctaatagtagtaatgcatcaaatgcaacagttgtaccacagaattcttctgcccgatccacgtgttcattaacgcctgcactagcagcacacttcagtgaaaatctcataaaacacgttcaaggatggcctgcagatcatgcagagaagcaggcatcaagattacgcgaagaagcgcataacatgggaactattcacatgtccgaaatttgtactgaattaaaaaatttaagatctttagtccgagtatgtgaaattcaagcaactttgcgagagcaaaggatactatttttgagacaacaaattaaggaacttgaaaagctaaaaaatcagaattccttcatggtgtgaagatgtgaataattgcacatggttttgagaacaggaactgtaaatctgttgcccaatcttaacatttttgagctgcatttaagtagactttggaccgttaagctgggcaaaggaaatgacaaggggacggggtctgtgagagtcaattcaggggaaagatacaagattgatttgtaaaacccttgaaatgtagatttcttgtagatgtatccttcacgttgtaaatatgttttgtagagtgaagccatgggaagccatgtgtaacagagcttagacatccaaaactaatcaatgctgaggtggctaaatacctagccttttacatgtaaacctgtctgcaaaattagcttttttaaaaaaaaaaaaaaaaaaattgggggggttaatttatcattcagaaatcttgcattttcaaaaattcagtgcaagcgccaggcgatttgtgtctaaggatacgattttgaaccatatgggcagtgtacaaaatatgaaacaactgtttccacacttgcacctgatcaagagcagtgcttctccatttgttttgcagagaaatgtttttcatttcccgtgtgtttccatttccttctgaaattctgattttatccatttttttaaggctcctctttatctcctttcttaaggcactgttgctatggcacttttctataaccttttcattcctgtgtacagtagcttaaaattgcagtgattgagcataacctacttgtttgtataaattattgaaatccatttgcaccctgtaagaatggacttaaaagtactgctggacaggcatgtgtgctcaaagtacattgattgctcaaatataaggaaatggcccaatgaacgtggttgtgggaggggaaagaggaaacagagctagtcagatgtgaattgtatctgttgtaataaacatgttaaaacaaacaaaaattgttatttttcttttccttcggtcagtgcacattagcatttgaactacctggggattctttatcagaactgttcttgttgaatatttatacttaattgaaataattccttaagggaggttttgtttaaaacgtattaacaggaaattgtgtatgagatatttaatgaaataagaaattcaacaagaatgattaagtcacttcccaagtggttgtcatttgttaaaccctggtttacctgtcttgctattatgacatttcatttggaaggatgtttgtgttgtagctaactgttcaagtctggtgctgactgctgttcttagccatcacaaaacgctaaatttgtgtaattggagcttcctgctgttatctggaaatagcaggaaagcgcagctttgtatattgtttcctaaagtatattaaaataaaaaaagaaactattgctactat

SEQ ID NO: 365298 - DNA, 3608 bp, Homo sapiens
agggccggtggcgcgcggcgtccggtgaggggcagcggcccgggctcggttccggcttccagcagcggcccgaaggcgccggagcacgctccccgctccccagaacgcagcttccgcggctgcagcccaggcagctcttcgggaagcgtccgcccgtggtctcgccagggggtttccgacctccccgcccgacagcgcaggggcgggggccgcggccggagagctcgcccgagagcaccccctcccgctgcgcctctgggcgcacgcgcagccgctgcagcctcccttatttagtccgcgatggcttccctcgcgccccaccgtcctcttccggaaggcggctccctccctgcgcagcccggagcccctgagatcagcctcgagcaggcgcccgagcgagactatccctaaacgggaacggcggtggccgactcgcgagtgaggaaaagaaggaaagggcagactggtcgcgaagagaagatccaggcctcagaggaggagaaaggccggagccagccgaggtttgccgagggcggtgttccggacccgcgcggtgcggggaggaaggccgagggtgggagaggaggggcccggcggaaactgccgaggtttcccgaaggcggcagcgtccgagttgcccggatgtagttggtggagcggcagccgccgcctgcgcgcccgcccgcctttcgcggccgctctcccccctccccgacacacactcacaggccgggcattgatggtaatgtatgcgaggaaacagcagagactcagtgatggctgtcacgaccggaggggggactcgcagccttaccaggcacttaagtattcatcgaagagtcaccccagtagcggtgatcacagacatgaaaagatgcgagacgccggagatccttcaccaccaaataaaatgttgcggagatctgatagtcctgaaaacaaatacagtgacagcacaggtcacagtaaggccaaaaatgtgcatactcacagagttagagagagggatggtgggaccagttactctccacaagaaaattcacacaaccacagtgctcttcatagttcaaattcacattcttctaatccaagcaataacccaagcaaaacttcagatgcaccttatgattctgcagatgactggtctgagcatattagctcttctgggaaaaagtactactacaattgtcgaacagaagtttcacaatgggaaaaaccaaaagagtggcttgaaagagaacagagacaaaaagaagcaaacaagatggcagtcaacagcttcccaaaagatagggattacagaagagaggtgatgcaagcaacagccactagtgggtttgccagtggaatggaagacaagcattccagtgatgccagtagtttgctcccacagaatattttgtctcaaacaagcagacacaatgacagagactacagactgccaagagcagagactcacagtagttctacgccagtacagcaccccatcaaaccagtggttcatccaactgctaccccaagcactgttccttctagtccatttacgctacagtctgatcaccagccaaagaaatcatttgatgctaatggagcatctactttatcaaaactgcctacacccacatcttctgtccctgcacagaaaacagaaagaaaagaatctacatcaggagacaaacccgtatcacattcttgcacaactccttccacgtcttctgcctctggactgaaccccacatctgcacctccaacatctgcttcagcggtccctgtttctcctgttccacagtcgccaatacctcccttacttcaggacccaaatcttcttagacaattgcttcctgctttgcaagccacgctgcagcttaataattctaatgtggacatatctaaaataaatgaagttcttacagcagctgtgacacaagcctcactgcagtctataattcataagtttcttactgctggaccatctgctttcaacataacgtctctgatttctcaagctgctcagctctctacacaagcccagccatctaatcagtctccgatgtctttaacatctgatgcgtcatccccaagatcatatgtttctccaagaataagcacacctcaaactaacacagtccctatcaaacctttgatcagtactcctcctgtttcatcacagccaaaggttagtactccagtagttaagcaaggaccagtgtcacagtcagccacacagcagcctgtaactgctgacaagcagcaaggtcatgaacctgtctctcctcgaagtcttcagcgctcaagtagccagagaagtccatcacctggtcccaatcatacttctaatagtagtaatgcatcaaatgcaacagttgtaccacagaattcttctgcccgatccacgtgttcattaacgcctgcactagcagcacacttcagtgaaaatctcataaaacacgttcaaggatggcctgcagatcatgcagagaagcaggcatcaagattacgcgaagaagcgcataacatgggaactattcacatgtccgaaatttgtactgaattaaaaaatttaagatctttagtccgagtatgtgaaattcaagcaactttgcgagagcaaaggatactatttttgagacaacaaattaaggaacttgaaaagctaaaaaatcagaattccttcatggtgtgaagatgtgaataattgcacatggttttgagaacaggaactgtaaatctgttgcccaatcttaacatttttgagctgcatttaagtagactttggaccgttaagctgggcaaaggaaatgacaaggggacggggtctgtgagagtcaattcaggggaaagatacaagattgatttgtaaaacccttgaaatgtagatttcttgtagatgtatccttcacgttgtaaatatgttttgtagagtgaagccatgggaagccatgtgtaacagagcttagacatccaaaactaatcaatgctgaggtggctaaatacctagccttttacatgtaaacctgtctgcaaaattagcttttttaaaaaaaaaaaaaaaaaaattgggggggttaatttatcattcagaaatcttgcattttcaaaaattcagtgcaagcgccaggcgatttgtgtctaaggatacgattttgaaccatatgggcagtgtacaaaatatgaaacaactgtttccacacttgcacctgatcaagagcagtgcttctccatttgttttgcagagaaatgtttttcatttcccgtgtgtttccatttccttctgaaattctgattttatccatttttttaaggctcctctttatctcctttcttaaggcactgttgctatggcacttttctataaccttttcattcctgtgtacagtagcttaaaattgcagtgattgagcataacctacttgtttgtataaattattgaaatccatttgcaccctgtaagaatggacttaaaagtactgctggacaggcatgtgtgctcaaagtacattgattgctcaaatataaggaaatggcccaatgaacgtggttgtgggaggggaaagaggaaacagagctagtcagatgtgaattgtatctgttgtaataaacatgttaaa

SEQ ID NO: 365299 - DNA, 3759 bp, Homo sapiens
agggccggtggcgcgcggcgtccggtgaggggcagcggcccgggctcggttccggcttccagcagcggcccgaaggcgccggagcacgctccccgctccccagaacgcagcttccgcggctgcagcccaggcagctcttcgggaagcgtccgcccgtggtctcgccagggggtttccgacctccccgcccgacagcgcaggggcgggggccgcggccggagagctcgcccgagagcaccccctcccgctgcgcctctgggcgcacgcgcagccgctgcagcctcccttatttagtccgcgatggcttccctcgcgccccaccgtcctcttccggaaggcggctccctccctgcgcagcccggagcccctgagatcagcctcgagcaggcgcccgagcgagactatccctaaacgggaacggcggtggccgactcgcgagtgaggaaaagaaggaaagggcagactggtcgcgaagagaagatccaggcctcagaggaggagaaaggccggagccagccgaggtttgccgagggcggtgttccggacccgcgcggtgcggggaggaaggccgagggtgggagaggaggggcccggcggaaactgccgaggtttcccgaaggcggcagcgtccgagttgcccggatgtagttggtggagcggcagccgccgcctgcgcgcccgcccgcctttcgcggccgctctcccccctccccgacacacactcacaggccgggcattgatggtaatgtatgcgaggaaacagcagagactcagtgatggctgtcacgaccggaggggggactcgcagccttaccaggcacttaagtattcatcgaagagtcaccccagtagcggtgatcacagacatgaaaagatgcgagacgccggagatccttcaccaccaaataaaatgttgcggagatctgatagtcctgaaaacaaatacagtgacagcacaggtcacagtaaggccaaaaatgtgcatactcacagagttagagagagggatggtgggaccagttactctccacaagaaaattcacacaaccacagtgctcttcatagttcaaattcacattcttctaatccaagcaataacccaagcaaaacttcagatgcaccttatgattctgcagatgactggtctgagcatattagctcttctgggaaaaagtactactacaattgtcgaacagaagtttcacaatgggaaaaaccaaaagagtggcttgaaagagaacagagacaaaaagaagcaaacaagatggcagtcaacagcttcccaaaagatagggattacagaagagaggtgatgcaagcaacagccactagtgggtttgccagtggaaaatctacatcaggagacaaacccgtatcacattcttgcacaactccttccacgtcttctgcctctggactgaaccccacatctgcacctccaacatctgcttcagcggtccctgtttctcctgttccacagtcgccaatacctcccttacttcaggacccaaatcttcttagacaattgcttcctgctttgcaagccacgctgcagcttaataattctaatgtggacatatctaaaataaatgaagttcttacagcagctgtgacacaagcctcactgcagtctataattcataagtttcttactgctggaccatctgctttcaacataacgtctctgatttctcaagctgctcagctctctacacaagcccagccatctaatcagtctccgatgtctttaacatctgatgcgtcatccccaagatcatatgtttctccaagaataagcacacctcaaactaacacagtccctatcaaacctttgatcagtactcctcctgtttcatcacagccaaaggttagtactccagtagttaagcaaggaccagtgtcacagtcagccacacagcagcctgtaactgctgacaagcagcaaggtcatgaacctgtctctcctcgaagtcttcagcgctcaagtagccagagaagtccatcacctggtcccaatcatacttctaatagtagtaatgcatcaaatgcaacagttgtaccacagaattcttctgcccgatccacgtgttcattaacgcctgcactagcagcacacttcagtgaaaatctcataaaacacgttcaaggatggcctgcagatcatgcagagaagcaggcatcaagattacgcgaagaagcgcataacatgggaactattcacatgtccgaaatttgtactgaattaaaaaatttaagatctttagtccgagtatgtgaaattcaagcaactttgcgagagcaaaggatactatttttgagacaacaaattaaggaacttgaaaagctaaaaaatcagaattccttcatggtgtgaagatgtgaataattgcacatggttttgagaacaggaactgtaaatctgttgcccaatcttaacatttttgagctgcatttaagtagactttggaccgttaagctgggcaaaggaaatgacaaggggacggggtctgtgagagtcaattcaggggaaagatacaagattgatttgtaaaacccttgaaatgtagatttcttgtagatgtatccttcacgttgtaaatatgttttgtagagtgaagccatgggaagccatgtgtaacagagcttagacatccaaaactaatcaatgctgaggtggctaaatacctagccttttacatgtaaacctgtctgcaaaattagcttttttaaaaaaaaaaaaaaaaaaattgggggggttaatttatcattcagaaatcttgcattttcaaaaattcagtgcaagcgccaggcgatttgtgtctaaggatacgattttgaaccatatgggcagtgtacaaaatatgaaacaactgtttccacacttgcacctgatcaagagcagtgcttctccatttgttttgcagagaaatgtttttcatttcccgtgtgtttccatttccttctgaaattctgattttatccatttttttaaggctcctctttatctcctttcttaaggcactgttgctatggcacttttctataaccttttcattcctgtgtacagtagcttaaaattgcagtgattgagcataacctacttgtttgtataaattattgaaatccatttgcaccctgtaagaatggacttaaaagtactgctggacaggcatgtgtgctcaaagtacattgattgctcaaatataaggaaatggcccaatgaacgtggttgtgggaggggaaagaggaaacagagctagtcagatgtgaattgtatctgttgtaataaacatgttaaaacaaacaaaaattgttatttttcttttccttcggtcagtgcacattagcatttgaactacctggggattctttatcagaactgttcttgttgaatatttatacttaattgaaataattccttaagggaggttttgtttaaaacgtattaacaggaaattgtgtatgagatatttaatgaaataagaaattcaacaagaatgattaagtcacttcccaagtggttgtcatttgttaaaccctggtttacctgtcttgctattatgacatttcatttggaaggatgtttgtgttgtagctaactgttcaagtctggtgctgactgctgttcttagccatcacaaaacgctaaatttgtgtaattggagcttcctgctgttatctggaaatagcaggaaagcgcagctttgtatattgtttcctaaagtatattaaaataaaaaaagaaactattgctactat

SEQ ID NO: 365300 - DNA, 3101 bp, Homo sapiens
tggcgaattcggcacgagggaggaggagaagaaggaccaggcgccgccgcctgcgcgcccgcccgcctttcgcggccgctctcccccctccccgacacacactcacaggccgggcattgatgctgtcacgaccggaggggggactcgcagccttaccaggcacttaagtattcatcgaagagtcaccccagtagcggtgatcacagacatgaaaagatgcgagacgccggagatccttcaccaccaaataaaatgttgcggagatctgatagtcctgaaaacaaatacagtgacagcacaggtcacagtaaggccaaaaatgtgcatactcacagagttagagagagggatggtgggaccagttactctccacaagaaaattcacacaaccacagtgctcttcatagttcaaattcacattcttctaatccaagcaataacccaagcaaaacttcagatgcaccttatgattctgcagatgactggtctgagcatattagctcttctgggaaaaagtactactacaattgtcgaacagaagtttcacaatgggaaaaaccaaaagagtggcttgaaagagaacagagacaaaaagaagcaaacaagatggcagtcaacagcttcccaaaagatagggattacagaagagaggtgatgcaagcaacagccactagtgggtttgccagtggaaaatctacatcaggagacaaacccgtatcacattcttgcacaactccttccacgtcttctgcctctggactgaaccccacatctgcacctccaacatctgcttcagcggtccctgtttctcctgttccacagtcgccaatacctcccttacttcaggacccaaatcttcttagacaattgcttcctgctttgcaagccacgctgcagcttaataattctaatgtggacatatctaaaataaatgaagttcttacagcagctgtgacacaagcctcactgcagtctataattcataagtttcttactgctggaccatctgctttcaacataacgtctctgatttctcaagctgctcagctctctacacaagcccagccatctaatcagtctccgatgtctttaacatctgatgcgtcatccccaagatcatatgtttctccaagaataagcacacctcaaactaacacagtccctatcaaacctttgatcagtactcctcctgtttcatcacagccaaaggttagtactccagtagttaagcaaggaccagtgtcacagtcagccacacagcagcctgtaactgctgacaagcagcaaggtcatgaacctgtctctcctcgaagtcttcagcgctcaagtagccagagaagtccatcacctggtcccaatcatacttctaatagtagtaatgcatcaaatgcaacagttgtaccacagaattcttctgcccgatccacgtgttcattaacgcctgcactagcagcacacttcagtgaaaatctcataaaacacgttcaaggatggcctgcagatcatgcagagaagcaggcatcaagattacgcgaagaagcgcataacatgggaactattcacatgtccgaaatttgtactgaattaaaaaatttaagatctttagtccgagtatgtgaaattcaagcaactttgcgagagcaaaggatactatttttgagacaacaaattaaggaacttgaaaagctaaaaaatcagaattccttcatggtgtgaagatgtgaataattgcacatggttttgagaacaggaactgtaaatctgttgcccaatcttaacatttttgagctgcatttaagtagactttggaccgttaagctgggcaaaggaaatgacaaggggacggggtctgtgagagtcaattcaggggaaagatacaagattgatttgtaaaacccttgaaatgtagatttcttgtagatgtatccttcacgttgtaaatatgttttgtagagtgaagccatgggaagccatgtgtaacagagcttagacatccaaaactaatcaatgctgaggtggctaaatacctagccttttacatgtaaacctgtctgcaaaattagcttttttaaaaaaaaaaaaaaaaaaattgggggggttaatttatcattcagaaatcttgcattttcaaaaattcagtgcaagcgccaggcgatttgtgtctaaggatacgattttgaaccatatgggcagtgtacaaaatatgaaacaactgtttccacacttgcacctgatcaagagcagtgcttctccatttgttttgcagagaaatgtttttcatttcccgtgtgtttccatttccttctgaaattctgattttatccatttttttaaggctcctctttatctcctttcttaaggcactgttgctatggcacttttctataaccttttcattcctgtgtacagtagcttaaaattgcagtgattgagcataacctacttgtttgtataaattattgaaatccatttgcaccctgtaagaatggacttaaaagtactgctggacaggcatgtgtgctcaaagtacattgattgctcaaatataaggaaatggcccaatgaacgtggttgtgggaggggaaagaggaaacagagctagtcagatgtgaattgtatctgttgtaataaacatgttaaaacaaacaaaaattgttatttttcttttccttcggtcagtgcacattagcatttgaactacctggggattctttatcagaactgttcttgttgaatatttatacttaattgaaataattccttaagggaggttttgtttaaaacgtattaacaggaaattgtgtatgagatatttaatgaaataagaaattcaacaagaatgattaagtcacttcccaagtggttgtcatttgttaaaccctggtttacctgtcttgctattatgacatttcatttggaaggatgtttgtgttgtagctaactgttcaagtctggtgctgactgctgttcttagccatcacaaaacgctaaatttgtgtaattggagcttcctgctgttatctggaaatagcaggaaagcgcagctttgtatattgtttcctaaagtatattaaaataaaaaaagaaactattgctactat

SEQ ID NO: 365301 - DNA, 3750 bp, Homo sapiens
agggccggtggcgcgcggcgtccggtgaggggcagcggcccgggctcggttccggcttccagcagcggcccgaaggcgccggagcacgctccccgctccccagaacgcagcttccgcggctgcagcccaggcagctcttcgggaagcgtccgcccgtggtctcgccagggggtttccgacctccccgcccgacagcgcaggggcgggggccgcggccggagagctcgcccgagagcaccccctcccgctgcgcctctgggcgcacgcgcagccgctgcagcctcccttatttagtccgcgatggcttccctcgcgccccaccgtcctcttccggaaggcggctccctccctgcgcagcccggagcccctgagatcagcctcgagcaggcgcccgagcgagactatccctaaacgggaacggcggtggccgactcgcgagtgaggaaaagaaggaaagggcagactggtcgcgaagagaagatccaggcctcagaggaggagaaaggccggagccagccgaggtttgccgagggcggtgttccggacccgcgcggtgcggggaggaaggccgagggtgggagaggaggggcccggcggaaactgccgaggtttcccgaaggcggcagcgtccgagttgcccggatgtagttggtggagcggcagccgccgcctgcgcgcccgcccgcctttcgcggccgctctcccccctccccgacacacactcacaggccgggcattgatggtaatgtatgcgaggaaacagcagagactcagtgatggctgtcacgaccggaggggggactcgcagccttaccaggcacttaagtattcatcgaagagtcaccccagtagcggtgatcacagacatgaaaagatgcgagacgccggagatccttcaccaccaaataaaatgttgcggagatctgatagtcctgaaaacaaatacagtgacagcacaggtcacagtaaggccaaaaatgtgcatactcacagagttagagagagggatggtgggaccagttactctccacaagaaaattcacacaaccacagtgctcttcatagttcaaattcacattcttctaatccaagcaataacccaagcaaaacttcagatgcaccttatgattctgcagatgactggtctgagcatattagctcttctgggaaaaagtactactacaattgtcgaacagaagtttcacaatgggaaaaaccaaaagagtggcttgaaagagaacagagacaaaaagaagcaaacaagatggcagtcaacagcttcccaaaagatagggattacagaagagaggtgatgcaagcaacagccactagtgggtttgccagtggaatggaagacaagcattccagtgatgccagtagtttgctcccacagaatattttgtctcaaacaagcagacacaatgacagagactacagactgccaagagcagagactcacagtagttctacgccagtacagcaccccatcaaaccagtggttcatccaactgctaccccaagcactgttccttctagtccatttacgctacagtctgatcaccagccaaagaaatcatttgatgctaatggagcatctactttatcaaaactgcctacacccacatcttctgtccctgcacagaaaacagaaagaaaagaatctacatcaggagacaaacccgtatcacattcttgcacaactccttccacgtcttctgcctctggactgaaccccacatctgcacctccaacatctgcttcagcggtccctgtttctcctgttccacagtcgccaatacctcccttacttcaggacccaaatcttcttagacaattgcttcctgctttgcaagccacgctgcagcttaataattctaatgtggacatatctaaaataaatgaagttcttacagcagctgtgacacaagcctcactgcagtctataattcataagtttcttactgctggaccatctgctttcaacataacgtctctgatttctcaagctgctcagctctctacacaagcccagccatctaatcagtctccgatgtctttaacatctgatgcgtcatccccaagatcatatgtttctccaagaataagcacacctcaaactaacacagtccctatcaaacctttgatcagtactcctcctgtttcatcacagccaaaggttagtactccagtagttaagcaaggaccagtgtcacagtcagccacacagcagcctgtaactgctgacaagcagcaaggtcatgaacctgtctctcctcgaagtcttcagcgctcaagtagccagagaagtccatcacctggtcccaatcatacttctaatagtagtaatgcatcaaatgcaacagttgtaccacagaattcttctgcccgatccacgtgttcattaacgcctgcactagcagcacacttcagtgaaaatctcataaaacacgttcaaggatggcctgcagatcatgcagagaagcaggcatcaagattacgcgaagaagcgcataacatgggaactattcacatgtccgaaatttgtactgaattaaaaaatttaagatctttagtccgagtatgtgaaattcaagcaactttgcgagagcaaaggatactatttttgagacaacaaattaaggaacttgaaaagctaaaaaatcagaattccttcatggtgtgaagatgtgaataattgcacatggttttgagaacaggaactgtaaatctgttgcccaatcttaacatttttgagctgcatttaagtagactttggaccgttaagctgggcaaaggaaatgacaaggggacggggtctgtgagagtcaattcaggggaaagatacaagattgatttgtaaaacccttgaaatgtagatttcttgtagatgtatccttcacgttgtaaatatgttttgtagagtgaagccatgggaagccatgtgtaacagagcttagacatccaaaactaatcaatgctgaggtggctaaatacctagccttttacatgtaaacctgtctgcaaaattagcttttttaaaaaaaaaaaaaaaaaaattgggggggatcccggaagcgcgagcaaggccgccagatgtgcaggcacgcggaggaggagaaagagatggacctcccggactcggcctcgagggtcttctgcggccgcaatcctgagcttggtgaacacagatgatgtcaacgccataatcctggcccagaagaacatgctggaccgcttggagaaagaccatctgagatgctgctcaagttcaacaaccttgtccagtgcccgcctgacagacagattgagagaagggttttccgtgcacacacacgaggaccctagtagaagattgaacggggacctggacagcatcttccgccgttatcaggacgctgaaaggggaaactgggccaggaaagcacccaagaggacccttacagcatatattcccaggaggaatcctttcccgtggacggaacagacggtattgaaagacccccaattcccaagccacgagataatcatagaggacacaaccaatttgcctactcttcagaaacacagaagcaactggggctctcgtgttgaacacccaagcccccgggaaaccggttgctcgcccctaccaattaagcccccggttgtgcagaggaaccggtcccaattgtccaggacgtggtttccccaagaccaataaatgggcggaggccagacagatgacgagggaatgacgggagaaataccagg

SEQ ID NO: 365302 - DNA, 3330 bp, Homo sapiens
agggccggtggcgcgcggcgtccggtgaggggcagcggcccgggctcggttccggcttccagcagcggcccgaaggcgccggagcacgctccccgctccccagaacgcagcttccgcggctgcagcccaggcagctcttcgggaagcgtccgcccgtggtctcgccagggggtttccgacctccccgcccgacagcgcaggggcgggggccgcggccggagagctcgcccgagagcaccccctcccgctgcgcctctgggcgcacgcgcagccgctgcagcctcccttatttagtccgcgatggcttccctcgcgccccaccgtcctcttccggaaggcggctccctccctgcgcagcccggagcccctgagatcagcctcgagcaggcgcccgagcgagactatccctaaacgggaacggcggtggccgactcgcgagtgaggaaaagaaggaaagggcagactggtcgcgaagagaagatccaggcctcagaggaggagaaaggccggagccagccgaggtttgccgagggcggtgttccggacccgcgcggtgcggggaggaaggccgagggtgggagaggaggggcccggcggaaactgccgaggtttcccgaaggcggcagcgtccgagttgcccggatgtagttggtggagcggcagccgccgcctgcgcgcccgcccgcctttcgcggccgctctcccccctccccgacacacactcacaggccgggcattgatggtaatgtatgcgaggaaacagcagagactcagtgatggctgtcacgaccggaggggggactcgcagccttaccaggcacttaagtattcatcgaagagtcaccccagtagcggtgatcacagacatgaaaagatgcgagacgccggagatccttcaccaccaaataaaatgttgcggagatctgatagtcctgaaaacaaatacagtgacagcacaggtcacagtaaggccaaaaatgtgcatactcacagagttagagagagggatggtgggaccagttactctccacaagaaaattcacacaaccacacgccaatacctcccttacttcaggacccaaatcttcttagacaattgcttcctgctttgcaagccacgctgcagcttaataattctaatgtggacatatctaaaataaatgaagttcttacagcagctgtgacacaagcctcactgcagtctataattcataagtttcttactgctggaccatctgctttcaacataacgtctctgatttctcaagctgctcagctctctacacaagcccagccatctaatcagtctccgatgtctttaacatctgatgcgtcatccccaagatcatatgtttctccaagaataagcacacctcaaactaacacagtccctatcaaacctttgatcagtactcctcctgtttcatcacagccaaaggttagtactccagtagttaagcaaggaccagtgtcacagtcagccacacagcagcctgtaactgctgacaagcagcaaggtcatgaacctgtctctcctcgaagtcttcagcgctcaagtagccagagaagtccatcacctggtcccaatcatacttctaatagtagtaatgcatcaaatgcaacagttgtaccacagaattcttctgcccgatccacgtgttcattaacgcctgcactagcagcacacttcagtgaaaatctcataaaacacgttcaaggatggcctgcagatcatgcagagaagcaggcatcaagattacgcgaagaagcgcataacatgggaactattcacatgtccgaaatttgtactgaattaaaaaatttaagatctttagtccgagtatgtgaaattcaagcaactttgcgagagcaaaggatactatttttgagacaacaaattaaggaacttgaaaagctaaaaaatcagaattccttcatggtgtgaagatgtgaataattgcacatggttttgagaacaggaactgtaaatctgttgcccaatcttaacatttttgagctgcatttaagtagactttggaccgttaagctgggcaaaggaaatgacaaggggacggggtctgtgagagtcaattcaggggaaagatacaagattgatttgtaaaacccttgaaatgtagatttcttgtagatgtatccttcacgttgtaaatatgttttgtagagtgaagccatgggaagccatgtgtaacagagcttagacatccaaaactaatcaatgctgaggtggctaaatacctagccttttacatgtaaacctgtctgcaaaattagcttttttaaaaaaaaaaaaaaaaaaattgggggggttaatttatcattcagaaatcttgcattttcaaaaattcagtgcaagcgccaggcgatttgtgtctaaggatacgattttgaaccatatgggcagtgtacaaaatatgaaacaactgtttccacacttgcacctgatcaagagcagtgcttctccatttgttttgcagagaaatgtttttcatttcccgtgtgtttccatttccttctgaaattctgattttatccatttttttaaggctcctctttatctcctttcttaaggcactgttgctatggcacttttctataaccttttcattcctgtgtacagtagcttaaaattgcagtgattgagcataacctacttgtttgtataaattattgaaatccatttgcaccctgtaagaatggacttaaaagtactgctggacaggcatgtgtgctcaaagtacattgattgctcaaatataaggaaatggcccaatgaacgtggttgtgggaggggaaagaggaaacagagctagtcagatgtgaattgtatctgttgtaataaacatgttaaaacaaacaaaaattgttatttttcttttccttcggtcagtgcacattagcatttgaactacctggggattctttatcagaactgttcttgttgaatatttatacttaattgaaataattccttaagggaggttttgtttaaaacgtattaacaggaaattgtgtatgagatatttaatgaaataagaaattcaacaagaatgattaagtcacttcccaagtggttgtcatttgttaaaccctggtttacctgtcttgctattatgacatttcatttggaaggatgtttgtgttgtagctaactgttcaagtctggtgctgactgctgttcttagccatcacaaaacgctaaatttgtgtaattggagcttcctgctgttatctggaaatagcaggaaagcgcagctttgtatattgtttcctaaagtatattaaaataaaaaaagaaactattgctactat

SEQ ID NO: 365303 - DNA, 5500 bp, Homo sapiens
agggccggtggcgcgcggcgtccggtgaggggcagcggcccgggctcggttccggcttccagcagcggcccgaaggcgccggagcacgctccccgctccccagaacgcagcttccgcggctgcagcccaggcagctcttcgggaagcgtccgcccgtggtctcgccagggggtttccgacctccccgcccgacagcgcaggggcgggggccgcggccggagagctcgcccgagagcaccccctcccgctgcgcctctgggcgcacgcgcagccgctgcagcctcccttatttagtccgcgatggcttccctcgcgccccaccgtcctcttccggaaggcggctccctccctgcgcagcccggagcccctgagatcagcctcgagcaggcgcccgagcgagactatccctaaacgggaacggcggtggccgactcgcgagtgaggaaaagaaggaaagggcagactggtcgcgaagagaagatccaggcctcagaggaggagaaaggccggagccagccgaggtttgccgagggcggtgttccggacccgcgcggtgcggggaggaaggccgagggtgggagaggaggggcccggcggaaactgccgaggtttcccgaaggcggcagcgtccgagttgcccggatgtagttggtggagcggcagccgccgcctgcgcgcccgcccgcctttcgcggccgctctcccccctccccgacacacactcacaggccgggcattgatggtaatgtatgcgaggaaacagcagagactcagtgatggctgtcacgaccggaggggggactcgcagccttaccaggcacttaagtattcatcgaagagtcaccccagtagcggtgatcacagacatgaaaagatgcgagacgccggagatccttcaccaccaaataaaatgttgcggagatctgatagtcctgaaaacaaatacagtgacagcacaggtcacagtaaggccaaaaatgtgcatactcacagagttagagagagggatggtgggaccagttactctccacaagaaaattcacacaaccacagtgctcttcatagttcaaattcacattcttctaatccaagcaataacccaagcaaaacttcagatgcaccttatgattctgcagatgactggtctgagcatattagctcttctgggaaaaagtactactacaattgtcgaacagaagtttcacaatgggaaaaaccaaaagagtggcttgaaagagaacagagacaaaaagaagcaaacaagatggcagtcaacagcttcccaaaagatagggattacagaagagaggtgatgcaagcaacagccactagtgggtttgccagtggaatggaagacaagcattccagtgatgccagtagtttgctcccacagaatattttgtctcaaacaagcagacacaatgacagagactacagactgccaagagcagagactcacagtagttctacgccagtacagcaccccatcaaaccagtggttcatccaactgctaccccaagcactgttccttctagtccatttacgctacagtctgatcaccagccaaagaaatcatttgatgctaatggagcatctactttatcaaaactgcctacacccacatcttctgtccctgcacagaaaacagaaagaaaagaatctacatcaggagacaaacccgtatcacattcttgcacaactccttccacgtcttctgcctctggactgaaccccacatctgcacctccaacatctgcttcagcggtccctgtttctcctgttccacagtcgccaatacctcccttacttcaggacccaaatcttcttagacaattgcttcctgctttgcaagccacgctgcagcttaataattctaatgtggacatatctaaaataaatgaagttcttacagcagctgtgacacaagcctcactgcagtctataattcataagtttcttactgctggaccatctgctttcaacataacgtctctgatttctcaagctgctcagctctctacacaagcccagccatctaatcagtctccgatgtctttaacatctgatgcgtcatccccaagatcatatgtttctccaagaataagcacacctcaaactaacacagtccctatcaaacctttgatcagtactcctcctgtttcatcacagccaaaggttagtactccagtagttaagcaaggaccagtgtcacagtcagccacacagcagcctgtaactgctgacaagcagcaaggtcatgaacctgtctctcctcgaagtcttcagcgctcaaggtaggttgatattgtatattgagaccacattgttttatttaatgatggtacactgcattgtttgaatattatatctgtaaaatagaacttaacctttaaactccatgaataccctaaagtaggcttacatgttgtaaaatttacaaagacaaacctgtatacaagaggtaggttattgtctctagtagtgaagcccgggttattttgaagaaagtggctctttaaaattttacacagtggaatatgacggggctaaagatttgtgatacttgtaccagaaaggcacacgattttacaatatttgttggaattaccttactttttaacctcctcatagcagttttggtttgagtatattgatgaaagccaaagtctggtatctaaaacttgggccaatgtttcccaactggtatatgtcaggctttcccaatagcttaactgtgaccctatacggatggctttttagatagttctatactgctgtattgtgttagcacttttctttgttcattaacaacacaactttaaatgacatttgttgaatgaatggttttcatttgattgattttcctgttttttatttcatgctatgaggtagcaaaataattcaactgttgtttttattgttgttttctaaacaagcatttcagaacttacacctccaaatgagagttgttcccttcaaaataatgaccttgggaagctgtctacttactccagcaatgttgccattgctctgaacatttttgggaaattcttcttttaaattgtttttagaggctgcagtattattttaaatatcctcagtgatgaaaactcttcatcctttgggagatttagtttttggaaataactgaaattcattcagagccaagtctggtgaagcaggtaggagatcaacttgggtgattaaattttttggttctcaccaccatatccccaaccctggcccaaaccattcagttttaaaagaagataaagaatctcagagtgttatttttttggttttgttttgccactgtgcttgttcagtgctatccaataaaatgtctgtattttgcttcacattatttcaccctctgattcagcagttctgacgttgaacaaaggcaatatatattttccccttatctagatgtgtatgagcagtcttcagatgtgcatctacagctgttaaaatgtgactttttttagttatattattagtgtttgtggtacacaaagttaacaggttctgctctcagatttggagagtagtttacatttgactctgacagtagtgttaaaagggttttttccccctaaagtgttttgaggaatcatatactttggattattaattctctttatttgacattaaaataacaaatttttcttaggaatttggatatctttaagttaataaaaggtattaacatgcagtttctaggataaggatacccagaaactacttttaaacatactacacattcaattctgttttctagtagccagagaagtccatcacctggtcccaatcatacttctaatagtagtaatgcatcaaatgcaacagttgtaccacagaattcttctgcccgatccacgtgttcattaacgcctgcactagcagcacacttcagtgaaaatctcataaaacacgttcaaggatggcctgcagatcatgcagagaagcaggcatcaagattacgcgaagaagcgcataacatgggaactattcacatgtccgaaatttgtactgaattaaaaaatttaagatctttagtccgagtatgtgaaattcaagcaactttgcgagagcaaaggatactatttttgagacaacaaattaaggaacttgaaaagctaaaaaatcagaattccttcatggtgtgaagatgtgaataattgcacatggttttgagaacaggaactgtaaatctgttgcccaatcttaacatttttgagctgcatttaagtagactttggaccgttaagctgggcaaaggaaatgacaaggggacggggtctgtgagagtcaattcaggggaaagatacaagattgatttgttttgtagagtgaagccatgggaagccatgtgtaacagagcttagacatccaaaactaatcaatgctgaggtggctaaatacctagccttttacatgtaaacctgtctgcaaaattagcttttttaaaaaaaaaaaaaaaaaaattgggggggttaatttatcattcagaaatcttgcattttcaaaaattcagtgcaagcgccaggcgatttgtgtctaaggatacgattttgaaccatatgggcagtgtacaaaatatgaaacaactgtttccacacttgcacctgatcaagagcagtgcttctccatttgttttgcagagaaatgtttttcatttcccgtgtgtttccatttccttctgaaattctgattttatccatttttttaaggctcctctttatctcctttcttaaggcactgttgctatggcacttttctataaccttttcattcctgtgtacagtagcttaaaattgcagtgattgagcataacctacttgtttgtataaattattgaaatccatttgcaccctgtaagaatggacttaaaagtactgctggacaggcatgtgtgctcaaagtacattgattgctcaaatataaggaaatggcccaatgaacgtggttgtgggaggggaaagaggaaacagagctagtcagatgtgaattgtatctgttgtaataaacatgttaaaacaaacaaaaattgttatttttcttttccttcggtcagtgcacattagcatttgaactacctggggattctttatcagaactgttcttgttgaatatttatacttaattgaaataattccttaagggaggttttgtttaaaacgtattaacaggaaattgtgtatgagatatttaatgaaataagaaattcaacaagaatgattaagtcacttcccaagtggttgtcatttgttaaaccctggtttacctgtcttgctattatgacatttcatttggaaggatgtttgtgttgtagctaactgttcaagtctggtgctgactgctgttcttagccatcacaaaacgctaaatttgtgtaattggagcttcctgctgttatctggaaatagcaggaaagcgcagctttgtatattgtttcctaaagtatattaaaataaaaaaagaaactattgctactat

SEQ ID NO: 365304 - DNA, 2760 bp, Homo sapiens
agggccggtggcgcgcggcgtccggtgaggggcagcggcccgggctcggttccggcttccagcagcggcccgaaggcgccggagcacgctccccgctccccagaacgcagcttccgcggctgcagcccaggcagctcttcgggaagcgtccgcccgtggtctcgccagggggtttccgacctccccgcccgacagcgcaggggcgggggccgcggccggagagctcgcccgagagcaccccctcccgctgcgcctctgggcgcacgcgcagccgctgcagcctcccttatttagtccgcgatggcttccctcgcgccccaccgtcctcttccggaaggcggctccctccctgcgcagcccggagcccctgagatcagcctcgagcaggcgcccgagcgagactatccctaaacgggaacggcggtggccgactcgcgagtgaggaaaagaaggaaagggcagactggtcgcgaagagaagatccaggcctcagaggaggagaaaggccggagccagccgaggtttgccgagggcggtgttccggacccgcgcggtgcggggaggaaggccgagggtgggagaggaggggcccggcggaaactgccgaggtttcccgaaggcggcagcgtccgagttgcccggatgtagttggtggagcggcagccgccgcctgcgcgcccgcccgcctttcgcggccgctctcccccctccccgacacacactcacaggccgggcattgatggtaatgtatgcgaggaaacagcagagactcagtgatggctgtcacgaccggaggggggactcgcagccttaccaggcacttaagtattcatcgaagagtcaccccagtagcggtgatcacagacatgaaaagatgcgagacgccggagatccttcaccaccaaataaaatgttgcggagatctgatagtcctgaaaacaaatacagtgacagcacaggtcacagtaaggccaaaaatgtgcatactcacagagttagagagagggatggtgggaccagttactctccacaagaaaattcacacaaccacagtgctcttcatagttcaaattcacattcttctaatccaagcaataacccaagcaaaacttcagatgcaccttatgattctgcagatgactggtctgagcatattagctcttctgggaaaaagtactactacaattgtcgaacagaagtttcacaatgggaaaaaccaaaagagtggcttgaaagagaacagagacaaaaagaagcaaacaagatggcagtcaacagcttcccaaaagatagggattacagaagagaggtgatgcaagcaacagccactagtgggtttgccagtggaatggaagacaagcattccagtgatgccagtagtttgctcccacagaatattttgtctcaaacaagcagacacaatgacagagactacagactgccaagagcagagactcacagtagttctacgccagtacagcaccccatcaaaccagtggttcatccaactgctaccccaagcactgttccttctagtccatttacgctacagtctgatcaccagccaaagaaatcatttgatgctaatggagcatctactttatcaaaactgcctacacccacatcttctgtccctgcacagaaaacagaaagaaaagaatctacatcaggagacaaacccgtatcacattcttgcacaactccttccacgtcttctgcctctggactgaaccccacatctgcacctccaacatctgcttcagcggtccctgtttctcctgttccacagtcgccaatacctcccttacttcaggacccaaatcttcttagacaattgcttcctgctttgcaagccacgctgcagcttaataattctaatgtggacatatctaaaataaatgaagttcttacagcagctgtgacacaagcctcactgcagtctataattcataagtttcttactgctggaccatctgctttcaacataacgtctctgatttctcaagctgctcagctctctacacaagcccagccatctaatcagtctccgatgtctttaacatctgatgcgtcatccccaagatcatatgtttctccaagaataagcacacctcaaattttaaaatgtcgtggtattgtaacaatatatttgatgaaagaaggttacagactcccctgaagaaccagctttcctacgctttttatttttctaacttgtctaacctgattttaaaatgactgcaattccagactaaaaacatgcttcagccctgtttcaagacattatgcttcttttaacagtccaaattagtagttttatttttcttctaaatctttgtttcacacttgtaaaatcttgggaaggaggttcttaaaactttgccaggaattgttacccatttccaaaaacagtttattatgttcaaaaaccaccatatctttgagggactgtttgaaaggggagagggcaacgcgggaaataattcactctgcgcaccggaactattgtagttcaggacttccagctactgtatttagatgttgggtttgaatatacagatttcttttcaatacctgtaaatatggctatattcttgtatttgtacgggagtgtacaaaatgacactgaaaagtaataaatatgttttgactatattgtgcagttatttcagaactgtgttttgaaagtcttagaatgcataatttgcatttgagtaaggaaatttaaaatacagattactgctgagattttaatcagtc

SEQ ID NO: 365305 - DNA, 2231 bp, Homo sapiens
agggccggtggcgcgcggcgtccggtgaggggcagcggcccgggctcggttccggcttccagcagcggcccgaaggcgccggagcacgctccccgctccccagaacgcagcttccgcggctgcagcccaggcagctcttcgggaagcgtccgcccgtggtctcgccagggggtttccgacctccccgcccgacagcgcaggggcgggggccgcggccggagagctcgcccgagagcaccccctcccgctgcgcctctgggcgcacgcgcagccgctgcagcctcccttatttagtccgcgatggcttccctcgcgccccaccgtcctcttccggaaggcggctccctccctgcgcagcccggagcccctgagatcagcctcgagcaggcgcccgagcgagactatccctaaacgggaacggcggtggccgactcgcgagtgaggaaaagaaggaaagggcagactggtcgcgaagagaagatccaggcctcagaggaggagaaaggccggagccagccgaggtttgccgagggcggtgttccggacccgcgcggtgcggggaggaaggccgagggtgggagaggaggggcccggcggaaactgccgaggtttcccgaaggcggcagcgtccgagttgcccggatgtagttggtggagcggcagccgccgcctgcgcgcccgcccgcctttcgcggccgctctcccccctccccgacacacactcacaggccgggcattgatggtaatgtatgcgaggaaacagcagagactcagtgatggctgtcacgaccggaggggggactcgcagccttaccaggcacttaagtattcatcgaagagtcaccccagtagcggtgatcacagacatgaaaagatgcgagacgccggagatccttcaccaccaaataaaatgttgcggagatctgatagtcctgaaaacaaatacagtgacagcacaggtcacagtaaggccaaaaatgtgcatactcacagagttagagagagggatggtgggaccagttactctccacaagaaaattcacacaaccacagtgctcttcatagttcaaattcacattcttctaatccaagcaataacccaagcaaaacttcagatgcaccttatgattctgcagatgactggtctgagcatattagctcttctgggaaaaagtactactacaattgtcgaacagaagtttcacaatgggaaaaaccaaaagagtggcttgaaagagaacagagacaaaaagaagcaaacaagatggcagtcaacagcttcccaaaagatagggattacagaagagaggtgatgcaagcaacagccactagtgggtttgccagtggaatggaagacaagcattccagtgatgccagtagtttgctcccacagaatattttgtctcaaacaagcagacacaatgacagagactacagactgccaagagcagagactcacagtagttctacgccagtacagcaccccatcaaaccagtggttcatccaactgctaccccaagcactgttccttctagtccatttacgctacagtctgatcaccagccaaagaaatcatttgatgctaatggagcatctactttatcaaaactgcctacacccacatcttctgtccctgcacagaaaacagaaagaaaagaatctacatcaggagacaaacccgtatcacattcttgcacaactccttccacgtcttctgcctctggactgaaccccacatctgcacctccaacatctgcttcagcggtccctgtttctcctgttccacagtcgccaatacctcccttacttcaggacccaaatcttcttagacaattgcttcctgctttgcaagccacgctgcagcttaataattctaatgtggacatatctaaaataaatgaagttcttacagcagctgtgacacaagcctcactgcagtctataattcataagtttcttactgctggaccatctgctttcaacataacgtctctgatttctcaagctgctcagctctctacacaagcccagccatctaatcagtctccgatgtctttaacatctgatgcgtcatccccaagatcatatgtttctccaagaataagcacacctcaaactaacacagtccctatcaaacctttgatcagtactcctcctgtttcatcacagccaaagagtactccagcctgggtgacacagtgagaccccatctcaaaaaaaaaaaaaaaac

SEQ ID NO: 365306 - DNA, 2210 bp, Homo sapiens
agggccggtggcgcgcggcgtccggtgaggggcagcggcccgggctcggttccggcttccagcagcggcccgaaggcgccggagcacgctccccgctccccagaacgcagcttccgcggctgcagcccaggcagctcttcgggaagcgtccgcccgtggtctcgccagggggtttccgacctccccgcccgacagcgcaggggcgggggccgcggccggagagctcgcccgagagcaccccctcccgctgcgcctctgggcgcacgcgcagccgctgcagcctcccttatttagtccgcgatggcttccctcgcgccccaccgtcctcttccggaaggcggctccctccctgcgcagcccggagcccctgagatcagcctcgagcaggcgcccgagcgagactatccctaaacgggaacggcggtggccgactcgcgagtgaggaaaagaaggaaagggcagactggtcgcgaagagaagatccaggcctcagaggaggagaaaggccggagccagccgaggtttgccgagggcggtgttccggacccgcgcggtgcggggaggaaggccgagggtgggagaggaggggcccggcggaaactgccgaggtttcccgaaggcggcagcgtccgagttgcccggatgtagttggtggagcggcagccgccgcctgcgcgcccgcccgcctttcgcggccgctctcccccctccccgacacacactcacaggccgggcattgatggtaatgtatgcgaggaaacagcagagactcagtgatggctgtcacgaccggaggggggactcgcagccttaccaggcacttaagtattcatcgaagagtcaccccagtagcggtgatcacagacatgaaaagatgcgagacgccggagatccttcaccaccaaataaaatgttgcggagatctgatagtcctgaaaacaaatacagtgacagcacaggtcacagtaaggccaaaaatgtgcatactcacagagttagagagagggatggtgggaccagttactctccacaagaaaattcacacaaccacagtgctcttcatagttcaaattcacattcttctaatccaagcaataacccaagcaaaacttcagatgcaccttatgattctgcagatgactggtctgagcatattagctcttctgggaaaaagtactactacaattgtcgaacagaagtttcacaatgggaaaaaccaaaagagtggcttgaaagagaacagagacaaaaagaagcaaacaagatggcagtcaacagcttcccaaaagatagggattacagaagagaggtgatgcaagcaacagccactagtgggtttgccagtggaatggaagacaagcattccagtgatgccagtagtttgctcccacagaatattttgtctcaaacaagcagacacaatgacagagactacagactgccaagagcagagactcacagtagttctacgccagtacagcaccccatcaaaccagtggttcatccaactgctaccccaagcactgttccttctagtccatttacgctacagtctgatcaccagccaaagaaatcatttgatgctaatggagcatctactttatcaaaactgcctacacccacatcttctgtccctgcacagaaaacagaaagaaaagaatctacatcaggagacaaacccgtatcacattcttgcacaactccttccacgtcttctgcctctggactgaaccccacatctgcacctccaacatctgcttcagcggtccctgtttctcctgttccacagtcgccaatacctcccttacttcaggacccaaatcttcttagacaattgcttcctgctttgcaagccacgctgcagcttaataattctaatgtggacatatctaaaataaatgaagaaggtaaatcttcataacagttttttaaaaatttatttgcattgtgcaaagttatgtaagtagtaaaatccccagtttaggaatggtctttgttttcttttgaaatttatagttgaacacttttttttgttttgttttttgtttttggagtttggaaatttatatccactgtagtttaagaccattggtagtataattgagttagtggtgcttggatcttgtgtatatttttcaatacttgttatgtgcagtatttgtttttgttgtcttgttgagaaatatccactgtgcaacccacccttggtt

SEQ ID NO: 365307 - DNA, 2301 bp, Homo sapiens
agggccggtggcgcgcggcgtccggtgaggggcagcggcccgggctcggttccggcttccagcagcggcccgaaggcgccggagcacgctccccgctccccagaacgcagcttccgcggctgcagcccaggcagctcttcgggaagcgtccgcccgtggtctcgccagggggtttccgacctccccgcccgacagcgcaggggcgggggccgcggccggagagctcgcccgagagcaccccctcccgctgcgcctctgggcgcacgcgcagccgctgcagcctcccttatttagtccgcgatggcttccctcgcgccccaccgtcctcttccggaaggcggctccctccctgcgcagcccggagcccctgagatcagcctcgagcaggcgcccgagcgagactatccctaaacgggaacggcggtggccgactcgcgagtgaggaaaagaaggaaagggcagactggtcgcgaagagaagatccaggcctcagaggaggagaaaggccggagccagccgaggtttgccgagggcggtgttccggacccgcgcggtgcggggaggaaggccgagggtgggagaggaggggcccggcggaaactgccgaggtttcccgaaggcggcagcgtccgagttgcccggatgtagttggtggagcggcagccgccgcctgcgcgcccgcccgcctttcgcggccgctctcccccctccccgacacacactcacaggccgggcattgatggtaatgtatgcgaggaaacagcagagactcagtgatggctgtcacgaccggaggggggactcgcagccttaccaggcacttaagtattcatcgaagagtcaccccagtagcggtgatcacagacatgaaaagatgcgagacgccggagatccttcaccaccaaataaaatgttgcggagatctgatagtcctgaaaacaaatacagtgacagcacaggtcacagtaaggccaaaaatgtgcatactcacagagttagagagagggatggtgggaccagttactctccacaagaaaattcacacaaccacagtgctcttcatagttcaaattcacattcttctaatccaagcaataacccaagcaaaacttcagatgcaatgtatccttcacgttgtaaatatgttttgtagagtgaagccatgggaagccatgtgtaacagagcttagacatccaaaactaatcaatgctgaggtggctaaatacctagccttttacatgtaaacctgtctgcaaaattagcttttttaaaaaaaaaaaaaaaaaaattgggggggttaatttatcattcagaaatcttgcattttcaaaaattcagtgcaagcgccaggcgatttgtgtctaaggatacgattttgaaccatatgggcagtgtacaaaatatgaaacaactgtttccacacttgcacctgatcaagagcagtgcttctccatttgttttgcagagaaatgtttttcatttcccgtgtgtttccatttccttctgaaattctgattttatccatttttttaaggctcctctttatctcctttcttaaggcactgttgctatggcacttttctataaccttttcattcctgtgtacagtagcttaaaattgcagtgattgagcataacctacttgtttgtataaattattgaaatccatttgcaccctgtaagaatggacttaaaagtactgctggacaggcatgtgtgctcaaagtacattgattgctcaaatataaggaaatggcccaatgaacgtggttgtgggaggggaaagaggaaacagagctagtcagatgtgaattgtatctgttgtaataaacatgttaaaacaaacaaaaattgttatttttcttttccttcggtcagtgcacattagcatttgaactacctggggattctttatcagaactgttcttgttgaatatttatacttaattgaaataattccttaagggaggttttgtttaaaacgtattaacaggaaattgtgtatgagatatttaatgaaataagaaattcaacaagaatgattaagtcacttcccaagtggttgtcatttgttaaaccctggtttacctgtcttgctattatgacatttcatttggaaggatgtttgtgttgtagctaactgttcaagtctggtgctgactgctgttcttagccatcacaaaacgctaaatttgtgtaattggagcttcctgctgttatctggaaatagcaggaaagcgcagctttgtatattgtttcctaaagtatattaaaataaaaaaagaaactattgctactat

SEQ ID NO: 365308 - DNA, 1643 bp, Homo sapiens
agggccggtggcgcgcggcgtccggtgaggggcagcggcccgggctcggttccggcttccagcagcggcccgaaggcgccggagcacgctccccgctccccagaacgcagcttccgcggctgcagcccaggcagctcttcgggaagcgtccgcccgtggtctcgccagggggtttccgacctccccgcccgacagcgcaggggcgggggccgcggccggagagctcgcccgagagcaccccctcccgctgcgcctctgggcgcacgcgcagccgctgcagcctcccttatttagtccgcgatggcttccctcgcgccccaccgtcctcttccggaaggcggctccctccctgcgcagcccggagcccctgagatcagcctcgagcaggcgcccgagcgagactatccctaaacgggaacggcggtggccgactcgcgagtgaggaaaagaaggaaagggcagactggtcgcgaagagaagatccaggcctcagaggaggagaaaggccggagccagccgaggtttgccgagggcggtgttccggacccgcgcggtgcggggaggaaggccgagggtgggagaggaggggcccggcggaaactgccgaggtttcccgaaggcggcagcgtccgagttgcccggatgtagttggtggagcggcagccgccgcctgcgcgcccgcccgcctttcgcggccgctctcccccctccccgacacacactcacaggccgggcattgatggtaatgtatgcgaggaaacagcagagactcagtgatggctgtcacgaccggaggggggactcgcagccttaccaggcacttaagtattcatcgaagagtcaccccagtagcggtgatcacagacatgaaaagatgcgagacgccggagatccttcaccaccaaataaaatgttgcggagatctgatagtcctgaaaacaaatacagtgacagcacaggtcacagtaaggccaaaaatgtgcatactcacagagttagagagagggatggtgggaccagttactctccacaagaaaattcacacaaccacagtgctcttcatagttcaaattcacattcttctaatccaagcaataacccaagcaaaacttcagatgcaccttatgattctgcagatgactggtctgagcatattagctcttctgggaaaaagtactactacaattgtcgaacagaagtttcacaatgggaaaaaccaaaagagtggcttgaaagagaacagagacaaaaagaagcaaacaagatggcagtcaacagcttcccaaaagatagggattacagaagagaggtgatgcaagcaacagccactagtgggtttgccagtggaatggaagacaagcattccagtgatgccagtagtttgctcccacagaatattttgtctcaaacaagcagacacaatgacagagactacagactgccaagagcagagactcacagtagttctacgccagtacagcaccccatcaaaccagtggttcatccaactgctaccccaatacaggagcacccagtccttagagacctacaaagagacttagactgccacacaataataatgggacattccactgtcaacattagacacatcaacgagacagataggtaacaacgctatccag

SEQ ID NO: 365309 - DNA, 2353 bp, Homo sapiens
agggccggtggcgcgcggcgtccggtgaggggcagcggcccgggctcggttccggcttccagcagcggcccgaaggcgccggagcacgctccccgctccccagaacgcagcttccgcggctgcagcccaggcagctcttcgggaagcgtccgcccgtggtctcgccagggggtttccgacctccccgcccgacagcgcaggggcgggggccgcggccggagagctcgcccgagagcaccccctcccgctgcgcctctgggcgcacgcgcagccgctgcagcctcccttatttagtccgcgatggcttccctcgcgccccaccgtcctcttccggaaggcggctccctccctgcgcagcccggagcccctgagatcagcctcgagcaggcgcccgagcgagactatccctaaacgggaacggcggtggccgactcgcgagtgaggaaaagaaggaaagggcagactggtcgcgaagagaagatccaggcctcagaggaggagaaaggccggagccagccgaggtttgccgagggcggtgttccggacccgcgcggtgcggggaggaaggccgagggtgggagaggaggggcccggcggaaactgccgaggtttcccgaaggcggcagcgtccgagttgcccggatgtagttggtggagcggcagccgccgcctgcgcgcccgcccgcctttcgcggccgctctcccccctccccgacacacactcacaggccgggcattgatggtaatgtatgcgaggaaacagcagagactcagtgatggctgtcacgaccggaggggggactcgcagccttaccaggcacttaagtattcatcgaagagtcaccccagtagcggtgatcacagacatgaaaagatgcgagacgccggagatccttcaccaccaaataaaatgttgcggagatctgatagtcctgaaaacaaatacagtgacagcacaggtcacagtaaggccaaaaatgtgcatactcacagagttagagagagggatggtgggaccagttactctccacaagaaaattcacacaaccacagtgctcttcatagttcaaattcacattcttctaatccaagcaataacccaagcaaaacttcagatgcaccttatgattctgcagatgactggtctgagcatattagctcttctgggaaaaagtactactacaattgtcgaacagaagtttcacaatgggaaaaaccaaaagagtggcttgaaagagaacagagacaaaaagaagcaaacaagatggcagtcaacagcttcccaaaagatagggattacagaagagaggtgatgcaagcaacagccactagtgggtttgccagtggaagtaagtattaattttttttctttgaaatgtatgtttgacttattcgtatttatttttcaaatctgtatccattgccatctacatatgtaaattaaaataaatagaaacatacggagattcttttatgttggatttattataccctccaccattttggtccctgaaaagggaaaagatacacggtcgagtagtacaggtatgtgtttcccactacacattatggctataatggagttgaattgcaaacagtaaaattttgttttggattggtttcccctgatccccccagacaggagcttcctctcccaccctacctgcctgcccttaagttgtgtcctattaaactggacacaaatctcaccggcttttagtctaataattgaatcatagctacacacagtgacaccagaatagctacttgtttttttatgttaccagtgagtaacttgtttatccttgtatgtagaaactaatttcaccatgatcacagatctgtgtaacatctctagtttgaatttccacacaattttaaaatgtctactagaaaacttacacctttttgttccaaggtgctcttcatctataaaaccgtgggcatacttcagtgttcttctgaggccaaattttgtgctcgtgggacaattttgtataacatacatttattttgtaattcattctccaaatttgaagctttattaaaggtattctatttccactggcttcccttaacttgaataaaatttactcccagtgccgtggctcatgcctgctgcaatcccagccctttgggaggccgaggcaggaggatggcttgaggccaagagtttgagaccggcctgtgcaacatggcgagacccagtgtccacagaattaaaaattaaccacgcagctgtaatcccagccacttgggaggctgaggcaagaagatgacttgagccctggcatttggctatgatcttgccactgcactctagcctggcaacagagtcagactctgtctcaaa

SEQ ID NO: 365310 - DNA, 1180 bp, Homo sapiens
agggccggtggcgcgcggcgtccggtgaggggcagcggcccgggctcggttccggcttccagcagcggcccgaaggcgccggagcacgctccccgctccccagaacgcagcttccgcggctgcagcccaggcagctcttcgggaagcgtccgcccgtggtctcgccagggggtttccgacctccccgcccgacagcgcaggggcgggggccgcggccggagagctcgcccgagagcaccccctcccgctgcgcctctgggcgcacgcgcagccgctgcagcctcccttatttagtccgcgatggcttccctcgcgccccaccgtcctcttccggaaggcggctccctccctgcgcagcccggagcccctgagatcagcctcgagcaggcgcccgagcgagactatccctaaacgggaacggcggtggccgactcgcgagtgaggaaaagaaggaaagggcagactggtcgcgaagagaagatccaggcctcagaggaggagaaaggccggagccagccgaggtttgccgagggcggtgttccggacccgcgcggtgcggggaggaaggccgagggtgggagaggaggggcccggcggaaactgccgaggtttcccgaaggcggcagcgtccgagttgcccggatgtagttggtggagcggcagccgccgcctgcgcgcccgcccgcctttcgcggccgctctcccccctccccgacacacactcacaggccgggcattgatggtaatgtatgcgaggaaacagcagagactcagtgatggctgtcacgaccggaggggggactcgcagccttaccaggcacttaagtattcatcgaagagtcaccccagtagcggtgatcacagacatgaaaagatgcgagacgccggagatccttcaccaccaaataaaatgttgcggagatctgatagtcctgaaaacaaatacagtgacagcacaggtcacagtaaggccaaaaatgtgcatactcacagagttagagagagggatggtgggaccagttactctccacaagaaaattcacacaaccacagtgctcttcatagttcaaattcacattcttctaatccaagcaataacccaagcaaaacttcagatgcaagtaagtattataaacatgtccaatatggtttctttggaattttttgcaaaaaaaaaaaa

SEQ ID NO: 365311 - DNA, 296 bp, Homo sapiens
tcatgtgaatgtttactgagcatcttctgtgtgctccagtgtgtaagggttaaatgagattacttacgttaggtgcctggcacatgagaggtgttcctttgatgtttgttccaattttctctattcaggtaatttttcaggctgattatctttttatttagaatctacatcaggagacaaacccgtatcacattcttgcacaactccttccacgtcttctgcctctggactgaaccccacatctgcacctccaacatctgcttcagcggtccctgtttctcctgttccacagtcgc

SEQ ID NO: 365312 - DNA, 4181 bp, Homo sapiens
agggccggtggcgcgcggcgtccggtgaggggcagcggcccgggctcggttccggcttccagcagcggcccgaaggcgccggagcacgctccccgctccccagaacgcagcttccgcggctgcagcccaggcagctcttcgggaagcgtccgcccgtggtctcgccagggggtttccgacctccccgcccgacagcgcaggggcgggggccgcggccggagagctcgcccgagagcaccccctcccgctgcgcctctgggcgcacgcgcagccgctgcagcctcccttatttagtccgcgatggcttccctcgcgccccaccgtcctcttccggaaggcggctccctccctgcgcagcccggagcccctgagatcagcctcgagcaggcgcccgagcgagactatccctaaacgggaacggcggtggccgactcgcgagtgaggaaaagaaggaaagggcagactggtcgcgaagagaagatccaggcctcagaggaggagaaaggccggagccagccgaggtttgccgagggcggtgttccggacccgcgcggtgcggggaggaaggccgagggtgggagaggaggggcccggcggaaactgccgaggtttcccgaaggcggcagcgtccgagttgcccggatgtagttggtggagcggcagccgccgcctgcgcgcccgcccgcctttcgcggccgctctcccccctccccgacacacactcacaggccgggcattgatggtaatgtatgcgaggaaacagcagagactcagtgatggctgtcacgaccggaggggggactcgcagccttaccaggtgactggagggagttcgctgatttaggaaaaaagaatcatttgcagccagaaagacctgactcgattatttgattatttgcgagtgaaggaatcgatgggatgagatgataggcacttaagtattcatcgaagagtcaccccagtagcggtgatcacagacatgaaaagatgcgagacgccggagatccttcaccaccaaataaaatgttgcggagatctgatagtcctgaaaacaaatacagtgacagcacaggtcacagtaaggccaaaaatgtgcatactcacagagttagagagagggatggtgggaccagttactctccacaagaaaattcacacaaccacagtgctcttcatagttcaaattcacattcttctaatccaagcaataacccaagcaaaacttcagatgcaccttatgattctgcagatgactggtctgagcatattagctcttctgggaaaaagtactactacaattgtcgaacagaagtttcacaatgggaaaaaccaaaagagtggcttgaaagagaacagagacaaaaagaagcaaacaagatggcagtcaacagcttcccaaaagatagggattacagaagagaggtgatgcaagcaacagccactagtgggtttgccagtggaatggaagacaagcattccagtgatgccagtagtttgctcccacagaatattttgtctcaaacaagcagacacaatgacagagactacagactgccaagagcagagactcacagtagttctacgccagtacagcaccccatcaaaccagtggttcatccaactgctaccccaagcactgttccttctagtccatttacgctacagtctgatcaccagccaaagaaatcatttgatgctaatggagcatctactttatcaaaactgcctacacccacatcttctgtccctgcacagaaaacagaaagaaaagaatctacatcaggagacaaacccgtatcacattcttgcacaactccttccacgtcttctgcctctggactgaaccccacatctgcacctccaacatctgcttcagcggtccctgtttctcctgttccacagtcgccaatacctcccttacttcaggacccaaatcttcttagacaattgcttcctgctttgcaagccacgctgcagcttaataattctaatgtggacatatctaaaataaatgaagttcttacagcagctgtgacacaagcctcactgcagtctataattcataagtttcttactgctggaccatctgctttcaacataacgtctctgatttctcaagctgctcagctctctacacaagcccagccatctaatcagtctccgatgtctttaacatctgatgcgtcatccccaagatcatatgtttctccaagaataagcacacctcaaactaacacagtccctatcaaacctttgatcagtactcctcctgtttcatcacagccaaaggttagtactccagtagttaagcaaggaccagtgtcacagtcagccacacagcagcctgtaactgctgacaagcagcaaggtcatgaacctgtctctcctcgaagtcttcagcgctcaagtagccagagaagtccatcacctggtcccaatcatacttctaatagtagtaatgcatcaaatgcaacagttgtaccacagaattcttctgcccgatccacgtgttcattaacgcctgcactagcagcacacttcagtgaaaatctcataaaacacgttcaaggatggcctgcagatcatgcagagaagcaggcatcaagattacgcgaagaagcgcataacatgggaactattcacatgtccgaaatttgtactgaattaaaaaatttaagatctttagtccgagtatgtgaaattcaagcaactttgcgagagcaaaggatactatttttgagacaacaaattaaggaacttgaaaagctaaaaaatcagaattccttcatggtgtgaagatgtgaataattgcacatggttttgagaacaggaactgtaaatctgttgcccaatcttaacatttttgagctgcatttaagtagactttggaccgttaagctgggcaaaggaaatgacaaggggacggggtctgtgagagtcaattcaggggaaagatacaagattgatttgtaaaacccttgaaatgtagatttcttgtagatgtatccttcacgttgtaaatatgttttgtagagtgaagccatgggaagccatgtgtaacagagcttagacatccaaaactaatcaatgctgaggtggctaaatacctagccttttacatgtaaacctgtctgcaaaattagcttttttaaaaaaaaaaaaaaaaaaattgggggggttaatttatcattcagaaatcttgcattttcaaaaattcagtgcaagcgccaggcgatttgtgtctaaggatacgattttgaaccatatgggcagtgtacaaaatatgaaacaactgtttccacacttgcacctgatcaagagcagtgcttctccatttgttttgcagagaaatgtttttcatttcccgtgtgtttccatttccttctgaaattctgattttatccatttttttaaggctcctctttatctcctttcttaaggcactgttgctatggcacttttctataaccttttcattcctgtgtacagtagcttaaaattgcagtgattgagcataacctacttgtttgtataaattattgaaatccatttgcaccctgtaagaatggacttaaaagtactgctggacaggcatgtgtgctcaaagtacattgattgctcaaatataaggaaatggcccaatgaacgtggttgtgggaggggaaagaggaaacagagctagtcagatgtgaattgtatctgttgtaataaacatgttaaaacaaacaaaaattgttatttttcttttccttcggtcagtgcacattagcatttgaactacctggggattctttatcagaactgttcttgttgaatatttatacttaattgaaataattccttaagggaggttttgtttaaaacgtattaacaggaaattgtgtatgagatatttaatgaaataagaaattcaacaagaatgattaagtcacttcccaagtggttgtcatttgttaaaccctggtttacctgtcttgctattatgacatttcatttggaaggatgtttgtgttgtagctaactgttcaagtctggtgctgactgctgttcttagccatcacaaaacgctaaatttgtgtaattggagcttcctgctgttatctggaaatagcaggaaagcgcagctttgtatattgtttcctaaagtatattaaaataaaaaaagaaactattgctactat

SEQ ID NO: 365313 - DNA, 4177 bp, Homo sapiens
agggccggtggcgcgcggcgtccggtgaggggcagcggcccgggctcggttccggcttccagcagcggcccgaaggcgccggagcacgctccccgctccccagaacgcagcttccgcggctgcagcccaggcagctcttcgggaagcgtccgcccgtggtctcgccagggggtttccgacctccccgcccgacagcgcaggggcgggggccgcggccggagagctcgcccgagagcaccccctcccgctgcgcctctgggcgcacgcgcagccgctgcagcctcccttatttagtccgcgatggcttccctcgcgccccaccgtcctcttccggaaggcggctccctccctgcgcagcccggagcccctgagatcagcctcgagcaggcgcccgagcgagactatccctaaacgggaacggcggtggccgactcgcgagtgaggaaaagaaggaaagggcagactggtcgcgaagagaagatccaggcctcagaggaggagaaaggccggagccagccgaggtttgccgagggcggtgttccggacccgcgcggtgcggggaggaaggccgagggtgggagaggaggggcccggcggaaactgccgaggtttcccgaaggcggcagcgtccgagttgcccggatgtagttggtggagcggcagccgccgcctgcgcgcccgcccgcctttcgcggccgctctcccccctccccgacacacactcacaggccgggcattgatggtaatgtatgcgaggaaacagcagagactcagtgatggctgtcacgaccggaggggggactcgcagccttaccaggcacttaagtattcatcgaagagtcaccccagtagcggtgatcacagacatgaaaagatgcgagacgccggagatccttcaccaccaaataaaatgttgcggagatctgatagtcctgaaaacaaatacagtgacagcacaggtcacagtaaggccaaaaatgtgcatactcacagagttagagagagggatggtgggaccagttactctccacaagaaaattcacacaaccacagtgctcttcatagttcaaattcacattcttctaatccaagcaataacccaagcaaaacttcagatgcaccttatgattctgcagatgactggtctgagcatattagctcttctgggaaaaagtactactacaattgtcgaacagaagtttcacaatgggaaaaaccaaaagagtggcttgaaagagaacagagacaaaaagaagcaaacaagatggcagtcaacagcttcccaaaagatagggattacagaagagaggtgatgcaagcaacagccactagtgggtttgccagtggaatggaagacaagcattccagtgatgccagtagtttgctcccacagaatattttgtctcaaacaagcagacacaatgacagagactacagactgccaagagcagagactcacagtagttctacgccagtacagcaccccatcaaaccagtggttcatccaactgctaccccaagcactgttccttctagtccatttacgctacagtctgatcaccagccaaagaaatcatttgatgctaatggagcatctactttatcaaaactgcctacacccacatcttctgtccctgcacagaaaacagaaagaaaagaatctacatcaggagacaaacccgtatcacattcttgcacaactccttccacgtcttctgcctctggactgaaccccacatctgcacctccaacatctgcttcagcggtccctgtttctcctgttccacagtcgccaatacctcccttacttcaggacccaaatcttcttagacaattgcttcctgctttgcaagccacgctgcagcttaataattctaatgtggacatatctaaaataaatgaagttcttacagcagctgtgacacaagcctcactgcagtctataattcataagtttcttactgctggaccatctgctttcaacataacgtctctgatttctcaagctgctcagctctctacacaagcccagccatctaatcagtctccgatgtctttaacatctgatgcgtcatccccaagatcatatgtttctccaagaataagcacacctcaaactaacacagtccctatcaaacctttgatcagtactcctcctgtttcatcacagccaaaggttagtactccagtagttaagcaaggaccagtgtcacagtcagccacacagcagcctgtaactgctgacaagcagcaaggtcatgaacctgtctctcctcgaagtcttcagcgctcaagtagccagagaagtccatcacctggtcccaatcatacttctaatagtagtaatgcatcaaatgcaacagttgtaccacagaattcttctgcccgatccacgtgttcattaacgcctgcactagcagcacacttcagtgaaaatctcataaaacacgttcaaggatggcctgcagatcatgcagagaagcaggcatcaagattacgcgaagaagcgcataacatgggaactattcacatgtccgaaatttgtactgaattaaaaaatttaagatctttagtccgagtatgtgaaattcaagcaactttgcgagagcaaaggatactatttttgagacaacaaattaaggaacttgaaaagctaaaaaatcagaattccttcatggtgtgaagatgtgaataattgcacatggttttgagaacaggaactgtaaatctgttgcccaatcttaacatttttgagctgcatttaagtagactttggaccgttaagctgggcaaaggaaatgacaaggggacggggtctgtgagagtcaattcaggggaaagatacaagattgatttgtaaaacccttgaaatgtagatttcttgtagatgtatccttcacgttgtaaatatgttttgtagagtgaagccatgggaagccatgtgtaacagagcttagacatccaaaactaatcaatgctgaggtggctaaatacctagccttttacatgtaaacctgtctgcaaaattagcttttttaaaaaaaaaaaaaaaaaaattgggggggttaatttatcattcagaaatcttgcattttcaaaaattcagtgcaagcgccaggcgatttgtgtctaaggatacgattttgaaccatatgggcagtgtacaaaatatgaaacaactgtttccacacttgcacctgatcaagagcagtgcttctccatttgttttgcagagaaatgtttttcatttcccgtgtgtttccatttccttctgaaattctgattttatccatttttttaaggctcctctttatctcctttcttaaggcactgttgctatggcacttttctataaccttttcattcctgtgtacagtagcttaaaattgcagtgattgagcataacctacttgtttgtataaattattgaaatccatttgcaccctgtaagaatggacttaaaagtactgctggacaggcatgtgtgctcaaagtacattgattgctcaaatataaggaaatggcccaatgaacgtggttgtgggaggggaaagaggaaacagagctagtcagatgtgaattgtatctgttgtaataaacatgttaaaacaaacaaaaattgttatttttcttttccttcggtcagtgcacattagcatttgaactacctggggattctttatcagaactgttcttgttgaatatttatacttaattgaaataattccttaagggaggttttgtttaaaacgtattaacaggaaattgtgtatgagatatttaatgaaataagaaattcaacaagaatgattaagtcacttcccaagtggttgtcatttgttaaaccctggtttacctgtcttgctattatgacatttcatttggaaggatgtttgtgttgtagctaactgttcaagtctggtgctgactgctgttcttagccatcacaaaacgctaaatttgtgtaattggagcttcctgctgttatctggaaatagcaggaaagcgcagctttgtatattgtttcctaaagtatattaaaataaaaaaagaaactattgctactataaaattaccttgactttttttttcctttgctgaaatattagtcacatagccttagcttcacactgccagtaatgtatcaaatcacaagggtttccgcatgaaaaaaatc

SEQ ID NO: 365314 - DNA, 4086 bp, Homo sapiens
agggccggtggcgcgcggcgtccggtgaggggcagcggcccgggctcggttccggcttccagcagcggcccgaaggcgccggagcacgctccccgctccccagaacgcagcttccgcggctgcagcccaggcagctcttcgggaagcgtccgcccgtggtctcgccagggggtttccgacctccccgcccgacagcgcaggggcgggggccgcggccggagagctcgcccgagagcaccccctcccgctgcgcctctgggcgcacgcgcagccgctgcagcctcccttatttagtccgcgatggcttccctcgcgccccaccgtcctcttccggaaggcggctccctccctgcgcagcccggagcccctgagatcagcctcgagcaggcgcccgagcgagactatccctaaacgggaacggcggtggccgactcgcgagtgaggaaaagaaggaaagggcagactggtcgcgaagagaagatccaggcctcagaggaggagaaaggccggagccagccgaggtttgccgagggcggtgttccggacccgcgcggtgcggggaggaaggccgagggtgggagaggaggggcccggcggaaactgccgaggtttcccgaaggcggcagcgtccgagttgcccggatgtagttggtggagcggcagccgccgcctgcgcgcccgcccgcctttcgcggccgctctcccccctccccgacacacactcacaggccgggcattgatggtaatgtatgcgaggaaacagcagagactcagtgatggctgtcacgaccggaggggggactcgcagccttaccaggggggtgatgttttacaggcacttaagtattcatcgaagagtcaccccagtagcggtgatcacagacatgaaaagatgcgagacgccggagatccttcaccaccaaataaaatgttgcggagatctgatagtcctgaaaacaaatacagtgacagcacaggtcacagtaaggccaaaaatgtgcatactcacagagttagagagagggatggtgggaccagttactctccacaagaaaattcacacaaccacagtgctcttcatagttcaaattcacattcttctaatccaagcaataacccaagcaaaacttcagatgcaccttatgattctgcagatgactggtctgagcatattagctcttctgggaaaaagtactactacaattgtcgaacagaagtttcacaatgggaaaaaccaaaagagtggcttgaaagagaacagagacaaaaagaagcaaacaagatggcagtcaacagcttcccaaaagatagggattacagaagagaggtgatgcaagcaacagccactagtgggtttgccagtggaatggaagacaagcattccagtgatgccagtagtttgctcccacagaatattttgtctcaaacaagcagacacaatgacagagactacagactgccaagagcagagactcacagtagttctacgccagtacagcaccccatcaaaccagtggttcatccaactgctaccccaagcactgttccttctagtccatttacgctacagtctgatcaccagccaaagaaatcatttgatgctaatggagcatctactttatcaaaactgcctacacccacatcttctgtccctgcacagaaaacagaaagaaaagaatctacatcaggagacaaacccgtatcacattcttgcacaactccttccacgtcttctgcctctggactgaaccccacatctgcacctccaacatctgcttcagcggtccctgtttctcctgttccacagtcgccaatacctcccttacttcaggacccaaatcttcttagacaattgcttcctgctttgcaagccacgctgcagcttaataattctaatgtggacatatctaaaataaatgaagttcttacagcagctgtgacacaagcctcactgcagtctataattcataagtttcttactgctggaccatctgctttcaacataacgtctctgatttctcaagctgctcagctctctacacaagcccagccatctaatcagtctccgatgtctttaacatctgatgcgtcatccccaagatcatatgtttctccaagaataagcacacctcaaactaacacagtccctatcaaacctttgatcagtactcctcctgtttcatcacagccaaaggttagtactccagtagttaagcaaggaccagtgtcacagtcagccacacagcagcctgtaactgctgacaagcagcaaggtcatgaacctgtctctcctcgaagtcttcagcgctcaagtagccagagaagtccatcacctggtcccaatcatacttctaatagtagtaatgcatcaaatgcaacagttgtaccacagaattcttctgcccgatccacgtgttcattaacgcctgcactagcagcacacttcagtgaaaatctcataaaacacgttcaaggatggcctgcagatcatgcagagaagcaggcatcaagattacgcgaagaagcgcataacatgggaactattcacatgtccgaaatttgtactgaattaaaaaatttaagatctttagtccgagtatgtgaaattcaagcaactttgcgagagcaaaggatactatttttgagacaacaaattaaggaacttgaaaagctaaaaaatcagaattccttcatggtgtgaagatgtgaataattgcacatggttttgagaacaggaactgtaaatctgttgcccaatcttaacatttttgagctgcatttaagtagactttggaccgttaagctgggcaaaggaaatgacaaggggacggggtctgtgagagtcaattcaggggaaagatacaagattgatttgtaaaacccttgaaatgtagatttcttgtagatgtatccttcacgttgtaaatatgttttgtagagtgaagccatgggaagccatgtgtaacagagcttagacatccaaaactaatcaatgctgaggtggctaaatacctagccttttacatgtaaacctgtctgcaaaattagcttttttaaaaaaaaaaaaaaaaaaattgggggggttaatttatcattcagaaatcttgcattttcaaaaattcagtgcaagcgccaggcgatttgtgtctaaggatacgattttgaaccatatgggcagtgtacaaaatatgaaacaactgtttccacacttgcacctgatcaagagcagtgcttctccatttgttttgcagagaaatgtttttcatttcccgtgtgtttccatttccttctgaaattctgattttatccatttttttaaggctcctctttatctcctttcttaaggcactgttgctatggcacttttctataaccttttcattcctgtgtacagtagcttaaaattgcagtgattgagcataacctacttgtttgtataaattattgaaatccatttgcaccctgtaagaatggacttaaaagtactgctggacaggcatgtgtgctcaaagtacattgattgctcaaatataaggaaatggcccaatgaacgtggttgtgggaggggaaagaggaaacagagctagtcagatgtgaattgtatctgttgtaataaacatgttaaaacaaacaaaaattgttatttttcttttccttcggtcagtgcacattagcatttgaactacctggggattctttatcagaactgttcttgttgaatatttatacttaattgaaataattccttaagggaggttttgtttaaaacgtattaacaggaaattgtgtatgagatatttaatgaaataagaaattcaacaagaatgattaagtcacttcccaagtggttgtcatttgttaaaccctggtttacctgtcttgctattatgacatttcatttggaaggatgtttgtgttgtagctaactgttcaagtctggtgctgactgctgttcttagccatcacaaaacgctaaatttgtgtaattggagcttcctgctgttatctggaaatagcaggaaagcgcagctttgtatattgtttcctaaagtatattaaaataaaaaaagaaactattgctactat

SEQ ID NO: 365315 - DNA, 3428 bp, Homo sapiens
tggcgaattcggcacgagggaggaggagaagaaggaccaggcgccgccgcctgcgcgcccgcccgcctttcgcggccgctctcccccctccccgacacacactcacaggccgggcattgatgctgtcacgaccggaggggggactcgcagccttaccaggggggtgatgttttacaggcacttaagtattcatcgaagagtcaccccagtagcggtgatcacagacatgaaaagatgcgagacgccggagatccttcaccaccaaataaaatgttgcggagatctgatagtcctgaaaacaaatacagtgacagcacaggtcacagtaaggccaaaaatgtgcatactcacagagttagagagagggatggtgggaccagttactctccacaagaaaattcacacaaccacagtgctcttcatagttcaaattcacattcttctaatccaagcaataacccaagcaaaacttcagatgcaccttatgattctgcagatgactggtctgagcatattagctcttctgggaaaaagtactactacaattgtcgaacagaagtttcacaatgggaaaaaccaaaagagtggcttgaaagagaacagagacaaaaagaagcaaacaagatggcagtcaacagcttcccaaaagatagggattacagaagagaggtgatgcaagcaacagccactagtgggtttgccagtggaatggaagacaagcattccagtgatgccagtagtttgctcccacagaatattttgtctcaaacaagcagacacaatgacagagactacagactgccaagagcagagactcacagtagttctacgccagtacagcaccccatcaaaccagtggttcatccaactgctaccccaagcactgttccttctagtccatttacgctacagtctgatcaccagccaaagaaatcatttgatgctaatggagcatctactttatcaaaactgcctacacccacatcttctgtccctgcacagaaaacagaaagaaaagaatctacatcaggagacaaacccgtatcacattcttgcacaactccttccacgtcttctgcctctggactgaaccccacatctgcacctccaacatctgcttcagcggtccctgtttctcctgttccacagtcgccaatacctcccttacttcaggacccaaatcttcttagacaattgcttcctgctttgcaagccacgctgcagcttaataattctaatgtggacatatctaaaataaatgaagttcttacagcagctgtgacacaagcctcactgcagtctataattcataagtttcttactgctggaccatctgctttcaacataacgtctctgatttctcaagctgctcagctctctacacaagcccagccatctaatcagtctccgatgtctttaacatctgatgcgtcatccccaagatcatatgtttctccaagaataagcacacctcaaactaacacagtccctatcaaacctttgatcagtactcctcctgtttcatcacagccaaaggttagtactccagtagttaagcaaggaccagtgtcacagtcagccacacagcagcctgtaactgctgacaagcagcaaggtcatgaacctgtctctcctcgaagtcttcagcgctcaagtagccagagaagtccatcacctggtcccaatcatacttctaatagtagtaatgcatcaaatgcaacagttgtaccacagaattcttctgcccgatccacgtgttcattaacgcctgcactagcagcacacttcagtgaaaatctcataaaacacgttcaaggatggcctgcagatcatgcagagaagcaggcatcaagattacgcgaagaagcgcataacatgggaactattcacatgtccgaaatttgtactgaattaaaaaatttaagatctttagtccgagtatgtgaaattcaagcaactttgcgagagcaaaggatactatttttgagacaacaaattaaggaacttgaaaagctaaaaaatcagaattccttcatggtgtgaagatgtgaataattgcacatggttttgagaacaggaactgtaaatctgttgcccaatcttaacatttttgagctgcatttaagtagactttggaccgttaagctgggcaaaggaaatgacaaggggacggggtctgtgagagtcaattcaggggaaagatacaagattgatttgtaaaacccttgaaatgtagatttcttgtagatgtatccttcacgttgtaaatatgttttgtagagtgaagccatgggaagccatgtgtaacagagcttagacatccaaaactaatcaatgctgaggtggctaaatacctagccttttacatgtaaacctgtctgcaaaattagcttttttaaaaaaaaaaaaaaaaaaattgggggggttaatttatcattcagaaatcttgcattttcaaaaattcagtgcaagcgccaggcgatttgtgtctaaggatacgattttgaaccatatgggcagtgtacaaaatatgaaacaactgtttccacacttgcacctgatcaagagcagtgcttctccatttgttttgcagagaaatgtttttcatttcccgtgtgtttccatttccttctgaaattctgattttatccatttttttaaggctcctctttatctcctttcttaaggcactgttgctatggcacttttctataaccttttcattcctgtgtacagtagcttaaaattgcagtgattgagcataacctacttgtttgtataaattattgaaatccatttgcaccctgtaagaatggacttaaaagtactgctggacaggcatgtgtgctcaaagtacattgattgctcaaatataaggaaatggcccaatgaacgtggttgtgggaggggaaagaggaaacagagctagtcagatgtgaattgtatctgttgtaataaacatgttaaaacaaacaaaaattgttatttttcttttccttcggtcagtgcacattagcatttgaactacctggggattctttatcagaactgttcttgttgaatatttatacttaattgaaataattccttaagggaggttttgtttaaaacgtattaacaggaaattgtgtatgagatatttaatgaaataagaaattcaacaagaatgattaagtcacttcccaagtggttgtcatttgttaaaccctggtttacctgtcttgctattatgacatttcatttggaaggatgtttgtgttgtagctaactgttcaagtctggtgctgactgctgttcttagccatcacaaaacgctaaatttgtgtaattggagcttcctgctgttatctggaaatagcaggaaagcgcagctttgtatattgtttcctaaagtatattaaaataaaaaaagaaactattgctactat

SEQ ID NO: 365316 - DNA, 3264 bp, Homo sapiens
acaagatggcagtcaacagcttcccaaaagatagggattacagaagagaggtgatcacagacatgaaaagatgcgagacgccggagatccttcaccaccaaataaaatgttgcggagatctgatagtcctgaaaacaaatacagtgacagcacaggtcacagtaaggccaaaaatgtgcatactcacagagttagagagagggatggtgggaccagttactctccacaagaaaattcacacaaccacagtgctcttcatagttcaaattcacattcttctaatccaagcaataacccaagcaaaacttcagatgcaccttatgattctgcagatgactggtctgagcatattagctcttctgggaaaaagtactactacaattgtcgaacagaagtttcacaatgggaaaaaccaaaagagtggcttgaaagagaacagagacaaaaagaagcaaacaagatggcagtcaacagcttcccaaaagatagggattacagaagagaggtgatgcaagcaacagccactagtgggtttgccagtggaatggaagacaagcattccagtgatgccagtagtttgctcccacagaatattttgtctcaaacaagcagacacaatgacagagactacagactgccaagagcagagactcacagtagttctacgccagtacagcaccccatcaaaccagtggttcatccaactgctaccccaagcactgttccttctagtccatttacgctacagtctgatcaccagccaaagaaatcatttgatgctaatggagcatctactttatcaaaactgcctacacccacatcttctgtccctgcacagaaaacagaaagaaaagaatctacatcaggagacaaacccgtatcacattcttgcacaactccttccacgtcttctgcctctggactgaaccccacatctgcacctccaacatctgcttcagcggtccctgtttctcctgttccacagtcgccaatacctcccttacttcaggacccaaatcttcttagacaattgcttcctgctttgcaagccacgctgcagcttaataattctaatgtggacatatctaaaataaatgaagttcttacagcagctgtgacacaagcctcactgcagtctataattcataagtttcttactgctggaccatctgctttcaacataacgtctctgatttctcaagctgctcagctctctacacaagcccagccatctaatcagtctccgatgtctttaacatctgatgcgtcatccccaagatcatatgtttctccaagaataagcacacctcaaactaacacagtccctatcaaacctttgatcagtactcctcctgtttcatcacagccaaaggttagtactccagtagttaagcaaggaccagtgtcacagtcagccacacagcagcctgtaactgctgacaagcagcaaggtcatgaacctgtctctcctcgaagtcttcagcgctcaagtagccagagaagtccatcacctggtcccaatcatacttctaatagtagtaatgcatcaaatgcaacagttgtaccacagaattcttctgcccgatccacgtgttcattaacgcctgcactagcagcacacttcagtgaaaatctcataaaacacgttcaaggatggcctgcagatcatgcagagaagcaggcatcaagattacgcgaagaagcgcataacatgggaactattcacatgtccgaaatttgtactgaattaaaaaatttaagatctttagtccgagtatgtgaaattcaagcaactttgcgagagcaaaggatactatttttgagacaacaaattaaggaacttgaaaagctaaaaaatcagaattccttcatggtgtgaagatgtgaataattgcacatggttttgagaacaggaactgtaaatctgttgcccaatcttaacatttttgagctgcatttaagtagactttggaccgttaagctgggcaaaggaaatgacaaggggacggggtctgtgagagtcaattcaggggaaagatacaagattgatttgtaaaacccttgaaatgtagatttcttgtagatgtatccttcacgttgtaaatatgttttgtagagtgaagccatgggaagccatgtgtaacagagcttagacatccaaaactaatcaatgctgaggtggctaaatacctagccttttacatgtaaacctgtctgcaaaattagcttttttaaaaaaaaaaaaaaaaaaattgggggggttaatttatcattcagaaatcttgcattttcaaaaattcagtgcaagcgccaggcgatttgtgtctaaggatacgattttgaaccatatgggcagtgtacaaaatatgaaacaactgtttccacacttgcacctgatcaagagcagtgcttctccatttgttttgcagagaaatgtttttcatttcccgtgtgtttccatttccttctgaaattctgattttatccatttttttaaggctcctctttatctcctttcttaaggcactgttgctatggcacttttctataaccttttcattcctgtgtacagtagcttaaaattgcagtgattgagcataacctacttgtttgtataaattattgaaatccatttgcaccctgtaagaatggacttaaaagtactgctggacaggcatgtgtgctcaaagtacattgattgctcaaatataaggaaatggcccaatgaacgtggttgtgggaggggaaagaggaaacagagctagtcagatgtgaattgtatctgttgtaataaacatgttaaaacaaacaaaaattgttatttttcttttccttcggtcagtgcacattagcatttgaactacctggggattctttatcagaactgttcttgttgaatatttatacttaattgaaataattccttaagggaggttttgtttaaaacgtattaacaggaaattgtgtatgagatatttaatgaaataagaaattcaacaagaatgattaagtcacttcccaagtggttgtcatttgttaaaccctggtttacctgtcttgctattatgacatttcatttggaaggatgtttgtgttgtagctaactgttcaagtctggtgctgactgctgttcttagccatcacaaaacgctaaatttgtgtaattggagcttcctgctgttatctggaaatagcaggaaagcgcagctttgtatattgtttcctaaagtatattaaaataaaaaaagaaactattgctactat

SEQ ID NO: 365317 - DNA, 6507 bp, Homo sapiens
agggccggtggcgcgcggcgtccggtgaggggcagcggcccgggctcggttccggcttccagcagcggcccgaaggcgccggagcacgctccccgctccccagaacgcagcttccgcggctgcagcccaggcagctcttcgggaagcgtccgcccgtggtctcgccagggggtttccgacctccccgcccgacagcgcaggggcgggggccgcggccggagagctcgcccgagagcaccccctcccgctgcgcctctgggcgcacgcgcagccgctgcagcctcccttatttagtccgcgatggcttccctcgcgccccaccgtcctcttccggaaggcggctccctccctgcgcagcccggagcccctgagatcagcctcgagcaggcgcccgagcgagactatccctaaacgggaacggcggtggccgactcgcgagtgaggaaaagaaggaaagggcagactggtcgcgaagagaagatccaggcctcagaggaggagaaaggccggagccagccgaggtttgccgagggcggtgttccggacccgcgcggtgcggggaggaaggccgagggtgggagaggaggggcccggcggaaactgccgaggtttcccgaaggcggcagcgtccgagttgcccggatgtagttggtggagcggcagccgccgcctgcgcgcccgcccgcctttcgcggccgctctcccccctccccgacacacactcacaggccgggcattgatggtaatgtatgcgaggaaacagcagagactcagtgatggctgtcacgaccggaggggggactcgcagccttaccaggcacttaagtattcatcgaagagtcaccccagtagcggtgatcacagacatgaaaagatgcgagacgccggagatccttcaccaccaaataaaatgttgcggagatctgatagtcctgaaaacaaatacagtgacagcacaggtcacagtaaggccaaaaatgtgcatactcacagagttagagagagggatggtgggaccagttactctccacaagaaaattcacacaaccacagtgctcttcatagttcaaattcacattcttctaatccaagcaataacccaagcaaaacttcagatgcaccttatgattctgcagatgactggtctgagcatattagctcttctgggaaaaagtactactacaattgtcgaacagaagtttcacaatgggaaaaaccaaaagagtggcttgaaagagaacagagacaaaaagaagcaaacaagatggcagtcaacagcttcccaaaagatagggattacagaagagaggtgatgcaagcaacagccactagtgggtttgccagtggaatggaagacaagcattccagtgatgccagtagtttgctcccacagaatattttgtctcaaacaagcagacacaatgacagagactacagactgccaagagcagagactcacagtagttctacgccagtacagcaccccatcaaaccagtggttcatccaactgctaccccaagcactgttccttctagtccatttacgctacagtctgatcaccagccaaagaaatcatttgatgctaatggagcatctactttatcaaaactgcctacacccacatcttctgtccctgcacagaaaacagaaagaaaagaatctacatcaggagacaaacccgtatcacattcttgcacaactccttccacgtcttctgcctctggactgaaccccacatctgcacctccaacatctgcttcagcggtccctgtttctcctgttccacagtcgccaatacctcccttacttcaggacccaaatcttcttagacaattgcttcctgctttgcaagccacgctgcagcttaataattctaatgtggacatatctaaaataaatgaagttcttacagcagctgtgacacaagcctcactgcagtctataattcataagtttcttactgctggaccatctgctttcaacataacgtctctgatttctcaagctgctcagctctctacacaaggtattcttactcatcttagatatctctagaatggcatcttgattttgttttggaattaatagcccttttttgtatttagttttttctttcatttttttttttagttttttaagagattagctacaataattttgttttttttgtaacactggcatatacagtagtatttttatttcctttctttttagatgaagcaagctttgacatttgtcttaaggtattgccatcaaatctgtaattatttaagacagtatttaattcagactttgttattaatgagtttttttatgccaaagctgaaagtaaactatgatgtgccatatatctttgtgaaacattgcatgtatttgaagagttgaagtttggttcagattgacgttagatgttttttgactggataatatggaaatgctcattttctgccttgaattagatatccctcttcatgaaggtatccaaatggagagagatacacataggagcaaatgggaagtgaaagggtcactttgtcagaaagctgataaacagcaggaatgccttgtctggaatggaagtataatggtgcaaagactcttgcaaccctctggctagcctcatgagcaggagactgcgtgggatacctgggcctaaatgtagaataagaaagaagaaataaggatggtgaggaggccttccatgtgagattaggttcaggcctagcttcctgttccagccacataaaggagagtgggccacactgggtgtgcttacctctgaacacacagctcacttagtcagtgtggcccagtgagaaggtcagattctgatttattccaataagtgttctctgggtaatatgggggtgggggggtttagagtaatacaaatatctttgccacatatattacaaaggactttagttttttgttttgttttgtttttctttaaaattaattgcttccctcttttacagcccagccatctaatcagtctccgatgtctttaacatctgatgcgtcatccccaagatcatatgtttctccaagaataagcacacctcaaactaacacagtccctatcaaacctttgatcagtactcctcctgtttcatcacagccaaaggttagtactccagtagttaagcaaggaccagtgtcacagtcagccacacagcagcctgtaactgctgacaagcagcaaggtcatgaacctgtctctcctcgaagtcttcagcgctcaaggtaggttgatattgtatattgagaccacattgttttatttaatgatggtacactgcattgtttgaatattatatctgtaaaatagaacttaacctttaaactccatgaataccctaaagtaggcttacatgttgtaaaatttacaaagacaaacctgtatacaagaggtaggttattgtctctagtagtgaagcccgggttattttgaagaaagtggctctttaaaattttacacagtggaatatgacggggctaaagatttgtgatacttgtaccagaaaggcacacgattttacaatatttgttggaattaccttactttttaacctcctcatagcagttttggtttgagtatattgatgaaagccaaagtctggtatctaaaacttgggccaatgtttcccaactggtatatgtcaggctttcccaatagcttaactgtgaccctatacggatggctttttagatagttctatactgctgtattgtgttagcacttttctttgttcattaacaacacaactttaaatgacatttgttgaatgaatggttttcatttgattgattttcctgttttttatttcatgctatgaggtagcaaaataattcaactgttgtttttattgttgttttctaaacaagcatttcagaacttacacctccaaatgagagttgttcccttcaaaataatgaccttgggaagctgtctacttactccagcaatgttgccattgctctgaacatttttgggaaattcttcttttaaattgtttttagaggctgcagtattattttaaatatcctcagtgatgaaaactcttcatcctttgggagatttagtttttggaaataactgaaattcattcagagccaagtctggtgaagcaggtaggagatcaacttgggtgattaaattttttggttctcaccaccatatccccaaccctggcccaaaccattcagttttaaaagaagataaagaatctcagagtgttatttttttggttttgttttgccactgtgcttgttcagtgctatccaataaaatgtctgtattttgcttcacattatttcaccctctgattcagcagttctgacgttgaacaaaggcaatatatattttccccttatctagatgtgtatgagcagtcttcagatgtgcatctacagctgttaaaatgtgactttttttagttatattattagtgtttgtggtacacaaagttaacaggttctgctctcagatttggagagtagtttacatttgactctgacagtagtgttaaaagggttttttccccctaaagtgttttgaggaatcatatactttggattattaattctctttatttgacattaaaataacaaatttttcttaggaatttggatatctttaagttaataaaaggtattaacatgcagtttctaggataaggatacccagaaactacttttaaacatactacacattcaattctgttttctagtagccagagaagtccatcacctggtcccaatcatacttctaatagtagtaatgcatcaaatgcaacagttgtaccacagaattcttctgcccgatccacgtgttcattaacgcctgcactagcagcacacttcagtgaaaatctcataaaacacgttcaaggatggcctgcagatcatgcagagaagcaggcatcaagattacgcgaagaagcgcataacatgggaactattcacatgtccgaaatttgtactgaattaaaaaatttaagatctttagtccgagtatgtgaaattcaagcaactttgcgagagcaaaggatactatttttgagacaacaaattaaggaacttgaaaagctaaaaaatcagaattccttcatggtgtgaagatgtgaataattgcacatggttttgagaacaggaactgtaaatctgttgcccaatcttaacatttttgagctgcatttaagtagactttggaccgttaagctgggcaaaggaaatgacaaggggacggggtctgtgagagtcaattcaggggaaagatacaagattgatttgtaaaacccttgaaatgtagatttcttgtagatgtatccttcacgttgtaaatatgttttgtagagtgaagccatgggaagccatgtgtaacagagcttagacatccaaaactaatcaatgctgaggtggctaaatacctagccttttacatgtaaacctgtctgcaaaattagcttttttaaaaaaaaaaaaaaaaaaattgggggggttaatttatcattcagaaatcttgcattttcaaaaattcagtgcaagcgccaggcgatttgtgtctaaggatacgattttgaaccatatgggcagtgtacaaaatatgaaacaactgtttccacacttgcacctgatcaagagcagtgcttctccatttgttttgcagagaaatgtttttcatttcccgtgtgtttccatttccttctgaaattctgattttatccatttttttaaggctcctctttatctcctttcttaaggcactgttgctatggcacttttctataaccttttcattcctgtgtacagtagcttaaaattgcagtgattgagcataacctacttgtttgtataaattattgaaatccatttgcaccctgtaagaatggacttaaaagtactgctggacaggcatgtgtgctcaaagtacattgattgctcaaatataaggaaatggcccaatgaacgtggttgtgggaggggaaagaggaaacagagctagtcagatgtgaattgtatctgttgtaataaacatgttaaaacaaacaaaaattgttatttttcttttccttcggtcagtgcacattagcatttgaactacctggggattctttatcagaactgttcttgttgaatatttatacttaattgaaataattccttaagggaggttttgtttaaaacgtattaacaggaaattgtgtatgagatatttaatgaaataagaaattcaacaagaatgattaagtcacttcccaagtggttgtcatttgttaaaccctggtttacctgtcttgctattatgacatttcatttggaaggatgtttgtgttgtagctaactgttcaagtctggtgctgactgctgttcttagccatcacaaaacgctaaatttgtgtaattggagcttcctgctgttatctggaaatagcaggaaagcgcagctttgtatattgtttcctaaagtatattaaaataaaaaaagaaactattgctactat

SEQ ID NO: 365318 - DNA, 2959 bp, Homo sapiens
tggcgaattcggcacgagggaggaggagaagaaggaccaggcgccgccgcctgcgcgcccgcccgcctttcgcggccgctctcccccctccccgacacacactcacaggccgggcattgatggtaatgtatgcgaggaaacagcagagactcagtgatggagtcaacagcttcccaaaagatagggattacagaagagaggtgatgcaagcaacagccactagtgggtttgccagtggaatggaagacaagcattccagtgatgccagtagtttgctcccacagaatattttgtctcaaacaagcagacacaatgacagagactacagactgccaagagcagagactcacagtagttctacgccagtacagcaccccatcaaaccagtggttcatccaactgctaccccaagcactgttccttctagtccatttacgctacagtctgatcaccagccaaagaaatcatttgatgctaatggagcatctactttatcaaaactgcctacacccacatcttctgtccctgcacagaaaacagaaagaaaagaatctacatcaggagacaaacccgtatcacattcttgcacaactccttccacgtcttctgcctctggactgaaccccacatctgcacctccaacatctgcttcagcggtccctgtttctcctgttccacagtcgccaatacctcccttacttcaggacccaaatcttcttagacaattgcttcctgctttgcaagccacgctgcagcttaataattctaatgtggacatatctaaaataaatgaagttcttacagcagctgtgacacaagcctcactgcagtctataattcataagtttcttactgctggaccatctgctttcaacataacgtctctgatttctcaagctgctcagctctctacacaagcccagccatctaatcagtctccgatgtctttaacatctgatgcgtcatccccaagatcatatgtttctccaagaataagcacacctcaaactaacacagtccctatcaaacctttgatcagtactcctcctgtttcatcacagccaaaggttagtactccagtagttaagcaaggaccagtgtcacagtcagccacacagcagcctgtaactgctgacaagcagcaaggtcatgaacctgtctctcctcgaagtcttcagcgctcaagtagccagagaagtccatcacctggtcccaatcatacttctaatagtagtaatgcatcaaatgcaacagttgtaccacagaattcttctgcccgatccacgtgttcattaacgcctgcactagcagcacacttcagtgaaaatctcataaaacacgttcaaggatggcctgcagatcatgcagagaagcaggcatcaagattacgcgaagaagcgcataacatgggaactattcacatgtccgaaatttgtactgaattaaaaaatttaagatctttagtccgagtatgtgaaattcaagcaactttgcgagagcaaaggatactatttttgagacaacaaattaaggaacttgaaaagctaaaaaatcagaattccttcatggtgtgaagatgtgaataattgcacatggttttgagaacaggaactgtaaatctgttgcccaatcttaacatttttgagctgcatttaagtagactttggaccgttaagctgggcaaaggaaatgacaaggggacggggtctgtgagagtcaattcaggggaaagatacaagattgatttgtaaaacccttgaaatgtagatttcttgtagatgtatccttcacgttgtaaatatgttttgtagagtgaagccatgggaagccatgtgtaacagagcttagacatccaaaactaatcaatgctgaggtggctaaatacctagccttttacatgtaaacctgtctgcaaaattagcttttttaaaaaaaaaaaaaaaaaaattgggggggttaatttatcattcagaaatcttgcattttcaaaaattcagtgcaagcgccaggcgatttgtgtctaaggatacgattttgaaccatatgggcagtgtacaaaatatgaaacaactgtttccacacttgcacctgatcaagagcagtgcttctccatttgttttgcagagaaatgtttttcatttcccgtgtgtttccatttccttctgaaattctgattttatccatttttttaaggctcctctttatctcctttcttaaggcactgttgctatggcacttttctataaccttttcattcctgtgtacagtagcttaaaattgcagtgattgagcataacctacttgtttgtataaattattgaaatccatttgcaccctgtaagaatggacttaaaagtactgctggacaggcatgtgtgctcaaagtacattgattgctcaaatataaggaaatggcccaatgaacgtggttgtgggaggggaaagaggaaacagagctagtcagatgtgaattgtatctgttgtaataaacatgttaaaacaaacaaaaattgttatttttcttttccttcggtcagtgcacattagcatttgaactacctggggattctttatcagaactgttcttgttgaatatttatacttaattgaaataattccttaagggaggttttgtttaaaacgtattaacaggaaattgtgtatgagatatttaatgaaataagaaattcaacaagaatgattaagtcacttcccaagtggttgtcatttgttaaaccctggtttacctgtcttgctattatgacatttcatttggaaggatgtttgtgttgtagctaactgttcaagtctggtgctgactgctgttcttagccatcacaaaacgctaaatttgtgtaattggagcttcctgctgttatctggaaatagcaggaaagcgcagctttgtatattgtttcctaaagtatattaaaataaaaaaagaaactattgctactat

SEQ ID NO: 365319 - DNA, 3047 bp, Homo sapiens
  misc_feature (16)..(16): n is a, c, g, or t
  misc_feature (29)..(30): n is a, c, g, or t
aacgttaggctaggtncgaggctgggtgnnggtatgtatgcgaggaaacagcagagactcagtgatggctgtcacgaccggaggggggactcgcagccttaccaggcacttaagtattcatcgaagagtcaccccagtagcggtgatcacagacatgaaaagatgcgagacgccggagatccttcaccaccaaataaaatgttgcggagatctgatagtcctgaaaacaaatacagtgacagcacaggtcacagtaaggccaaaaatgtgcatactcacagagttagagagagggatggtgggaccagttactctccacaagaaaattcacacaaccacagtgctcttcatagttcaaattcacattcttctaatccaagcaataacccaagcaaaacttcagatgcaccttatgattctgcagatgactggtctgagcatattagctcttctgggaaaaagtactactacaattgtcgaacagaagtttcacaatgggaaaaaccaaaagagtggcttgaaagagaacagagacaaaaagaagcaaacaagatggcagtcaacagcttcccaaaagatagggattacagaagagaggtgatgcaagcaacagccactagtgggtttgccagtggaaaatctacatcaggagacaaacccgtatcacattcttgcacaactccttccacgtcttctgcctctggactgaaccccacatctgcacctccaacatctgcttcagcggtccctgtttctcctgttccacagtcgccaatacctcccttacttcaggacccaaatcttcttagacaattgcttcctgctttgcaagccacgctgcagcttaataattctaatgtggacatatctaaaataaatgaagttcttacagcagctgtgacacaagcctcactgcagtctataattcataagtttcttactgctggaccatctgctttcaacataacgtctctgatttctcaagctgctcagctctctacacaagcccagccatctaatcagtctccgatgtctttaacatctgatgcgtcatccccaagatcatatgtttctccaagaataagcacacctcaaactaacacagtccctatcaaacctttgatcagtactcctcctgtttcatcacagccaaaggttagtactccagtagttaagcaaggaccagtgtcacagtcagccacacagcagcctgtaactgctgacaagcagcaaggtcatgaacctgtctctcctcgaagtcttcagcgctcaagtagccagagaagtccatcacctggtcccaatcatacttctaatagtagtaatgcatcaaatgcaacagttgtaccacagaattcttctgcccgatccacgtgttcattaacgcctgcactagcagcacacttcagtgaaaatctcataaaacacgttcaaggatggcctgcagatcatgcagagaagcaggcatcaagattacgcgaagaagcgcataacatgggaactattcacatgtccgaaatttgtactgaattaaaaaatttaagatctttagtccgagtatgtgaaattcaagcaactttgcgagagcaaaggatactatttttgagacaacaaattaaggaacttgaaaagctaaaaaatcagaattccttcatggtgtgaagatgtgaataattgcacatggttttgagaacaggaactgtaaatctgttgcccaatcttaacatttttgagctgcatttaagtagactttggaccgttaagctgggcaaaggaaatgacaaggggacggggtctgtgagagtcaattcaggggaaagatacaagattgatttgtaaaacccttgaaatgtagatttcttgtagatgtatccttcacgttgtaaatatgttttgtagagtgaagccatgggaagccatgtgtaacagagcttagacatccaaaactaatcaatgctgaggtggctaaatacctagccttttacatgtaaacctgtctgcaaaattagcttttttaaaaaaaaaaaaaaaaaaattgggggggttaatttatcattcagaaatcttgcattttcaaaaattcagtgcaagcgccaggcgatttgtgtctaaggatacgattttgaaccatatgggcagtgtacaaaatatgaaacaactgtttccacacttgcacctgatcaagagcagtgcttctccatttgttttgcagagaaatgtttttcatttcccgtgtgtttccatttccttctgaaattctgattttatccatttttttaaggctcctctttatctcctttcttaaggcactgttgctatggcacttttctataaccttttcattcctgtgtacagtagcttaaaattgcagtgattgagcataacctacttgtttgtataaattattgaaatccatttgcaccctgtaagaatggacttaaaagtactgctggacaggcatgtgtgctcaaagtacattgattgctcaaatataaggaaatggcccaatgaacgtggttgtgggaggggaaagaggaaacagagctagtcagatgtgaattgtatctgttgtaataaacatgttaaaacaaacaaaaattgttatttttcttttccttcggtcagtgcacattagcatttgaactacctggggattctttatcagaactgttcttgttgaatatttatacttaattgaaataattccttaagggaggttttgtttaaaacgtattaacaggaaattgtgtatgagatatttaatgaaataagaaattcaacaagaatgattaagtcacttcccaagtggttgtcatttgttaaaccctggtttacctgtcttgctattatgacatttcatttggaaggatgtttgtgttgtagctaactgttcaagtctggtgctgactgctgttcttagccatcacaaaacgctaaatttgtgtaattggagcttcctgctgttatctggaaatagcaggaaagcgcagctttgtatattgtttcctaaagtatattaaaataaaaaaagaaactattgctactat

SEQ ID NO: 365320 - DNA, 3299 bp, Homo sapiens
agggccggtggcgcgcggcgtccggtgaggggcagcggcccgggctcggttccggcttccagcagcggcccgaaggcgccggagcacgctccccgctccccagaacgcagcttccgcggctgcagcccaggcagctcttcgggaagcgtccgcccgtggtctcgccagggggtttccgacctccccgcccgacagcgcaggggcgggggccgcggccggagagctcgcccgagagcaccccctcccgctgcgcctctgggcgcacgcgcagccgctgcagcctcccttatttagtccgcgatggcttccctcgcgccccaccgtcctcttccggaaggcggctccctccctgcgcagcccggagcccctgagatcagcctcgagcaggcgcccgagcgagactatccctaaacgggaacggcggtggccgactcgcgagtgaggaaaagaaggaaagggcagactggtcgcgaagagaagatccaggcctcagaggaggagaaaggccggagccagccgaggtttgccgagggcggtgttccggacccgcgcggtgcggggaggaaggccgagggtgggagaggaggggcccggcggaaactgccgaggtttcccgaaggcggcagcgtccgagttgcccggatgtagttggtggagcggcagccgccgcctgcgcgcccgcccgcctttcgcggccgctctcccccctccccgacacacactcacaggccgggcattgatggtaatgtatgcgaggaaacagcagagactcagtgatggctgtcacgaccggaggggggactcgcagccttaccaggcacttaagtattcatcgaagagtcaccccagtagcggtgatcacagacatgaaaagatgcgagacgccggagatccttcaccaccaaataaaatgttgcggagatctgatagtcctgaaaacaaatacagtgacagcacaggtcacagtaaggccaaaaatgtgcatactcacagagttagagagagggatggtgggaccagttactctccacaagaaaattcacacaaccacagtgctcttcatagttcaaattcacattcttctaatccaagcaataacccaagcaaaacttcagatgcaccttatgattctgcagatgactggtctgagcatattagctcttctgggaaaaagtactactacaattgtcgaacagaagtttcacaatgggaaaaaccaaaagagtggcttgaaagagaacagagacaaaaagaagcaaacaagatggcagtcaacagcttcccaaaagatagggattacagaagagaggtgatgcaagcaacagccactagtgggtttgccagtggaaaatctacatcaggagacaaacccgtatcacattcttgcacaactccttccacgtcttctgcctctggactgaaccccacatctgcacctccaacatctgcttcagcggtccctgtttctcctgttccacagtcgccaatacctcccttacttcaggacccaaatcttcttagacaattgcttcctgctttgcaagccacgctgcagcttaataattctaatgtggacatatctaaaataaatgaagttcttacagcagctgtgacacaagcctcactgcagtctataattcataagtttcttactgctggaccatctgctttcaacataacgtctctgatttctcaagctgctcagctctctacacaagcccagccatctaatcagtctccgatgtctttaacatctgatgcgtcatccccaagatcatatgtttctccaagaataagcacacctcaaactaacacagtccctatcaaacctttgatcagtactcctcctgtttcatcacagccaaaggttagtactccagtagttaagcaaggaccagtgtcacagtcagccacacagcagcctgtaactgctgacaagcagcaaggtcatgaacctgtctctcctcgaagtcttcagcgctcaagtagccagagaagtccatcacctggtcccaatcatacttctaatagtagtaatgcatcaaatgcaacagttgtaccacagaattcttctgcccgatccacgtgttcattaacgcctgcactagcagcacacttcagtgaaaatctcataaaacacgttcaaggatggcctgcagatcatgcagagaagcaggcatcaagattacgcgaagaagcgcataacatgggaactattcacatgtccgaaatttgtactgaattaaaaaatttaagatctttagtccgagtatgtgaaattcaagcaactttgcgagagcaaaggatactatttttgagacaacaaattaaggaacttgaaaagctaaaaaatcagaattccttcatggtgtgaagatgtgaataattgcacatggttttgagaacaggaactgtaaatctgttgcccaatcttaacatttttgagctgcatttaagtagactttggaccgttaagctgggcaaaggaaatgacaaggggacggggtctgtgagagtcaattcaggggaaagatacaagattgatttgtaaaacccttgaaatgtagatttcttgtagatgtatccttcacgttgtaaatatgttttgtagagtgaagccatgggaagccatgtgtaacagagcttagacatccaaaactaatcaatgctgaggtggctaaatacctagccttttacatgtaaacctgtctgcaaaattagcttttttaaaaaaaaaaaaaaaaaaattgggggggttaatttatcattcagaaatcttgcattttcaaaaattcagtgcaagcgccaggcgatttgtgtctaaggatacgattttgaaccatatgggcagtgtacaaaatatgaaacaactgtttccacacttgcacctgatcaagagcagtgcttctccatttgttttgcagagaaatgtttttcatttcccgtgtgtttccatttccttctgaaattctgattttatccatttttttaaggctcctctttatctcctttcttaaggcactgttgctatggcacttttctataaccttttcattcctgtgtacagtagcttaaaattgcagtgattgagcataacctacttgtttgtataaattattgaaatccatttgcaccctgtaagaatggacttaaaagtactgctggacaggcatgtgtgctcaaagtacattgattgctcaaatataaggaaatggcccaatgaacgtggttgtgggaggggaaagaggaaacagagctagtcagatgtgaattgtatctgttgtaataaacatgttaaa

SEQ ID NO: 365321 - DNA, 4014 bp, Homo sapiens
agggccggtggcgcgcggcgtccggtgaggggcagcggcccgggctcggttccggcttccagcagcggcccgaaggcgccggagcacgctccccgctccccagaacgcagcttccgcggctgcagcccaggcagctcttcgggaagcgtccgcccgtggtctcgccagggggtttccgacctccccgcccgacagcgcaggggcgggggccgcggccggagagctcgcccgagagcaccccctcccgctgcgcctctgggcgcacgcgcagccgctgcagcctcccttatttagtccgcgatggcttccctcgcgccccaccgtcctcttccggaaggcggctccctccctgcgcagcccggagcccctgagatcagcctcgagcaggcgcccgagcgagactatccctaaacgggaacggcggtggccgactcgcgagtgaggaaaagaaggaaagggcagactggtcgcgaagagaagatccaggcctcagaggaggagaaaggccggagccagccgaggtttgccgagggcggtgttccggacccgcgcggtgcggggaggaaggccgagggtgggagaggaggggcccggcggaaactgccgaggtttcccgaaggcggcagcgtccgagttgcccggatgtagttggtggagcggcagccgccgcctgcgcgcccgcccgcctttcgcggccgctctcccccctccccgacacacactcacaggccgggcattgatggtaatgtatgcgaggaaacagcagagactcagtgatggctgtcacgaccggaggggggactcgcagccttaccaggcacttaagtattcatcgaagagtcaccccagtagcggtgatcacagacatgaaaagatgcgagacgccggagatccttcaccaccaaataaaatgttgcggagatctgatagtcctgaaaacaaatacagtgacagcacaggtcacagtaaggccaaaaatgtgcatactcacagagttagagagagggatggtgggaccagttactctccacaagaaaattcacacaaccacagtgctcttcatagttcaaattcacattcttctaatccaagcaataacccaagcaaaacttcagatgcaccttatgattctgcagatgactggtctgagcatattagctcttctgggaaaaagtactactacaattgtcgaacagaagtttcacaatgggaaaaaccaaaagagtggcttgaaagagaacagagacaaaaagaagcaaacaagatggcagtcaacagcttcccaaaagatagggattacagaagagaggtgatgcaagcaacagccactagtgggtttgccagtggaatggaagacaagcattccagtgatgccagtagtttgctcccacagaatattttgtctcaaacaagcagacacaatgacagagactacagactgccaagagcagagactcacagtagttctacgccagtacagcaccccatcaaaccagtggttcatccaactgctaccccaagcactgttccttctagtccatttacgctacagtctgatcaccagccaaagaaatcatttgatgctaatggagcatctactttatcaaaactgcctacacccacatcttctgtccctgcacagaaaacagaaagaaaagaatctacatcaggagacaaacccgtatcacattcttgcacaactccttccacgtcttctgcctctggactgaaccccacatctgcacctccaacatctgcttcagcggtccctgtttctcctgttccacagtcgccaatacctcccttacttcaggacccaaatcttcttagacaattgcttcctgctttgcaagccacgctgcagcttaataattctaatgtggacatatctaaaataaatgaagttcttacagcagctgtgacacaagcctcactgcagtctataattcataagtttcttactgctggaccatctgctttcaacataacgtctctgatttctcaagctgctcagctctctacacaagcccagccatctaatcagtctccgatgtctttaacatctgatgcgtcatccccaagatcatatgtttctccaagaataagcacacctcaaactaacacagtccctatcaaacctttgatcagtactcctcctgtttcatcacagccaaaggttagtactccagtagttaagcaaggaccagtgtcacagtcagccacacagcagcctgtaactgctgacaagcagcaaggtcatgaacctgtctctcctcgaagtcttcagcgctcaagtagccagagaagtccatcacctggtcccaatcatacttctaatagtagtaatgcatcaaatgcaacagttgtaccacagaattcttctgcccgatccacgtgttcattaacgcctgcactagcagcacacttcagtgaaaatctcataaaacacgttcaaggatggcctgcagatcatgcagagaagcaggcatcaagattacgcgaagaagcgcataacatgggaactattcacatgtccgaaatttgtactgaattaaaaaatttaagatctttagtccgagtatgtgaaattcaagcaactttgcgagagcaaaggatactatttttgagacaacaaattaaggaacttgaaaagctaaaaacaggaactgtaaatctgttgcccaatcttaacatttttgagctgcatttaagtagactttggaccgttaagctgggcaaaggaaatgacaaggggacggggtctgtgagagtcaattcaggggaaagatacaagattgatttgtaaaacccttgaaatgtagatttcttgtagatgtatccttcacgttgtaaatatgttttgtagagtgaagccatgggaagccatgtgtaacagagcttagacatccaaaactaatcaatgctgaggtggctaaatacctagccttttacatgtaaacctgtctgcaaaattagcttttttaaaaaaaaaaaaaaaaaaattgggggggttaatttatcattcagaaatcttgcattttcaaaaattcagtgcaagcgccaggcgatttgtgtctaaggatacgattttgaaccatatgggcagtgtacaaaatatgaaacaactgtttccacacttgcacctgatcaagagcagtgcttctccatttgttttgcagagaaatgtttttcatttcccgtgtgtttccatttccttctgaaattctgattttatccatttttttaaggctcctctttatctcctttcttaaggcactgttgctatggcacttttctataaccttttcattcctgtgtacagtagcttaaaattgcagtgattgagcataacctacttgtttgtataaattattgaaatccatttgcaccctgtaagaatggacttaaaagtactgctggacaggcatgtgtgctcaaagtacattgattgctcaaatataaggaaatggcccaatgaacgtggttgtgggaggggaaagaggaaacagagctagtcagatgtgaattgtatctgttgtaataaacatgttaaaacaaacaaaaattgttatttttcttttccttcggtcagtgcacattagcatttgaactacctggggattctttatcagaactgttcttgttgaatatttatacttaattgaaataattccttaagggaggttttgtttaaaacgtattaacaggaaattgtgtatgagatatttaatgaaataagaaattcaacaagaatgattaagtcacttcccaagtggttgtcatttgttaaaccctggtttacctgtcttgctattatgacatttcatttggaaggatgtttgtgttgtagctaactgttcaagtctggtgctgactgctgttcttagccatcacaaaacgctaaatttgtgtaattggagcttcctgctgttatctggaaatagcaggaaagcgcagctttgtatattgtttcctaaagtatattaaaataaaaaaagaaactattgctactat

SEQ ID NO: 365322 - DNA, 2866 bp, Homo sapiens
agggccggtggcgcgcggcgtccggtgaggggcagcggcccgggctcggttccggcttccagcagcggcccgaaggcgccggagcacgctccccgctccccagaacgcagcttccgcggctgcagcccaggcagctcttcgggaagcgtccgcccgtggtctcgccagggggtttccgacctccccgcccgacagcgcaggggcgggggccgcggccggagagctcgcccgagagcaccccctcccgctgcgcctctgggcgcacgcgcagccgctgcagcctcccttatttagtccgcgatggcttccctcgcgccccaccgtcctcttccggaaggcggctccctccctgcgcagcccggagcccctgagatcagcctcgagcaggcgcccgagcgagactatccctaaacgggaacggcggtggccgactcgcgagtgaggaaaagaaggaaagggcagactggtcgcgaagagaagatccaggcctcagaggaggagaaaggccggagccagccgaggtttgccgagggcggtgttccggacccgcgcggtgcggggaggaaggccgagggtgggagaggaggggcccggcggaaactgccgaggtttcccgaaggcggcagcgtccgagttgcccggatgtagttggtggagcggcagccgccgcctgcgcgcccgcccgcctttcgcggccgctctcccccctccccgacacacactcacaggccgggcattgatggtaatgtatgcgaggaaacagcagagactcagtgatggctgtcacgaccggaggggggactcgcagccttaccaggcacttaagtattcatcgaagagtcaccccagtagcggtgatcacagacatgaaaagatgcgagacgccggagatccttcaccaccaaataaaatgttgcggagatctgatagtcctgaaaacaaatacagtgacagcacaggtcacagtaaggccaaaaatgtgcatactcacagagttagagagagggatggtgggaccagttactctccacaagaaaattcacacaaccacagtgctcttcatagttcaaattcacattcttctaatccaagcaataacccaagcaaaacttcagatgcaccttatgattctgcagatgactggtctgagcatattagctcttctgggaaaaagtactactacaattgtcgaacagaagtttcacaatgggaaaaaccaaaagagtggcttgaaagagaacagagacaaaaagaagcaaacaagatggcagtcaacagcttcccaaaagatagggattacagaagagaggtgatgcaagcaacagccactagtgggtttgccagtggaatggaagacaagcattccagtgatgccagtagtttgctcccacagaatattttgtctcaaacaagcagacacaatgacagagactacagactgccaagagcagagactcacagtagttctacgccagtacagcaccccatcaaaccagtggttcatccaactgctaccccaagcactgttccttctagtccatttacgctacagtctgatcaccagccaaagaaatcatttgatgctaatggagcatctactttatcaaaactgcctacacccacatcttctgtccctgcacagaaaacagaaagaaaagaatctacatcaggagacaaacccgtatcacattcttgcacaactccttccacgtcttctgcctctggactgaaccccacatctgcacctccaacatctgcttcagcggtccctgtttctcctgttccacagtcgccaatacctcccttacttcaggacccaaatcttcttagacaattgcttcctgctttgcaagccacgctgcagcttaataattctaatgtggacatatctaaaataaatgaagttcttacagcagctgtgacacaagcctcactgcagtctataattcataagtttcttactgctggaccatctgctttcaacataacgtctctgatttctcaagctgctcagctctctacacaagcccagccatctaatcagtctccgatgtctttaacatctgatgcgtcatccccaagatcatatgtttctccaagaataagcacacctcaaactaacacagtccctatcaaacctttgatcagtactcctcctgtttcatcacagccaaaggttagtactccagtagttaagcaaggaccagtgtcacagtcagccacacagcagcctgtaactgctgacaagcagcaaggtcatgaacctgtctctcctcgaagtcttcagcgctcaagtagccagagaagtccatcacctggtcccaatcatacttctaatagtagtaatgcatcaaatgcaacagttgtaccacagaattcttctgcccgatccacgtgttcattaacgcctgcactagcagcacacttcagtgaaaatctcataaaacacgttcaaggatggcctgcagatcatgcagagaagcaggcatcaagattacgcgaagaagcgcataacatgggaactattcacatgtccgaaatttgtactgaattaaaaaatttaagatctttagtccgagtatgtgaaattcaagcaactttgcgagagcaaaggtaagtctttcactgaaatatatttttatgtttctcaggattatgattcttaaatcgaactaaagaatgtaaatcacattttatttatgaaatgtaaagttctcttcgatacattgatcacattctatcactgcattttcataagttaatatttctcgtgaaggataaagcctgtcgattttctcttaacccatgatgaatgcttcattagacttttctcataactccataagctgcaataatatattactga

SEQ ID NO: 365323 - DNA, 2238 bp, Homo sapiens
agggccggtggcgcgcggcgtccggtgaggggcagcggcccgggctcggttccggcttccagcagcggcccgaaggcgccggagcacgctccccgctccccagaacgcagcttccgcggctgcagcccaggcagctcttcgggaagcgtccgcccgtggtctcgccagggggtttccgacctccccgcccgacagcgcaggggcgggggccgcggccggagagctcgcccgagagcaccccctcccgctgcgcctctgggcgcacgcgcagccgctgcagcctcccttatttagtccgcgatggcttccctcgcgccccaccgtcctcttccggaaggcggctccctccctgcgcagcccggagcccctgagatcagcctcgagcaggcgcccgagcgagactatccctaaacgggaacggcggtggccgactcgcgagtgaggaaaagaaggaaagggcagactggtcgcgaagagaagatccaggcctcagaggaggagaaaggccggagccagccgaggtttgccgagggcggtgttccggacccgcgcggtgcggggaggaaggccgagggtgggagaggaggggcccggcggaaactgccgaggtttcccgaaggcggcagcgtccgagttgcccggatgtagttggtggagcggcagccgccgcctgcgcgcccgcccgcctttcgcggccgctctcccccctccccgacacacactcacaggccgggcattgatggtaatgtatgcgaggaaacagcagagactcagtgatggctgtcacgaccggaggggggactcgcagccttaccaggcacttaagtattcatcgaagagtcaccccagtagcggtgatcacagacatgaaaagatgcgagacgccggagatccttcaccaccaaataaaatgttgcggagatctgatagtcctgaaaacaaatacagtgacagcacaggtcacagtaaggccaaaaatgtgcatactcacagagttagagagagggatggtgggaccagttactctccacaagaaaattcacacaaccacagtgctcttcatagttcaaattcacattcttctaatccaagcaataacccaagcaaaacttcagatgcaccttatgattctgcagatgactggtctgagcatattagctcttctgggaaaaagtactactacaattgtcgaacagaagtttcacaatgggaaaaaccaaaagagtggcttgaaagagaacagagacaaaaagaagcaaacaagatggcagtcaacagcttcccaaaagatagggattacagaagagaggtgatgcaagcaacagccactagtgggtttgccagtggaatggaagacaagcattccagtgatgccagtagtttgctcccacagaatattttgtctcaaacaagcagacacaatgacagagactacagactgccaagagcagagactcacagtagttctacgccagtacagcaccccatcaaaccagtggttcatccaactgctaccccaagcactgttccttctagtccatttacgctacagtctgatcaccagccaaagaaatcatttgatgctaatggagcatctactttatcaaaactgcctacacccacatcttctgtccctgcacagaaaacagaaagaaaagaatctacatcaggagacaaacccgtatcacattcttgcacaactccttccacgtcttctgcctctggactgaaccccacatctgcacctccaacatctgcttcagcggtccctgtttctcctgttccacagtcgccaatacctcccttacttcaggacccaaatcttcttagacaattgcttcctgctttgcaagccacgctgcagcttaataattctaatgtggacatatctaaaataaatgaagaaggtaaatcttcataacagttttttaaaaatttatttgcattgtgcaaagttatgtaagtagtaaaatccccagtttaggaatggtctttgttttcttttgaaatttatagttgaacacttttttttgttttgttttttgtttttggagtttggaaatttatatccactgtagtttaagaccattggtagtataattgagttagtggtgcttggatcttgtgtatatttttcaatacttgttatgtgtctggtagttactggaggtaagccattctatatacataatgtgtatggtgaaattttacattaaaacaatcgagcgtttgttgaaa

SEQ ID NO: 365324 - DNA, 2288 bp, Homo sapiens
agggccggtggcgcgcggcgtccggtgaggggcagcggcccgggctcggttccggcttccagcagcggcccgaaggcgccggagcacgctccccgctccccagaacgcagcttccgcggctgcagcccaggcagctcttcgggaagcgtccgcccgtggtctcgccagggggtttccgacctccccgcccgacagcgcaggggcgggggccgcggccggagagctcgcccgagagcaccccctcccgctgcgcctctgggcgcacgcgcagccgctgcagcctcccttatttagtccgcgatggcttccctcgcgccccaccgtcctcttccggaaggcggctccctccctgcgcagcccggagcccctgagatcagcctcgagcaggcgcccgagcgagactatccctaaacgggaacggcggtggccgactcgcgagtgaggaaaagaaggaaagggcagactggtcgcgaagagaagatccaggcctcagaggaggagaaaggccggagccagccgaggtttgccgagggcggtgttccggacccgcgcggtgcggggaggaaggccgagggtgggagaggaggggcccggcggaaactgccgaggtttcccgaaggcggcagcgtccgagttgcccggatgtagttggtggagcggcagccgccgcctgcgcgcccgcccgcctttcgcggccgctctcccccctccccgacacacactcacaggccgggcattgatggtaatgtatgcgaggaaacagcagagactcagtgatggctgtcacgaccggaggggggactcgcagccttaccaggcacttaagtattcatcgaagagtcaccccagtagcggtgatcacagacatgaaaagatgcgagacgccggagatccttcaccaccaaataaaatgttgcggagatctgatagtcctgaaaacaaatacagtgacagcacaggtcacagtaaggccaaaaatgtgcatactcacagagttagagagagggatggtgggaccagttactctccacaagaaaattcacacaaccacagtgctcttcatagttcaaattcacattcttctaatccaagcaataacccaagcaaaacttcagatgcaccttatgattctgcagatgactggtctgagcatattagctcttctgggaaaaagtactactacaattgtcgaacagaagtttcacaatgggaaaaaccaaaagagtggcttgaaagagaacagagacaaaaagaagcaaacaagatggcagtcaacagcttcccaaaagatagggattacagaagagaggtgatgcaagcaacagccactagtgggtttgccagtggaatggaagacaagcattccagtgatgccagtagtttgctcccacagaatattttgtctcaaacaagcagacacaatgacagagactacagactgccaagagcagagactcacagtagttctacgccagtacagcaccccatcaaaccagtggttcatccaactgctaccccaagcactgttccttctagtccatttacgctacagtctgatcaccagccaaagaaatcatttgatgctaatggagcatctactttatcaaaactgcctacacccacatcttctgtccctgcacagaaaacagaaagaaaagaatctacatcaggagacaaacccgtatcacattcttgcacaactccttccacgtcttctgcctctggactgaaccccacatctgcacctccaacatctgcttcagcggtccctgtttctcctgttccacagtcgccaatacctcccttacttcaggacccaaatcttcttagacaattgcttcctgctttgcaagccacgctgcagcttaataattctaatgtggacatatctaaaataaatgaagattcataagtttcttactgctggaccatctgctttcaacataacgtctctgatttctcaagctgctcagctctctacacaagcccagccatctaatcagtctccgatgtctttaacatctgatgcgtcatccccaagatcatatgtttctccaagaataagcacacctcaaactaacacagtccctatcaaacctttgatcagtactcctcctgtttcatcacagccaaaggtacttcaagaggtaaaccaggaccaatggcacaagtaggcacacaagaagcctggtactgtgtgccaggcgcgaaggcatgaaacctggttttcttgaagccttagcgttcaaccccagaggtcaataactggttccatcatacttttaaat

SEQ ID NO: 365325 - DNA, 1922 bp, Homo sapiens
agggccggtggcgcgcggcgtccggtgaggggcagcggcccgggctcggttccggcttccagcagcggcccgaaggcgccggagcacgctccccgctccccagaacgcagcttccgcggctgcagcccaggcagctcttcgggaagcgtccgcccgtggtctcgccagggggtttccgacctccccgcccgacagcgcaggggcgggggccgcggccggagagctcgcccgagagcaccccctcccgctgcgcctctgggcgcacgcgcagccgctgcagcctcccttatttagtccgcgatggcttccctcgcgccccaccgtcctcttccggaaggcggctccctccctgcgcagcccggagcccctgagatcagcctcgagcaggcgcccgagcgagactatccctaaacgggaacggcggtggccgactcgcgagtgaggaaaagaaggaaagggcagactggtcgcgaagagaagatccaggcctcagaggaggagaaaggccggagccagccgaggtttgccgagggcggtgttccggacccgcgcggtgcggggaggaaggccgagggtgggagaggaggggcccggcggaaactgccgaggtttcccgaaggcggcagcgtccgagttgcccggatgtagttggtggagcggcagccgccgcctgcgcgcccgcccgcctttcgcggccgctctcccccctccccgacacacactcacaggccgggcattgatggtaatgtatgcgaggaaacagcagagactcagtgatggctgtcacgaccggaggggggactcgcagccttaccaggcacttaagtattcatcgaagagtcaccccagtagcggtgatcacagacatgaaaagatgcgagacgccggagatccttcaccaccaaataaaatgttgcggagatctgatagtcctgaaaacaaatacagtgacagcacaggtcacagtaaggccaaaaatgtgcatactcacagagttagagagagggatggtgggaccagttactctccacaagaaaattcacacaaccacagtgctcttcatagttcaaattcacattcttctaatccaagcaataacccaagcaaaacttcagatgcaccttatgattctgcagatgactggtctgagcatattagctcttctgggaaaaagtactactacaattgtcgaacagaagtttcacaatgggaaaaaccaaaagagtggcttgaaagagaacagagacaaaaagaagcaaacaagatggcagtcaacagcttcccaaaagatagggattacagaagagaggtgatgcaagcaacagccactagtgggtttgccagtggaaaatctacatcaggagacaaacccgtatcacattcttgcacaactccttccacgtcttctgcctctggactgaaccccacatctgcacctccaacatctgcttcagcggtccctgtttctcctgttccacagtcgccaatacctcccttacttcaggacccaaatcttcttagacaattgcttcctgctttgcaagccacgctgcagcttaataattctaatgtggacatatctaaaataaatgaagttcttacagcagctgtgacacaagcctcactgcagtctataattcataagtttcttactgctggaccatctgctttcaacataacgtctctgatttctcaagctgctcagctctctacacaagcccagccatctaatcagtctccgatgtctttaacatctgatgcgtcatccccaagatcatatgtttctccaagaataagcacacctcaaactaacacagtccctatcaaacctttgatcagtactcctcctgtttcatcacagccaaagagtactccagcctgggtgacacagtgagaccccatctcaaaaaaaaaaaaaaaac

SEQ ID NO: 365326 - DNA, 1706 bp, Homo sapiens
agggccggtggcgcgcggcgtccggtgaggggcagcggcccgggctcggttccggcttccagcagcggcccgaaggcgccggagcacgctccccgctccccagaacgcagcttccgcggctgcagcccaggcagctcttcgggaagcgtccgcccgtggtctcgccagggggtttccgacctccccgcccgacagcgcaggggcgggggccgcggccggagagctcgcccgagagcaccccctcccgctgcgcctctgggcgcacgcgcagccgctgcagcctcccttatttagtccgcgatggcttccctcgcgccccaccgtcctcttccggaaggcggctccctccctgcgcagcccggagcccctgagatcagcctcgagcaggcgcccgagcgagactatccctaaacgggaacggcggtggccgactcgcgagtgaggaaaagaaggaaagggcagactggtcgcgaagagaagatccaggcctcagaggaggagaaaggccggagccagccgaggtttgccgagggcggtgttccggacccgcgcggtgcggggaggaaggccgagggtgggagaggaggggcccggcggaaactgccgaggtttcccgaaggcggcagcgtccgagttgcccggatgtagttggtggagcggcagccgccgcctgcgcgcccgcccgcctttcgcggccgctctcccccctccccgacacacactcacaggccgggcattgatggtaatgtatgcgaggaaacagcagagactcagtgatggctgtcacgaccggaggggggactcgcagccttaccaggcacttaagtattcatcgaagagtcaccccagtagcggtgatcacagacatgaaaagatgcgagacgccggagatccttcaccaccaaataaaatgttgcggagatctgatagtcctgaaaacaaatacagtgacagcacaggtcacagtaaggccaaaaatgtgcatactcacagagttagagagagggatggtgggaccagttactctccacaagaaaattcacacaaccacagtgctcttcatagttcaaattcacattcttctaatccaagcaataacccaagcaaaacttcagatgcaccttatgattctgcagatgactggtctgagcatattagctcttctgggaaaaagtactactacaattgtcgaacagaagtttcacaatgggaaaaaccaaaagagtggcttgaaaggtaattagcttttaatctaattaaacattatttctctagcttggttctactggttaacatcttacagcattaaacattctaatttagcttttttatagtgctgcccatctacactttttagttgcggtggttggttgccccttcgtgttttccatagtttgtctttacttttaaaaacaaaaaacctggctgggtgcagtggctcatgcctgtaatcccagaactttgggaggccaagacgggaggatcacttgagcccaggagtttgaggccagccctggcaacatagtgagaccctgcctctacaaaaagttagctgtgagtggtagcatgcacttgtagtcctagctactaagaggctgaggtgggaggatggcttgagcctaagaggccaaagctgcagtgagccatcatggtgccactacactctagcctgagcaacagagcaagatgctatctcaaaaaaaaaa

SEQ ID NO: 365327 - DNA, 480 bp, Homo sapiens
gcggccgcgcgggcgggcgggcgggaacgcagtgtggcggggagcgggggcccggcttcgcggcatttcgccctctccggcccttccggaggctccgggtttgtgccgtgtgcgtgcggggctcggcgctggggcgctcggtaggtctcccgcggggaggggcggcgggggccccgttttcttcctccccggccccccacccgcgccgtgtcttatgtcgctgccttctcttcctgtttttcagctgtcacgaccggaggggggactcgcagccttaccaggtaccagccgaggccggggtggagggattggaaggggccggagggggaagggagggactgctactcgagcgcaggcctcagaagtcgatacaggcccttcggtgcaacacatctgaaactagcaccgcggatccccttaaaattccaggtttggttcctttagcgctctccagcaaggtttagtgacttattttgacag

SEQ ID NO: 365328 - DNA, 700 bp, Homo sapiens
tgttactttagtttcagtaatcattgtgaatgagactgtgagaaacttggcttgttcagaagatactgtgcataagacatgagataacaagagtaatccacagacttaaaacatgagctcagatgccagccaaggcgtgattaccactcctcctcctcccagcatgcctcacaaagagagatattttgaccgcatcaatgaaaatgacccagaatacattagggagaggaacatgtctcctgatctacgacaagacttcaacatgatggagcagaggaaacgagttactcagatcctgcaaagtcctgcctttcgggaagacttggaatgccttattcaagaacagatgaagaaaggccacaacccaactggattactagcattacagcagattgcagattacatcatggccaattctttctcgggtttttcttcacctcctctcagtcttggcatggtcacacctatcaatgaccttcctggtgcagatacatcctcatatgtgaagggagaaaaacttactcgctgtaaacttgccagcctgtacagacttgtagacttgtttggatgggcacacctggcaaatacctatatctcagtaagaataagtaaggagcaagaccacattataataattcccagaggcctatctttttctgaagctacagcctccaatttggtataattttccattcctgtg

SEQ ID NO: 365329 - DNA, 747 bp, Homo sapiens
agcggaatcccagcacttcggaaggcagaggtgggcggatcacctgaggtcggcagttcaagaccagcctgaccaacatagagaaaccctgtctctactaaaaatacaaaattagccgggtggtggcgcatgcctgtaatcccagctactcaggaggctgaggcaggagaatcgcttcaacccgggaggcggaggttgcggcctttcgggaagacttggaatgccttattcaagaacagatgaagaaaggccacaacccaactggattactagcattacagcagattgcagattacatcatggccaattctttctcgggtttttcttcacctcctctcagtcttggcatggtcacacctatcaatgaccttcctggtgcagatacatcctcatatgtgaagggagaaaaacttactcgctgtaaacttgccagcctgtacagacttgtagacttgtttggatgggcacacctggcaaatacctatatctcagtaagaataagtaaggagcaagaccacattataataattcccagaggcctatctttttctgaagctacagcctccaatttggtgaaagtcaatataataggagaagtggttgaccagggaagtagatgctttactatctgcttttcaaaatcatatttgatacaataatctgcatacccagaaagcaaaaggcctttgggaccaaatgctaccattctaggaaacaactggagaaataacatttggattctaaaac

SEQ ID NO: 365330 - DNA, 971 bp, Homo sapiens
aatatgttaagaggtatggctctaatgtgttttccatcagggaggatcagagtcttggaaggtttctttttcagataggtggaaaagatacttcagctgtctgctggcacaagagtgtcatcttgtctttgttgttagtagcctgagcaagtattatagatatttgccaaattgaaattgtgcctttttgaaagtaaaatactcattacagtctttatagttttgtgtctctgtatattttaccattgattacaggtgcaggccctagcaggtgcaggtggagtagacaatctccatgtactggactttcagaagtataaagctttcacttacactgtagcagcgtctggtggaggaggtgtgaatatgggttcccatcaaaaatggaaggttggcgaaattgagtttgaagggcttatgaggactctggacaacttggtaggttgcaaaattgaagtaaaacttggatttaatgtcttcagattcaagagcagatgcttccatttttgtagaacatgctccatactcttccagaagctgagtttggccctaggaaagcatttcattgttatttaaccacacctttgagaattaaacagaacttacaaatgtcgtgttttttttttaagattacaatatatgttattaactgtagtcaccatagtacaatatatctcttgaactttttcctcctaactgaaattttgtatcctttgatcaacatctccccacccccacctccttgtaaccactattctactctacttttatgagttcaacttttttttttttcttggaggcaggatcttgcttggagtgccgtgacacaatcagggctcacttgcagtctcaacctgctgggctcaaaccattcttccacctcagcctcctgtgtatctgggacataacgtgtgtgccaccgtgcctggctaatttatttttttttttttactttttgtagagatagggtt

SEQ ID NO: 365331 - DNA, 514 bp, Homo sapiens
tcctggagaaaccaggcccagcttcatttggaggatttgacaggatcttagtaccaagtggaattgttgcctgcttaattttaattatgcttcccagcaggaggcctaaacacatgatgaagaactaattcagtacttgttggaatgcatgggaaaagagaaacctgaagaagttgttgagccttatgttaaaaacagccgagtagtggtgaaattaaattaagtggtaaagaaaattattttaatgagagcagtctttcaatagcaggtctggttggttattgatggctcctgcagacaataatgatgttaaaatctgcttgggcttagaatcagcaaacaaatcatttgcctaactggaggtaagggttttaagaatacttgaatacttcgattgtttttttctcctgccctttttgtctcattttgtaaggcaatgattcctacttgagtgaattcactgtttcaaagtagattttgttgttgttttggtgtatggtagtggtttcctggt

SEQ ID NO: 365332 - DNA, 4330 bp, Homo sapiens
agcgtagtcccgccagagcgcgagccgccagcccgtaacggtcgccagtgtgaggggcgggagggaaagaagaggggtttaaattagattttttaaaacacagagcaagcgccagaggcgtcggcatcccaggtgtcgccgcttcctgctgcacagggctcggcgtacaggtccctccctcctcaagccccctccccttctcccgccctaccctctggggctctgcggcgcttaagaggcggccgcagcggcggatccggcggctgctgcagcccgggcggctgccgagaaggagggaggggaaacacaaagccggctacgcgctgcgagataacaagagtaatccacagacttaaaacatgagctcagatgccagccaaggcgtgattaccactcctcctcctcccagcatgcctcacaaagagagatattttgaccgcatcaatgaaaatgacccagaatacattagggagaggaacatgtctcctgatctacgacaagacttcaacatgatggagcagaggaaacgagttactcagatcctgcaaagtcctgcctttcgggaagacttggaatgccttattcaagaacagatgaagaaaggccacaacccaactggattactagcattacagcagattgcagattacatcatggccaattctttctcgggtttttcttcacctcctctcagtcttggcatggtcacacctatcaatgaccttcctggtgcagatacatcctcatatgtgaagggagaaaaacttactcgctgtaaacttgccagcctgtacagacttgtagacttgtttggatgggcacacctggcaaatacctatatctcagtaagaataagtaaggagcaagaccacattataataattcccagaggcctatctttttctgaagctacagcctccaatttggtgaaagtcaatataataggagaagtggttgaccagggaagtaccaatttgaaaattgaccatacaggattcagtccccatgctgcaatctattcaacacgtcctgatgttaagtgtgtgatacacatccatacccttgcaacagcagctgtatcctccatgaaatgtgggatccttccaatttctcaagagtctcttcttctgggagatgttgcctattatgactaccaagggtcacttgaagaacaggaggagagaattcaactgcagaaggttctgggaccaagttgtaaggtgctggtactcaggaatcatggtgtggttgcacttggagaaacattagaggaggcttttcattatatttttaatgtgcaactagcctgtgagattcaggtgcaggccctagcaggtgcaggtggagtagacaatctccatgtactggactttcagaagtataaagctttcacttacactgtagcagcgtctggtggaggaggtgtgaatatgggttcccatcaaaaatggaaggttggcgaaattgagtttgaagggcttatgaggactctggacaacttggggtatagaacaggctatgcttacaggcatcctctcattcgagagaagcctaggcacaagagtgatgtggaaatcccagcaactgtgactgctttttcctttgaagacgatacagtgccactctctcctctcaaatacatggcacagaggcaacagcgtgaaaaaacaagatggctgaactcaccaaatacttacatgaaagtgaatgtgcctgaggagtctcggaacggagaaaccagtccccgaaccaaaatcacgtggatgaaagcagaagactcatctaaagttagtggtggaacacctatcaaaattgaagatccaaatcagtttgttcctttaaacacaaacccgaatgaggtactagaaaagagaaataagattcgggaacaaaatcgatatgacttgaaaacagcaggaccacaatctcagttgcttgctggaattgttgtggataagccaccttctactatgcaatttgaagatgatgatcatggcccaccagctcctcctaacccatttagtcatctcacagaaggagaacttgaagagtataagaggacaatcgaacgtaaacaacaaggcctagaagaaaaccatgagctgttttccaagagcttcatctccatggaagtgcctgtcatggtagtaaatggcaaggatgatatgcatgatgttgaagatgagcttgctaagcgagtgagtaggttaagcacaagtacaaccatagaaaacatcgagattactattaagtctccagagaaaatcgaagaagtcctgtcacctgaaggctccccttcaaaatcgccatccaagaaaaagaagaaattccgcactccttcttttctgaaaaagaacaaaaaaaaggagaaagttgaggcctaaataaagtctttttataattattattataacaatgtgacattgcacatctaaataccacatttaagttgatcattaatatgcaatggtagatcagattgggggatgtagcaaactggactttaagaactggaaagaggttttacaaaagaaaaactttcagattcatctctcattttatatgtccagaaatggctttgaattttaagcaattactagttttaattagctctgccctcatgaagtattattataattcaccataaacagctatctgtctgaattacttcaggccttctccataatatctgttagaaagaaattgccagtgagcaagtgagaatttttatttctcaatacctgcttcacttgataatcatattataattttttatcatgattattgactatatttttggagtcccattgtttcagtgggcattaacagaatgctttaaaaacttctaagacaagaatctatagcattagtatacactggcacataattttttaaaaagttttaagaaaagattcatttggaattttattcacagtataaaatttcctcacctgaagtaactttgtttgccaaaaaagttgttttaataaactataatttttgaaaacttccttttttattagtttagaaagccccttatttttcaacaaaggggattttgtacacataacatgggttatttagtttaactctggcaaaaaaaaaaaaaaaattttgtatgttgatgtttgtataccgttcagtataaaagtgtcctaagcatattagccaatcttttcacagtagagcatacttaaggctgcttggtactgagtatacttaaatataactccagaatccagggacttggtgttaaaacaggattagagcatgtaaaggtacatctagattcatatttgaatcttaaactgtatttttctcttagtattgctaatgagtaaagaaaagtctcataaggtagccaaatgaaaaagaatgaaagggaaagtgaaaaattaaggggacaaaagatgggatgtgaaaagaagaattctagtttgatggtgactcatattcacgataggatacaaagtgtgatttgttggaaacatgtcccaaatttctaaaattctgcttctctgccaaaagcaatgtctttcttggttgatatttgagttttaaaagggtcaaatctttctaattttttgtatctttagagggcagcactagaagaaatcagcaggtctaatcccaccagtaagaaaactaccacttcttgatttttacagatttaaaaaaatcttttcagtgacctttctttttaatgtaaatacaaatttaaacctaggcttaatataggcgtttcccctttcacccaagtgatgtcacagttcgatgcaaaatcaatgatccagaatgatcgtgggtaaaaataactcaaagtgtttcttaagggtgagttggcatgcaaaaaattacattgattacagtgtgttttggagctggctctgtttgtgtgcatatgataatgcagagttgagccagagcctggaaatgtcattctagatctcactaactactggaatcagtgttttaatctcttggtggaaactttcagttgcttaactctctattggaagatttttttaatgttctacatcatttatgttgtattacaatgtatgtagaaatagtaacctgtgaactatgcttttccataactttttaaaaatatatatatctaaatgaatgcaatgtgcataaatattttttaaacataacagtgaactattgcaccttttgctaatgcctctatttacttgctttggcataaagaatgagccaatgaacctctgtgtcctgtggaaaaatgtataaatgttatctgatattgctcttagatgtaatgctaattaatgttaaatcacaaataaacagtattttaaatata

SEQ ID NO: 365333 - DNA, 4426 bp, Homo sapiens
agcgtagtcccgccagagcgcgagccgccagcccgtaacggtcgccagtgtgaggggcgggagggaaagaagaggggtttaaattagattttttaaaacacagagcaagcgccagaggcgtcggcatcccaggtgtcgccgcttcctgctgcacagggctcggcgtacaggtccctccctcctcaagccccctccccttctcccgccctaccctctggggctctgcggcgcttaagaggcggccgcagcggcggatccggcggctgctgcagcccgggcggctgccgagaaggagggaggggaaacacaaagccggctacgcgctgcgagataacaagagtaatccacagacttaaaacatgagctcagatgccagccaaggcgtgattaccactcctcctcctcccagcatgcctcacaaagagagatattttgaccgcatcaatgaaaatgacccagaatacattagggagaggaacatgtctcctgatctacgacaagacttcaacatgatggagcagaggaaacgagttactcagatcctgcaaagtcctgcctttcgggaagacttggaatgccttattcaagaacagatgaagaaaggccacaacccaactggattactagcattacagcagattgcagattacatcatggccaattctttctcgggtttttcttcacctcctctcagtcttggcatggtcacacctatcaatgaccttcctggtgcagatacatcctcatatgtgaagggagaaaaacttactcgctgtaaacttgccagcctgtacagacttgtagacttgtttggatgggcacacctggcaaatacctatatctcagtaagaataagtaaggagcaagaccacattataataattcccagaggcctatctttttctgaagctacagcctccaatttggtgaaagtcaatataataggagaagtggttgaccagggaagtaccaatttgaaaattgaccatacaggattcagtccccatgctgcaatctattcaacacgtcctgatgttaagtgtgtgatacacatccatacccttgcaacagcagctgtatcctccatgaaatgtgggatccttccaatttctcaagagtctcttcttctgggagatgttgcctattatgactaccaagggtcacttgaagaacaggaggagagaattcaactgcagaaggttctgggaccaagttgtaaggtgctggtactcaggaatcatggtgtggttgcacttggagaaacattagaggaggcttttcattatatttttaatgtgcaactagcctgtgagattcaggtgcaggccctagcaggtgcaggtggagtagacaatctccatgtactggactttcagaagtataaagctttcacttacactgtagcagcgtctggtggaggaggtgtgaatatgggttcccatcaaaaatggaaggttggcgaaattgagtttgaagggcttatgaggactctggacaacttggggtatagaacaggctatgcttacaggcatcctctcattcgagagaagcctaggcacaagagtgatgtggaaatcccagcaactgtgactgctttttcctttgaagacgatacagtgccactctctcctctcaaatacatggcacagaggcaacagcgtgaaaaaacaagatggctgaactcaccaaatacttacatgaaagtgaatgtgcctgaggagtctcggaacggagaaaccagtccccgaaccaaaatcacgtggatgaaagcagaagactcatctaaagttagtggtggaacacctatcaaaattgaagatccaaatcagtttgttcctttaaacacaaacccgaatgaggtactagaaaagagaaataagattcgggaacaaaatcgatatgacttgaaaacagcaggaccacaatctcagttgcttgctggaattgttgtggataagccaccttctactatgcaatttgaagatgatgatcatggcccaccagctcctcctaacccatttagtcatctcacagaaggagaacttgaagagtataagaggacaatcgaacgtaaacaacaaggcctagaagatgctgagcaggaattactctcagatgacgcttcatctgtttcacaaattcagtctcaaactcagtcaccgcaaaatgtccctgaaaaattagaagaaaaccatgagctgttttccaagagcttcatctccatggaagtgcctgtcatggtagtaaatggcaaggatgatatgcatgatgttgaagatgagcttgctaagcgagtgagtaggttaagcacaagtacaaccatagaaaacatcgagattactattaagtctccagagaaaatcgaagaagtcctgtcacctgaaggctccccttcaaaatcgccatccaagaaaaagaagaaattccgcactccttcttttctgaaaaagaacaaaaaaaaggagaaagttgaggcctaaataaagtctttttataattattattataacaatgtgacattgcacatctaaataccacatttaagttgatcattaatatgcaatggtagatcagattgggggatgtagcaaactggactttaagaactggaaagaggttttacaaaagaaaaactttcagattcatctctcattttatatgtccagaaatggctttgaattttaagcaattactagttttaattagctctgccctcatgaagtattattataattcaccataaacagctatctgtctgaattacttcaggccttctccataatatctgttagaaagaaattgccagtgagcaagtgagaatttttatttctcaatacctgcttcacttgataatcatattataattttttatcatgattattgactatatttttggagtcccattgtttcagtgggcattaacagaatgctttaaaaacttctaagacaagaatctatagcattagtatacactggcacataattttttaaaaagttttaagaaaagattcatttggaattttattcacagtataaaatttcctcacctgaagtaactttgtttgccaaaaaagttgttttaataaactataatttttgaaaacttccttttttattagtttagaaagccccttatttttcaacaaaggggattttgtacacataacatgggttatttagtttaactctggcaaaaaaaaaaaaaaaattttgtatgttgatgtttgtataccgttcagtataaaagtgtcctaagcatattagccaatcttttcacagtagagcatacttaaggctgcttggtactgagtatacttaaatataactccagaatccagggacttggtgttaaaacaggattagagcatgtaaaggtacatctagattcatatttgaatcttaaactgtatttttctcttagtattgctaatgagtaaagaaaagtctcataaggtagccaaatgaaaaagaatgaaagggaaagtgaaaaattaaggggacaaaagatgggatgtgaaaagaagaattctagtttgatggtgactcatattcacgataggatacaaagtgtgatttgttggaaacatgtcccaaatttctaaaattctgcttctctgccaaaagcaatgtctttcttggttgatatttgagttttaaaagggtcaaatctttctaattttttgtatctttagagggcagcactagaagaaatcagcaggtctaatcccaccagtaagaaaactaccacttcttgatttttacagatttaaaaaaatcttttcagtgacctttctttttaatgtaaatacaaatttaaacctaggcttaatataggcgtttcccctttcacccaagtgatgtcacagttcgatgcaaaatcaatgatccagaatgatcgtgggtaaaaataactcaaagtgtttcttaagggtgagttggcatgcaaaaaattacattgattacagtgtgttttggagctggctctgtttgtgtgcatatgataatgcagagttgagccagagcctggaaatgtcattctagatctcactaactactggaatcagtgttttaatctcttggtggaaactttcagttgcttaactctctattggaagatttttttaatgttctacatcatttatgttgtattacaatgtatgtagaaatagtaacctgtgaactatgcttttccataactttttaaaaatatatatatctaaatgaatgcaatgtgcataaatattttttaaacataacagtgaactattgcaccttttgctaatgcctctatttacttgctttggcataaagaatgagccaatgaacctctgtgtcctgtggaaaaatgtataaatgttatctgatattgctcttagatgtaatgctaattaatgttaaatcacaaataaacagtattttaaatata

SEQ ID NO: 365334 - DNA, 4384 bp, Homo sapiens
agcgtagtcccgccagagcgcgagccgccagcccgtaacggtcgccagtgtgaggggcgggagggaaagaagaggggtttaaattagattttttaaaacacagagcaagcgccagaggcgtcggcatcccaggtgtcgccgcttcctgctgcacagggctcggcgtacaggtccctccctcctcaagccccctccccttctcccgccctaccctctggggctctgcggcgcttaagaggcggccgcagcggcggatccggcggctgctgcagcccgggcggctgccgagaaggagggaggggaaacacaaagccggctacgcgctgcgagataacaagagtaatccacagacttaaaacatgagctcagatgccagccaaggcgtgattaccactcctcctcctcccagcatgcctcacaaagagagatattttgaccgcatcaatgaaaatgacccagaatacattagggagaggaacatgtctcctgatctacgacaagacttcaacatgatggagcagaggaaacgagttactcagatcctgcaaagtcctggccagtggtattctatttccaaatgagtacatttcttaatggagaaattctaagcctttcgggaagacttggaatgccttattcaagaacagatgaagaaaggccacaacccaactggattactagcattacagcagattgcagattacatcatggccaattctttctcgggtttttcttcacctcctctcagtcttggcatggtcacacctatcaatgaccttcctggtgcagatacatcctcatatgtgaagggagaaaaacttactcgctgtaaacttgccagcctgtacagacttgtagacttgtttggatgggcacacctggcaaatacctatatctcagtaagaataagtaaggagcaagaccacattataataattcccagaggcctatctttttctgaagctacagcctccaatttggtgaaagtcaatataataggagaagtggttgaccagggaagtaccaatttgaaaattgaccatacaggattcagtccccatgctgcaatctattcaacacgtcctgatgttaagtgtgtgatacacatccatacccttgcaacagcagctgtatcctccatgaaatgtgggatccttccaatttctcaagagtctcttcttctgggagatgttgcctattatgactaccaagggtcacttgaagaacaggaggagagaattcaactgcagaaggttctgggaccaagttgtaaggtgctggtactcaggaatcatggtgtggttgcacttggagaaacattagaggaggcttttcattatatttttaatgtgcaactagcctgtgagattcaggtgcaggccctagcaggtgcaggtggagtagacaatctccatgtactggactttcagaagtataaagctttcacttacactgtagcagcgtctggtggaggaggtgtgaatatgggttcccatcaaaaatggaaggttggcgaaattgagtttgaagggcttatgaggactctggacaacttggggtatagaacaggctatgcttacaggcatcctctcattcgagagaagcctaggcacaagagtgatgtggaaatcccagcaactgtgactgctttttcctttgaagacgatacagtgccactctctcctctcaaatacatggcacagaggcaacagcgtgaaaaaacaagatggctgaactcaccaaatacttacatgaaagtgaatgtgcctgaggagtctcggaacggagaaaccagtccccgaaccaaaatcacgtggatgaaagcagaagactcatctaaagttagtggtggaacacctatcaaaattgaagatccaaatcagtttgttcctttaaacacaaacccgaatgaggtactagaaaagagaaataagattcgggaacaaaatcgatatgacttgaaaacagcaggaccacaatctcagttgcttgctggaattgttgtggataagccaccttctactatgcaatttgaagatgatgatcatggcccaccagctcctcctaacccatttagtcatctcacagaaggagaacttgaagagtataagaggacaatcgaacgtaaacaacaaggcctagaagaaaaccatgagctgttttccaagagcttcatctccatggaagtgcctgtcatggtagtaaatggcaaggatgatatgcatgatgttgaagatgagcttgctaagcgagtgagtaggttaagcacaagtacaaccatagaaaacatcgagattactattaagtctccagagaaaatcgaagaagtcctgtcacctgaaggctccccttcaaaatcgccatccaagaaaaagaagaaattccgcactccttcttttctgaaaaagaacaaaaaaaaggagaaagttgaggcctaaataaagtctttttataattattattataacaatgtgacattgcacatctaaataccacatttaagttgatcattaatatgcaatggtagatcagattgggggatgtagcaaactggactttaagaactggaaagaggttttacaaaagaaaaactttcagattcatctctcattttatatgtccagaaatggctttgaattttaagcaattactagttttaattagctctgccctcatgaagtattattataattcaccataaacagctatctgtctgaattacttcaggccttctccataatatctgttagaaagaaattgccagtgagcaagtgagaatttttatttctcaatacctgcttcacttgataatcatattataattttttatcatgattattgactatatttttggagtcccattgtttcagtgggcattaacagaatgctttaaaaacttctaagacaagaatctatagcattagtatacactggcacataattttttaaaaagttttaagaaaagattcatttggaattttattcacagtataaaatttcctcacctgaagtaactttgtttgccaaaaaagttgttttaataaactataatttttgaaaacttccttttttattagtttagaaagccccttatttttcaacaaaggggattttgtacacataacatgggttatttagtttaactctggcaaaaaaaaaaaaaaaattttgtatgttgatgtttgtataccgttcagtataaaagtgtcctaagcatattagccaatcttttcacagtagagcatacttaaggctgcttggtactgagtatacttaaatataactccagaatccagggacttggtgttaaaacaggattagagcatgtaaaggtacatctagattcatatttgaatcttaaactgtatttttctcttagtattgctaatgagtaaagaaaagtctcataaggtagccaaatgaaaaagaatgaaagggaaagtgaaaaattaaggggacaaaagatgggatgtgaaaagaagaattctagtttgatggtgactcatattcacgataggatacaaagtgtgatttgttggaaacatgtcccaaatttctaaaattctgcttctctgccaaaagcaatgtctttcttggttgatatttgagttttaaaagggtcaaatctttctaattttttgtatctttagagggcagcactagaagaaatcagcaggtctaatcccaccagtaagaaaactaccacttcttgatttttacagatttaaaaaaatcttttcagtgacctttctttttaatgtaaatacaaatttaaacctaggcttaatataggcgtttcccctttcacccaagtgatgtcacagttcgatgcaaaatcaatgatccagaatgatcgtgggtaaaaataactcaaagtgtttcttaagggtgagttggcatgcaaaaaattacattgattacagtgtgttttggagctggctctgtttgtgtgcatatgataatgcagagttgagccagagcctggaaatgtcattctagatctcactaactactggaatcagtgttttaatctcttggtggaaactttcagttgcttaactctctattggaagatttttttaatgttctacatcatttatgttgtattacaatgtatgtagaaatagtaacctgtgaactatgcttttccataactttttaaaaatatatatatctaaatgaatgcaatgtgcataaatattttttaaacataacagtgaactattgcaccttttgctaatgcctctatttacttgctttggcataaagaatgagccaatgaacctctgtgtcctgtggaaaaatgtataaatgttatctgatattgctcttagatgtaatgctaattaatgttaaatcacaaataaacagtattttaaatata

SEQ ID NO: 365335 - DNA, 4299 bp, Homo sapiens
agcgtagtcccgccagagcgcgagccgccagcccgtaacggtcgccagtgtgaggggcgggagggaaagaagaggggtttaaattagattttttaaaacacagagcaagcgccagaggcgtcggcatcccaggtgtcgccgcttcctgctgcacagggctcggcgtacaggtccctccctcctcaagccccctccccttctcccgccctaccctctggggctctgcggcgcttaagaggcggccgcagcggcggatccggcggctgctgcagcccgggcggctgccgagaaggagggaggggaaacacaaagccggctacgcgctgcgagataacaagagtaatccacagacttaaaacatgagctcagatgccagcccatgcctcacaaagagagatattttgaccgcatcaatgaaaatgacccagaatacattagggagaggaacatgtctcctgatctacgacaagacttcaacatgatggagcagaggaaacgagttactcagatcctgcaaagtcctgcctttcgggaagacttggaatgccttattcaagaacagatgaagaaaggccacaacccaactggattactagcattacagcagattgcagattacatcatggccaattctttctcgggtttttcttcacctcctctcagtcttggcatggtcacacctatcaatgaccttcctggtgcagatacatcctcatatgtgaagggagaaaaacttactcgctgtaaacttgccagcctgtacagacttgtagacttgtttggatgggcacacctggcaaatacctatatctcagtaagaataagtaaggagcaagaccacattataataattcccagaggcctatctttttctgaagctacagcctccaatttggtgaaagtcaatataataggagaagtggttgaccagggaagtaccaatttgaaaattgaccatacaggattcagtccccatgctgcaatctattcaacacgtcctgatgttaagtgtgtgatacacatccatacccttgcaacagcagctgtatcctccatgaaatgtgggatccttccaatttctcaagagtctcttcttctgggagatgttgcctattatgactaccaagggtcacttgaagaacaggaggagagaattcaactgcagaaggttctgggaccaagttgtaaggtgctggtactcaggaatcatggtgtggttgcacttggagaaacattagaggaggcttttcattatatttttaatgtgcaactagcctgtgagattcaggtgcaggccctagcaggtgcaggtggagtagacaatctccatgtactggactttcagaagtataaagctttcacttacactgtagcagcgtctggtggaggaggtgtgaatatgggttcccatcaaaaatggaaggttggcgaaattgagtttgaagggcttatgaggactctggacaacttggggtatagaacaggctatgcttacaggcatcctctcattcgagagaagcctaggcacaagagtgatgtggaaatcccagcaactgtgactgctttttcctttgaagacgatacagtgccactctctcctctcaaatacatggcacagaggcaacagcgtgaaaaaacaagatggctgaactcaccaaatacttacatgaaagtgaatgtgcctgaggagtctcggaacggagaaaccagtccccgaaccaaaatcacgtggatgaaagcagaagactcatctaaagttagtggtggaacacctatcaaaattgaagatccaaatcagtttgttcctttaaacacaaacccgaatgaggtactagaaaagagaaataagattcgggaacaaaatcgatatgacttgaaaacagcaggaccacaatctcagttgcttgctggaattgttgtggataagccaccttctactatgcaatttgaagatgatgatcatggcccaccagctcctcctaacccatttagtcatctcacagaaggagaacttgaagagtataagaggacaatcgaacgtaaacaacaaggcctagaagaaaaccatgagctgttttccaagagcttcatctccatggaagtgcctgtcatggtagtaaatggcaaggatgatatgcatgatgttgaagatgagcttgctaagcgagtgagtaggttaagcacaagtacaaccatagaaaacatcgagattactattaagtctccagagaaaatcgaagaagtcctgtcacctgaaggctccccttcaaaatcgccatccaagaaaaagaagaaattccgcactccttcttttctgaaaaagaacaaaaaaaaggagaaagttgaggcctaaataaagtctttttataattattattataacaatgtgacattgcacatctaaataccacatttaagttgatcattaatatgcaatggtagatcagattgggggatgtagcaaactggactttaagaactggaaagaggttttacaaaagaaaaactttcagattcatctctcattttatatgtccagaaatggctttgaattttaagcaattactagttttaattagctctgccctcatgaagtattattataattcaccataaacagctatctgtctgaattacttcaggccttctccataatatctgttagaaagaaattgccagtgagcaagtgagaatttttatttctcaatacctgcttcacttgataatcatattataattttttatcatgattattgactatatttttggagtcccattgtttcagtgggcattaacagaatgctttaaaaacttctaagacaagaatctatagcattagtatacactggcacataattttttaaaaagttttaagaaaagattcatttggaattttattcacagtataaaatttcctcacctgaagtaactttgtttgccaaaaaagttgttttaataaactataatttttgaaaacttccttttttattagtttagaaagccccttatttttcaacaaaggggattttgtacacataacatgggttatttagtttaactctggcaaaaaaaaaaaaaaaattttgtatgttgatgtttgtataccgttcagtataaaagtgtcctaagcatattagccaatcttttcacagtagagcatacttaaggctgcttggtactgagtatacttaaatataactccagaatccagggacttggtgttaaaacaggattagagcatgtaaaggtacatctagattcatatttgaatcttaaactgtatttttctcttagtattgctaatgagtaaagaaaagtctcataaggtagccaaatgaaaaagaatgaaagggaaagtgaaaaattaaggggacaaaagatgggatgtgaaaagaagaattctagtttgatggtgactcatattcacgataggatacaaagtgtgatttgttggaaacatgtcccaaatttctaaaattctgcttctctgccaaaagcaatgtctttcttggttgatatttgagttttaaaagggtcaaatctttctaattttttgtatctttagagggcagcactagaagaaatcagcaggtctaatcccaccagtaagaaaactaccacttcttgatttttacagatttaaaaaaatcttttcagtgacctttctttttaatgtaaatacaaatttaaacctaggcttaatataggcgtttcccctttcacccaagtgatgtcacagttcgatgcaaaatcaatgatccagaatgatcgtgggtaaaaataactcaaagtgtttcttaagggtgagttggcatgcaaaaaattacattgattacagtgtgttttggagctggctctgtttgtgtgcatatgataatgcagagttgagccagagcctggaaatgtcattctagatctcactaactactggaatcagtgttttaatctcttggtggaaactttcagttgcttaactctctattggaagatttttttaatgttctacatcatttatgttgtattacaatgtatgtagaaatagtaacctgtgaactatgcttttccataactttttaaaaatatatatatctaaatgaatgcaatgtgcataaatattttttaaacataacagtgaactattgcaccttttgctaatgcctctatttacttgctttggcataaagaatgagccaatgaacctctgtgtcctgtggaaaaatgtataaatgttatctgatattgctcttagatgtaatgctaattaatgttaaatcacaaataaacagtattttaaatata

SEQ ID NO: 365336 - DNA, 4309 bp, Homo sapiens
agcgtagtcccgccagagcgcgagccgccagcccgtaacggtcgccagtgtgaggggcgggagggaaagaagaggggtttaaattagattttttaaaacacagagcaagcgccagaggcgtcggcatcccaggtgtcgccgcttcctgctgcacagggctcggcgtacaggtccctccctcctcaagccccctccccttctcccgccctaccctctggggctctgcggcgcttaagaggcggccgcagcggcggatccggcggctgctgcagcccgggcggctgccgagaaggagggaggggaaacacaaagccggctacgcgctgcgagataacaagagtaatccacagacttaaaacatgagctcagatgccagccaaggcgtgattaccactcctcctcctcccagcatgcctcacaaagagagatattttgaccgcatcaatgaaaatgacccagaatacattagggagaggaacatgtctcctgatctacgacaagacttcaacatgatggagcagaggaaacgagttactcagatcctgcaaagtcctgcctttcgggaagacttggaatgccttattcaagaacagatgaagaaaggccacaacccaactggattactagcattacagcagattgcagattacatcatggccaattctttctcgggtttttcttcacctcctctcagtcttggcatggtcacacctatcaatgaccttcctggtgcagatacatcctcatatgtgaagggagaaaaacttactcgctgtaaacttgccagcctgtacagacttgtagacttgtttggatgggcacacctggcaaatacctatatctcagtaagaataagtaaggagcaagaccacattataataattcccagaggcctatctttttctgaagctacagcctccaatttggtgaaagtcaatataataggagaagtggttgaccagggaagtaccaatttgaaaattgaccatacaggattcagtccccatgctgcaatctattcaacacgtcctgatgttaagtgtgtgatacacatccatacccttgcaacagcagctgtatcctccatgaaatgtgggatccttccaatttctcaagagtctcttcttctgggagatgttgcctattatgactaccaagggtcacttgaagaacaggaggagagaattcaactgcagaaggttctgggaccaagttgtaaggtgctggtactcaggaatcatggtgtggttgcacttggagaaacattagaggaggcttttcattatatttttaatgtgcaactagcctgtgagattcaggtgcaggccctagcaggtgcaggtggagtagacaatctccatgtactggactttcagaagtataaagctttcacttacactgtagcagcgtctggtggaggaggtgtgaatatgggttcccatcaaaaatggaaggttggcgaaattgagtttgaagggcttatgaggactctggacaacttggggtatagaacaggctatgcttacaggcatcctctcattcgagagaagcctaggcacaagagtgatgtggaaatcccagcaactgtgactgctttttcctttgaagacgatacagtgccactctctcctctcaaatacatggcacagaggcaacagcgtgaaaaaacaagatggctgaactcaccaaatacttacatgaaagtgaatgtgcctgaggagtctcggaacggagaaaccagtccccgaaccaaaatcacgtggatgaaagcagaagactcatctaaagttagtggtggaacacctatcaaaattgaagatccaaatcagtttgttcctttaaacacaaacccgaatgagattcgggaacaaaatcgatatgacttgaaaacagcaggaccacaatctcagttgcttgctggaattgttgtggataagccaccttctactatgcaatttgaagatgatgatcatggcccaccagctcctcctaacccatttagtcatctcacagaaggagaacttgaagagtataagaggacaatcgaacgtaaacaacaaggcctagaagaaaaccatgagctgttttccaagagcttcatctccatggaagtgcctgtcatggtagtaaatggcaaggatgatatgcatgatgttgaagatgagcttgctaagcgagtgagtaggttaagcacaagtacaaccatagaaaacatcgagattactattaagtctccagagaaaatcgaagaagtcctgtcacctgaaggctccccttcaaaatcgccatccaagaaaaagaagaaattccgcactccttcttttctgaaaaagaacaaaaaaaaggagaaagttgaggcctaaataaagtctttttataattattattataacaatgtgacattgcacatctaaataccacatttaagttgatcattaatatgcaatggtagatcagattgggggatgtagcaaactggactttaagaactggaaagaggttttacaaaagaaaaactttcagattcatctctcattttatatgtccagaaatggctttgaattttaagcaattactagttttaattagctctgccctcatgaagtattattataattcaccataaacagctatctgtctgaattacttcaggccttctccataatatctgttagaaagaaattgccagtgagcaagtgagaatttttatttctcaatacctgcttcacttgataatcatattataattttttatcatgattattgactatatttttggagtcccattgtttcagtgggcattaacagaatgctttaaaaacttctaagacaagaatctatagcattagtatacactggcacataattttttaaaaagttttaagaaaagattcatttggaattttattcacagtataaaatttcctcacctgaagtaactttgtttgccaaaaaagttgttttaataaactataatttttgaaaacttccttttttattagtttagaaagccccttatttttcaacaaaggggattttgtacacataacatgggttatttagtttaactctggcaaaaaaaaaaaaaaaattttgtatgttgatgtttgtataccgttcagtataaaagtgtcctaagcatattagccaatcttttcacagtagagcatacttaaggctgcttggtactgagtatacttaaatataactccagaatccagggacttggtgttaaaacaggattagagcatgtaaaggtacatctagattcatatttgaatcttaaactgtatttttctcttagtattgctaatgagtaaagaaaagtctcataaggtagccaaatgaaaaagaatgaaagggaaagtgaaaaattaaggggacaaaagatgggatgtgaaaagaagaattctagtttgatggtgactcatattcacgataggatacaaagtgtgatttgttggaaacatgtcccaaatttctaaaattctgcttctctgccaaaagcaatgtctttcttggttgatatttgagttttaaaagggtcaaatctttctaattttttgtatctttagagggcagcactagaagaaatcagcaggtctaatcccaccagtaagaaaactaccacttcttgatttttacagatttaaaaaaatcttttcagtgacctttctttttaatgtaaatacaaatttaaacctaggcttaatataggcgtttcccctttcacccaagtgatgtcacagttcgatgcaaaatcaatgatccagaatgatcgtgggtaaaaataactcaaagtgtttcttaagggtgagttggcatgcaaaaaattacattgattacagtgtgttttggagctggctctgtttgtgtgcatatgataatgcagagttgagccagagcctggaaatgtcattctagatctcactaactactggaatcagtgttttaatctcttggtggaaactttcagttgcttaactctctattggaagatttttttaatgttctacatcatttatgttgtattacaatgtatgtagaaatagtaacctgtgaactatgcttttccataactttttaaaaatatatatatctaaatgaatgcaatgtgcataaatattttttaaacataacagtgaactattgcaccttttgctaatgcctctatttacttgctttggcataaagaatgagccaatgaacctctgtgtcctgtggaaaaatgtataaatgttatctgatattgctcttagatgtaatgctaattaatgttaaatcacaaataaacagtattttaaatata

SEQ ID NO: 365337 - DNA, 4599 bp, Homo sapiens
agcgtagtcccgccagagcgcgagccgccagcccgtaacggtcgccagtgtgaggggcgggagggaaagaagaggggtttaaattagattttttaaaacacagagcaagcgccagaggcgtcggcatcccaggtgtcgccgcttcctgctgcacagggctcggcgtacaggtccctccctcctcaagccccctccccttctcccgccctaccctctggggctctgcggcgcttaagaggcggccgcagcggcggatccggcggctgctgcagcccgggcggctgccgagaaggagggaggggaaacacaaagccggctacgcgctgcgagataacaagagtaatccacagacttaaaacatgagctcagatgccagccaaggcgtgattaccactcctcctcctcccagcatgcctcacaaagagagatattttgaccgcatcaatgaaaatgacccagaatacattagggagaggaacatgtctcctgatctacgacaagacttcaacatgatggagcagaggaaacgagttactcagatcctgcaaagtcctggccagtggtattctatttccaaatgagtacatttcttaatggagaaattctaaatggagtttcgctcttgttgcccaggctggagtgcaatggcatgatctcggctcaccacatcctcctcctcccgagttcaagctattctcctgcctcagcctcctgagtagctgggattacaggcatgcaccaccacgctgggctaattttgtatttttagtaaagacgaggattctccatgttggtcaagctggtctccaactccccacctcaggcctttcgggaagacttggaatgccttattcaagaacagatgaagaaaggccacaacccaactggattactagcattacagcagattgcagattacatcatggccaattctttctcgggtttttcttcacctcctctcagtcttggcatggtcacacctatcaatgaccttcctggtgcagatacatcctcatatgtgaagggagaaaaacttactcgctgtaaacttgccagcctgtacagacttgtagacttgtttggatgggcacacctggcaaatacctatatctcagtaagaataagtaaggagcaagaccacattataataattcccagaggcctatctttttctgaagctacagcctccaatttggtgaaagtcaatataataggagaagtggttgaccagggaagtaccaatttgaaaattgaccatacaggattcagtccccatgctgcaatctattcaacacgtcctgatgttaagtgtgtgatacacatccatacccttgcaacagcagctgtatcctccatgaaatgtgggatccttccaatttctcaagagtctcttcttctgggagatgttgcctattatgactaccaagggtcacttgaagaacaggaggagagaattcaactgcagaaggttctgggaccaagttgtaaggtgctggtactcaggaatcatggtgtggttgcacttggagaaacattagaggaggcttttcattatatttttaatgtgcaactagcctgtgagattcaggtgcaggccctagcaggtgcaggtggagtagacaatctccatgtactggactttcagaagtataaagctttcacttacactgtagcagcgtctggtggaggaggtgtgaatatgggttcccatcaaaaatggaaggttggcgaaattgagtttgaagggcttatgaggactctggacaacttggggtatagaacaggctatgcttacaggcatcctctcattcgagagaagcctaggcacaagagtgatgtggaaatcccagcaactgtgactgctttttcctttgaagacgatacagtgccactctctcctctcaaatacatggcacagaggcaacagcgtgaaaaaacaagatggctgaactcaccaaatacttacatgaaagtgaatgtgcctgaggagtctcggaacggagaaaccagtccccgaaccaaaatcacgtggatgaaagcagaagactcatctaaagttagtggtggaacacctatcaaaattgaagatccaaatcagtttgttcctttaaacacaaacccgaatgaggtactagaaaagagaaataagattcgggaacaaaatcgatatgacttgaaaacagcaggaccacaatctcagttgcttgctggaattgttgtggataagccaccttctactatgcaatttgaagatgatgatcatggcccaccagctcctcctaacccatttagtcatctcacagaaggagaacttgaagagtataagaggacaatcgaacgtaaacaacaaggcctagaagaaaaccatgagctgttttccaagagcttcatctccatggaagtgcctgtcatggtagtaaatggcaaggatgatatgcatgatgttgaagatgagcttgctaagcgagtgagtaggttaagcacaagtacaaccatagaaaacatcgagattactattaagtctccagagaaaatcgaagaagtcctgtcacctgaaggctccccttcaaaatcgccatccaagaaaaagaagaaattccgcactccttcttttctgaaaaagaacaaaaaaaaggagaaagttgaggcctaaataaagtctttttataattattattataacaatgtgacattgcacatctaaataccacatttaagttgatcattaatatgcaatggtagatcagattgggggatgtagcaaactggactttaagaactggaaagaggttttacaaaagaaaaactttcagattcatctctcattttatatgtccagaaatggctttgaattttaagcaattactagttttaattagctctgccctcatgaagtattattataattcaccataaacagctatctgtctgaattacttcaggccttctccataatatctgttagaaagaaattgccagtgagcaagtgagaatttttatttctcaatacctgcttcacttgataatcatattataattttttatcatgattattgactatatttttggagtcccattgtttcagtgggcattaacagaatgctttaaaaacttctaagacaagaatctatagcattagtatacactggcacataattttttaaaaagttttaagaaaagattcatttggaattttattcacagtataaaatttcctcacctgaagtaactttgtttgccaaaaaagttgttttaataaactataatttttgaaaacttccttttttattagtttagaaagccccttatttttcaacaaaggggattttgtacacataacatgggttatttagtttaactctggcaaaaaaaaaaaaaaaattttgtatgttgatgtttgtataccgttcagtataaaagtgtcctaagcatattagccaatcttttcacagtagagcatacttaaggctgcttggtactgagtatacttaaatataactccagaatccagggacttggtgttaaaacaggattagagcatgtaaaggtacatctagattcatatttgaatcttaaactgtatttttctcttagtattgctaatgagtaaagaaaagtctcataaggtagccaaatgaaaaagaatgaaagggaaagtgaaaaattaaggggacaaaagatgggatgtgaaaagaagaattctagtttgatggtgactcatattcacgataggatacaaagtgtgatttgttggaaacatgtcccaaatttctaaaattctgcttctctgccaaaagcaatgtctttcttggttgatatttgagttttaaaagggtcaaatctttctaattttttgtatctttagagggcagcactagaagaaatcagcaggtctaatcccaccagtaagaaaactaccacttcttgatttttacagatttaaaaaaatcttttcagtgacctttctttttaatgtaaatacaaatttaaacctaggcttaatataggcgtttcccctttcacccaagtgatgtcacagttcgatgcaaaatcaatgatccagaatgatcgtgggtaaaaataactcaaagtgtttcttaagggtgagttggcatgcaaaaaattacattgattacagtgtgttttggagctggctctgtttgtgtgcatatgataatgcagagttgagccagagcctggaaatgtcattctagatctcactaactactggaatcagtgttttaatctcttggtggaaactttcagttgcttaactctctattggaagatttttttaatgttctacatcatttatgttgtattacaatgtatgtagaaatagtaacctgtgaactatgcttttccataactttttaaaaatatatatatctaaatgaatgcaatgtgcataaatattttttaaacataacagtgaactattgcaccttttgctaatgcctctatttacttgctttggcataaagaatgagccaatgaacctctgtgtcctgtggaaaaatgtataaatgttatctgatattgctcttagatgtaatgctaattaatgttaaatcacaaataaacagtattttaaatata

SEQ ID NO: 365338 - DNA, 4106 bp, Homo sapiens
agcgtagtcccgccagagcgcgagccgccagcccgtaacggtcgccagtgtgaggggcgggagggaaagaagaggggtttaaattagattttttaaaacacagagcaagcgccagaggcgtcggcatcccaggtgtcgccgcttcctgctgcacagggctcggcgtacaggtccctccctcctcaagccccctccccttctcccgccctaccctctggggctctgcggcgcttaagaggcggccgcagcggcggatccggcggctgctgcagcccgggcggctgccgagaaggagggaggggaaacacaaagccggctacgcgctgcgaggcctttcgggaagacttggaatgccttattcaagaacagatgaagaaaggccacaacccaactggattactagcattacagcagattgcagattacatcatggccaattctttctcgggtttttcttcacctcctctcagtcttggcatggtcacacctatcaatgaccttcctggtgcagatacatcctcatatgtgaagggagaaaaacttactcgctgtaaacttgccagcctgtacagacttgtagacttgtttggatgggcacacctggcaaatacctatatctcagtaagaataagtaaggagcaagaccacattataataattcccagaggcctatctttttctgaagctacagcctccaatttggtgaaagtcaatataataggagaagtggttgaccagggaagtaccaatttgaaaattgaccatacaggattcagtccccatgctgcaatctattcaacacgtcctgatgttaagtgtgtgatacacatccatacccttgcaacagcagctgtatcctccatgaaatgtgggatccttccaatttctcaagagtctcttcttctgggagatgttgcctattatgactaccaagggtcacttgaagaacaggaggagagaattcaactgcagaaggttctgggaccaagttgtaaggtgctggtactcaggaatcatggtgtggttgcacttggagaaacattagaggaggcttttcattatatttttaatgtgcaactagcctgtgagattcaggtgcaggccctagcaggtgcaggtggagtagacaatctccatgtactggactttcagaagtataaagctttcacttacactgtagcagcgtctggtggaggaggtgtgaatatgggttcccatcaaaaatggaaggttggcgaaattgagtttgaagggcttatgaggactctggacaacttggggtatagaacaggctatgcttacaggcatcctctcattcgagagaagcctaggcacaagagtgatgtggaaatcccagcaactgtgactgctttttcctttgaagacgatacagtgccactctctcctctcaaatacatggcacagaggcaacagcgtgaaaaaacaagatggctgaactcaccaaatacttacatgaaagtgaatgtgcctgaggagtctcggaacggagaaaccagtccccgaaccaaaatcacgtggatgaaagcagaagactcatctaaagttagtggtggaacacctatcaaaattgaagatccaaatcagtttgttcctttaaacacaaacccgaatgaggtactagaaaagagaaataagattcgggaacaaaatcgatatgacttgaaaacagcaggaccacaatctcagttgcttgctggaattgttgtggataagccaccttctactatgcaatttgaagatgatgatcatggcccaccagctcctcctaacccatttagtcatctcacagaaggagaacttgaagagtataagaggacaatcgaacgtaaacaacaaggcctagaagaaaaccatgagctgttttccaagagcttcatctccatggaagtgcctgtcatggtagtaaatggcaaggatgatatgcatgatgttgaagatgagcttgctaagcgagtgagtaggttaagcacaagtacaaccatagaaaacatcgagattactattaagtctccagagaaaatcgaagaagtcctgtcacctgaaggctccccttcaaaatcgccatccaagaaaaagaagaaattccgcactccttcttttctgaaaaagaacaaaaaaaaggagaaagttgaggcctaaataaagtctttttataattattattataacaatgtgacattgcacatctaaataccacatttaagttgatcattaatatgcaatggtagatcagattgggggatgtagcaaactggactttaagaactggaaagaggttttacaaaagaaaaactttcagattcatctctcattttatatgtccagaaatggctttgaattttaagcaattactagttttaattagctctgccctcatgaagtattattataattcaccataaacagctatctgtctgaattacttcaggccttctccataatatctgttagaaagaaattgccagtgagcaagtgagaatttttatttctcaatacctgcttcacttgataatcatattataattttttatcatgattattgactatatttttggagtcccattgtttcagtgggcattaacagaatgctttaaaaacttctaagacaagaatctatagcattagtatacactggcacataattttttaaaaagttttaagaaaagattcatttggaattttattcacagtataaaatttcctcacctgaagtaactttgtttgccaaaaaagttgttttaataaactataatttttgaaaacttccttttttattagtttagaaagccccttatttttcaacaaaggggattttgtacacataacatgggttatttagtttaactctggcaaaaaaaaaaaaaaaattttgtatgttgatgtttgtataccgttcagtataaaagtgtcctaagcatattagccaatcttttcacagtagagcatacttaaggctgcttggtactgagtatacttaaatataactccagaatccagggacttggtgttaaaacaggattagagcatgtaaaggtacatctagattcatatttgaatcttaaactgtatttttctcttagtattgctaatgagtaaagaaaagtctcataaggtagccaaatgaaaaagaatgaaagggaaagtgaaaaattaaggggacaaaagatgggatgtgaaaagaagaattctagtttgatggtgactcatattcacgataggatacaaagtgtgatttgttggaaacatgtcccaaatttctaaaattctgcttctctgccaaaagcaatgtctttcttggttgatatttgagttttaaaagggtcaaatctttctaattttttgtatctttagagggcagcactagaagaaatcagcaggtctaatcccaccagtaagaaaactaccacttcttgatttttacagatttaaaaaaatcttttcagtgacctttctttttaatgtaaatacaaatttaaacctaggcttaatataggcgtttcccctttcacccaagtgatgtcacagttcgatgcaaaatcaatgatccagaatgatcgtgggtaaaaataactcaaagtgtttcttaagggtgagttggcatgcaaaaaattacattgattacagtgtgttttggagctggctctgtttgtgtgcatatgataatgcagagttgagccagagcctggaaatgtcattctagatctcactaactactggaatcagtgttttaatctcttggtggaaactttcagttgcttaactctctattggaagatttttttaatgttctacatcatttatgttgtattacaatgtatgtagaaatagtaacctgtgaactatgcttttccataactttttaaaaatatatatatctaaatgaatgcaatgtgcataaatattttttaaacataacagtgaactattgcaccttttgctaatgcctctatttacttgctttggcataaagaatgagccaatgaacctctgtgtcctgtggaaaaatgtataaatgttatctgatattgctcttagatgtaatgctaattaatgttaaatcacaaataaacagtattttaaatata

SEQ ID NO: 365339 - DNA, 4178 bp, Homo sapiens
agcgtagtcccgccagagcgcgagccgccagcccgtaacggtcgccagtgtgaggggcgggagggaaagaagaggggtttaaattagattttttaaaacacagagcaagcgccagaggcgtcggcatcccaggtgtcgccgcttcctgctgcacagggctcggcgtacaggtccctccctcctcaagccccctccccttctcccgccctaccctctggggctctgcggcgcttaagaggcggccgcagcggcggatccggcggctgctgcagcccgggcggctgccgagaaggagggaggggaaacacaaagccggctacgcgctgcgagataacaagagtaatccacagacttaaaacatgagctcagatgccagccaaggcgtgattaccactcctcctcctcccagcatgcctcacaaagagagatattttgaccgcatcaatgaaaatgacccagaatacattagggagaggaacatgtctcctgatctacgacaagacttcaacatgatggagcagaggaaacgagttactcagatcctgcaaagtcctgcctttcgggaagacttggaatgccttattcaagaacagatgaagaaaggccacaacccaactggattactagcattacagcagattgcagattacatcatggccaattctttctcgggtttttcttcacctcctctcagtaagaataagtaaggagcaagaccacattataataattcccagaggcctatctttttctgaagctacagcctccaatttggtgaaagtcaatataataggagaagtggttgaccagggaagtaccaatttgaaaattgaccatacaggattcagtccccatgctgcaatctattcaacacgtcctgatgttaagtgtgtgatacacatccatacccttgcaacagcagctgtatcctccatgaaatgtgggatccttccaatttctcaagagtctcttcttctgggagatgttgcctattatgactaccaagggtcacttgaagaacaggaggagagaattcaactgcagaaggttctgggaccaagttgtaaggtgctggtactcaggaatcatggtgtggttgcacttggagaaacattagaggaggcttttcattatatttttaatgtgcaactagcctgtgagattcaggtgcaggccctagcaggtgcaggtggagtagacaatctccatgtactggactttcagaagtataaagctttcacttacactgtagcagcgtctggtggaggaggtgtgaatatgggttcccatcaaaaatggaaggttggcgaaattgagtttgaagggcttatgaggactctggacaacttggggtatagaacaggctatgcttacaggcatcctctcattcgagagaagcctaggcacaagagtgatgtggaaatcccagcaactgtgactgctttttcctttgaagacgatacagtgccactctctcctctcaaatacatggcacagaggcaacagcgtgaaaaaacaagatggctgaactcaccaaatacttacatgaaagtgaatgtgcctgaggagtctcggaacggagaaaccagtccccgaaccaaaatcacgtggatgaaagcagaagactcatctaaagttagtggtggaacacctatcaaaattgaagatccaaatcagtttgttcctttaaacacaaacccgaatgaggtactagaaaagagaaataagattcgggaacaaaatcgatatgacttgaaaacagcaggaccacaatctcagttgcttgctggaattgttgtggataagccaccttctactatgcaatttgaagatgatgatcatggcccaccagctcctcctaacccatttagtcatctcacagaaggagaacttgaagagtataagaggacaatcgaacgtaaacaacaaggcctagaagaaaaccatgagctgttttccaagagcttcatctccatggaagtgcctgtcatggtagtaaatggcaaggatgatatgcatgatgttgaagatgagcttgctaagcgagtgagtaggttaagcacaagtacaaccatagaaaacatcgagattactattaagtctccagagaaaatcgaagaagtcctgtcacctgaaggctccccttcaaaatcgccatccaagaaaaagaagaaattccgcactccttcttttctgaaaaagaacaaaaaaaaggagaaagttgaggcctaaataaagtctttttataattattattataacaatgtgacattgcacatctaaataccacatttaagttgatcattaatatgcaatggtagatcagattgggggatgtagcaaactggactttaagaactggaaagaggttttacaaaagaaaaactttcagattcatctctcattttatatgtccagaaatggctttgaattttaagcaattactagttttaattagctctgccctcatgaagtattattataattcaccataaacagctatctgtctgaattacttcaggccttctccataatatctgttagaaagaaattgccagtgagcaagtgagaatttttatttctcaatacctgcttcacttgataatcatattataattttttatcatgattattgactatatttttggagtcccattgtttcagtgggcattaacagaatgctttaaaaacttctaagacaagaatctatagcattagtatacactggcacataattttttaaaaagttttaagaaaagattcatttggaattttattcacagtataaaatttcctcacctgaagtaactttgtttgccaaaaaagttgttttaataaactataatttttgaaaacttccttttttattagtttagaaagccccttatttttcaacaaaggggattttgtacacataacatgggttatttagtttaactctggcaaaaaaaaaaaaaaaattttgtatgttgatgtttgtataccgttcagtataaaagtgtcctaagcatattagccaatcttttcacagtagagcatacttaaggctgcttggtactgagtatacttaaatataactccagaatccagggacttggtgttaaaacaggattagagcatgtaaaggtacatctagattcatatttgaatcttaaactgtatttttctcttagtattgctaatgagtaaagaaaagtctcataaggtagccaaatgaaaaagaatgaaagggaaagtgaaaaattaaggggacaaaagatgggatgtgaaaagaagaattctagtttgatggtgactcatattcacgataggatacaaagtgtgatttgttggaaacatgtcccaaatttctaaaattctgcttctctgccaaaagcaatgtctttcttggttgatatttgagttttaaaagggtcaaatctttctaattttttgtatctttagagggcagcactagaagaaatcagcaggtctaatcccaccagtaagaaaactaccacttcttgatttttacagatttaaaaaaatcttttcagtgacctttctttttaatgtaaatacaaatttaaacctaggcttaatataggcgtttcccctttcacccaagtgatgtcacagttcgatgcaaaatcaatgatccagaatgatcgtgggtaaaaataactcaaagtgtttcttaagggtgagttggcatgcaaaaaattacattgattacagtgtgttttggagctggctctgtttgtgtgcatatgataatgcagagttgagccagagcctggaaatgtcattctagatctcactaactactggaatcagtgttttaatctcttggtggaaactttcagttgcttaactctctattggaagatttttttaatgttctacatcatttatgttgtattacaatgtatgtagaaatagtaacctgtgaactatgcttttccataactttttaaaaatatatatatctaaatgaatgcaatgtgcataaatattttttaaacataacagtgaactattgcaccttttgctaatgcctctatttacttgctttggcataaagaatgagccaatgaacctctgtgtcctgtggaaaaatgtataaatgttatctgatattgctcttagatgtaatgctaattaatgttaaatcacaaataaacagtattttaaatata

SEQ ID NO: 365340 - DNA, 3976 bp, Homo sapiens
agcggaatcccagcacttcggaaggcagaggtgggcggatcacctgaggtcggcagttcaagaccagcctgaccaacatagagaaaccctgtctctactaaaaatacaaaattagccgggtggtggcgcatgcctgtaatcccagctactcaggaggctgaggcaggagaatcgcttcaacccgggaggcggaggttgcggcctttcgggaagacttggaatgccttattcaagaacagatgaagaaaggccacaacccaactggattactagcattacagcagattgcagattacatcatggccaattctttctcgggtttttcttcacctcctctcagtcttggcatggtcacacctatcaatgaccttcctggtgcagatacatcctcatatgtgaagggagaaaaacttactcgctgtaaacttgccagcctgtacagacttgtagacttgtttggatgggcacacctggcaaatacctatatctcagtaagaataagtaaggagcaagaccacattataataattcccagaggcctatctttttctgaagctacagcctccaatttggtgaaagtcaatataataggagaagtggttgaccagggaagtaccaatttgaaaattgaccatacaggattcagtccccatgctgcaatctattcaacacgtcctgatgttaagtgtgtgatacacatccatacccttgcaacagcagctgtatcctccatgaaatgtgggatccttccaatttctcaagagtctcttcttctgggagatgttgcctattatgactaccaagggtcacttgaagaacaggaggagagaattcaactgcagaaggttctgggaccaagttgtaaggtgctggtactcaggaatcatggtgtggttgcacttggagaaacattagaggaggcttttcattatatttttaatgtgcaactagcctgtgagattcaggtgcaggccctagcaggtgcaggtggagtagacaatctccatgtactggactttcagaagtataaagctttcacttacactgtagcagcgtctggtggaggaggtgtgaatatgggttcccatcaaaaatggaaggttggcgaaattgagtttgaagggcttatgaggactctggacaacttggggtatagaacaggctatgcttacaggcatcctctcattcgagagaagcctaggcacaagagtgatgtggaaatcccagcaactgtgactgctttttcctttgaagacgatacagtgccactctctcctctcaaatacatggcacagaggcaacagcgtgaaaaaacaagatggctgaactcaccaaatacttacatgaaagtgaatgtgcctgaggagtctcggaacggagaaaccagtccccgaaccaaaatcacgtggatgaaagcagaagactcatctaaagttagtggtggaacacctatcaaaattgaagatccaaatcagtttgttcctttaaacacaaacccgaatgaggtactagaaaagagaaataagattcgggaacaaaatcgatatgacttgaaaacagcaggaccacaatctcagttgcttgctggaattgttgtggataagccaccttctactatgcaatttgaagatgatgatcatggcccaccagctcctcctaacccatttagtcatctcacagaaggagaacttgaagagtataagaggacaatcgaacgtaaacaacaaggcctagaagaaaaccatgagctgttttccaagagcttcatctccatggaagtgcctgtcatggtagtaaatggcaaggatgatatgcatgatgttgaagatgagcttgctaagcgagtgagtaggttaagcacaagtacaaccatagaaaacatcgagattactattaagtctccagagaaaatcgaagaagtcctgtcacctgaaggctccccttcaaaatcgccatccaagaaaaagaagaaattccgcactccttcttttctgaaaaagaacaaaaaaaaggagaaagttgaggcctaaataaagtctttttataattattattataacaatgtgacattgcacatctaaataccacatttaagttgatcattaatatgcaatggtagatcagattgggggatgtagcaaactggactttaagaactggaaagaggttttacaaaagaaaaactttcagattcatctctcattttatatgtccagaaatggctttgaattttaagcaattactagttttaattagctctgccctcatgaagtattattataattcaccataaacagctatctgtctgaattacttcaggccttctccataatatctgttagaaagaaattgccagtgagcaagtgagaatttttatttctcaatacctgcttcacttgataatcatattataattttttatcatgattattgactatatttttggagtcccattgtttcagtgggcattaacagaatgctttaaaaacttctaagacaagaatctatagcattagtatacactggcacataattttttaaaaagttttaagaaaagattcatttggaattttattcacagtataaaatttcctcacctgaagtaactttgtttgccaaaaaagttgttttaataaactataatttttgaaaacttccttttttattagtttagaaagccccttatttttcaacaaaggggattttgtacacataacatgggttatttagtttaactctggcaaaaaaaaaaaaaaaattttgtatgttgatgtttgtataccgttcagtataaaagtgtcctaagcatattagccaatcttttcacagtagagcatacttaaggctgcttggtactgagtatacttaaatataactccagaatccagggacttggtgttaaaacaggattagagcatgtaaaggtacatctagattcatatttgaatcttaaactgtatttttctcttagtattgctaatgagtaaagaaaagtctcataaggtagccaaatgaaaaagaatgaaagggaaagtgaaaaattaaggggacaaaagatgggatgtgaaaagaagaattctagtttgatggtgactcatattcacgataggatacaaagtgtgatttgttggaaacatgtcccaaatttctaaaattctgcttctctgccaaaagcaatgtctttcttggttgatatttgagttttaaaagggtcaaatctttctaattttttgtatctttagagggcagcactagaagaaatcagcaggtctaatcccaccagtaagaaaactaccacttcttgatttttacagatttaaaaaaatcttttcagtgacctttctttttaatgtaaatacaaatttaaacctaggcttaatataggcgtttcccctttcacccaagtgatgtcacagttcgatgcaaaatcaatgatccagaatgatcgtgggtaaaaataactcaaagtgtttcttaagggtgagttggcatgcaaaaaattacattgattacagtgtgttttggagctggctctgtttgtgtgcatatgataatgcagagttgagccagagcctggaaatgtcattctagatctcactaactactggaatcagtgttttaatctcttggtggaaactttcagttgcttaactctctattggaagatttttttaatgttctacatcatttatgttgtattacaatgtatgtagaaatagtaacctgtgaactatgcttttccataactttttaaaaatatatatatctaaatgaatgcaatgtgcataaatattttttaaacataacagtgaactattgcaccttttgctaatgcctctatttacttgctttggcataaagaatgagccaatgaacctctgtgtcctgtggaaaaatgtataaatgttatctgatattgctcttagatgtaatgctaattaatgttaaatcacaaataaacagtattttaaatata

SEQ ID NO: 365341 - DNA, 3266 bp, Homo sapiens
aatatgttaagaggtatggctctaatgtgttttccatcagggaggatcagagtcttggaaggtttctttttcagataggtggaaaagatacttcagctgtctgctggcacaagagtgtcatcttgtctttgttgttagtagcctgagcaagtattatagatatttgccaaattgaaattgtgcctttttgaaagtaaaatactcattacagtctttatagttttgtgtctctgtatattttaccattgattacaggtgcaggccctagcaggtgcaggtggagtagacaatctccatgtactggactttcagaagtataaagctttcacttacactgtagcagcgtctggtggaggaggtgtgaatatgggttcccatcaaaaatggaaggttggcgaaattgagtttgaagggcttatgaggactctggacaacttggggtatagaacaggctatgcttacaggcatcctctcattcgagagaagcctaggcacaagagtgatgtggaaatcccagcaactgtgactgctttttcctttgaagacgatacagtgccactctctcctctcaaatacatggcacagaggcaacagcgtgaaaaaacaagatggctgaactcaccaaatacttacatgaaagtgaatgtgcctgaggagtctcggaacggagaaaccagtccccgaaccaaaatcacgtggatgaaagcagaagactcatctaaagttagtggtggaacacctatcaaaattgaagatccaaatcagtttgttcctttaaacacaaacccgaatgaggtactagaaaagagaaataagattcgggaacaaaatcgatatgacttgaaaacagcaggaccacaatctcagttgcttgctggaattgttgtggataagccaccttctactatgcaatttgaagatgatgatcatggcccaccagctcctcctaacccatttagtcatctcacagaaggagaacttgaagagtataagaggacaatcgaacgtaaacaacaaggcctagaagaaaaccatgagctgttttccaagagcttcatctccatggaagtgcctgtcatggtagtaaatggcaaggatgatatgcatgatgttgaagatgagcttgctaagcgagtgagtaggttaagcacaagtacaaccatagaaaacatcgagattactattaagtctccagagaaaatcgaagaagtcctgtcacctgaaggctccccttcaaaatcgccatccaagaaaaagaagaaattccgcactccttcttttctgaaaaagaacaaaaaaaaggagaaagttgaggcctaaataaagtctttttataattattattataacaatgtgacattgcacatctaaataccacatttaagttgatcattaatatgcaatggtagatcagattgggggatgtagcaaactggactttaagaactggaaagaggttttacaaaagaaaaactttcagattcatctctcattttatatgtccagaaatggctttgaattttaagcaattactagttttaattagctctgccctcatgaagtattattataattcaccataaacagctatctgtctgaattacttcaggccttctccataatatctgttagaaagaaattgccagtgagcaagtgagaatttttatttctcaatacctgcttcacttgataatcatattataattttttatcatgattattgactatatttttggagtcccattgtttcagtgggcattaacagaatgctttaaaaacttctaagacaagaatctatagcattagtatacactggcacataattttttaaaaagttttaagaaaagattcatttggaattttattcacagtataaaatttcctcacctgaagtaactttgtttgccaaaaaagttgttttaataaactataatttttgaaaacttccttttttattagtttagaaagccccttatttttcaacaaaggggattttgtacacataacatgggttatttagtttaactctggcaaaaaaaaaaaaaaaattttgtatgttgatgtttgtataccgttcagtataaaagtgtcctaagcatattagccaatcttttcacagtagagcatacttaaggctgcttggtactgagtatacttaaatataactccagaatccagggacttggtgttaaaacaggattagagcatgtaaaggtacatctagattcatatttgaatcttaaactgtatttttctcttagtattgctaatgagtaaagaaaagtctcataaggtagccaaatgaaaaagaatgaaagggaaagtgaaaaattaaggggacaaaagatgggatgtgaaaagaagaattctagtttgatggtgactcatattcacgataggatacaaagtgtgatttgttggaaacatgtcccaaatttctaaaattctgcttctctgccaaaagcaatgtctttcttggttgatatttgagttttaaaagggtcaaatctttctaattttttgtatctttagagggcagcactagaagaaatcagcaggtctaatcccaccagtaagaaaactaccacttcttgatttttacagatttaaaaaaatcttttcagtgacctttctttttaatgtaaatacaaatttaaacctaggcttaatataggcgtttcccctttcacccaagtgatgtcacagttcgatgcaaaatcaatgatccagaatgatcgtgggtaaaaataactcaaagtgtttcttaagggtgagttggcatgcaaaaaattacattgattacagtgtgttttggagctggctctgtttgtgtgcatatgataatgcagagttgagccagagcctggaaatgtcattctagatctcactaactactggaatcagtgttttaatctcttggtggaaactttcagttgcttaactctctattggaagatttttttaatgttctacatcatttatgttgtattacaatgtatgtagaaatagtaacctgtgaactatgcttttccataactttttaaaaatatatatatctaaatgaatgcaatgtgcataaatattttttaaacataacagtgaactattgcaccttttgctaatgcctctatttacttgctttggcataaagaatgagccaatgaacctctgtgtcctgtggaaaaatgtataaatgttatctgatattgctcttagatgtaatgctaattaatgttaaatcacaaataaacagtattttaaatata

SEQ ID NO: 365342 - DNA, 2641 bp, Homo sapiens
gcagttatctaacaatctactaatattttcttaacacaaagcttcattttagaaaatttttgattctttagtggatgaaagcagaagactcatctaaagttagtggtggaacacctatcaaaattgaagatccaaatcagtttgttcctttaaacacaaacccgaatgaggtactagaaaagagaaataagattcgggaacaaaatcgatatgacttgaaaacagcaggaccacaatctcagttgcttgctggaattgttgtggataagccaccttctactatgcaatttgaagatgatgatcatggcccaccagctcctcctaacccatttagtcatctcacagaaggagaacttgaagagtataagaggacaatcgaacgtaaacaacaaggcctagaagaaaaccatgagctgttttccaagagcttcatctccatggaagtgcctgtcatggtagtaaatggcaaggatgatatgcatgatgttgaagatgagcttgctaagcgagtgagtaggttaagcacaagtacaaccatagaaaacatcgagattactattaagtctccagagaaaatcgaagaagtcctgtcacctgaaggctccccttcaaaatcgccatccaagaaaaagaagaaattccgcactccttcttttctgaaaaagaacaaaaaaaaggagaaagttgaggcctaaataaagtctttttataattattattataacaatgtgacattgcacatctaaataccacatttaagttgatcattaatatgcaatggtagatcagattgggggatgtagcaaactggactttaagaactggaaagaggttttacaaaagaaaaactttcagattcatctctcattttatatgtccagaaatggctttgaattttaagcaattactagttttaattagctctgccctcatgaagtattattataattcaccataaacagctatctgtctgaattacttcaggccttctccataatatctgttagaaagaaattgccagtgagcaagtgagaatttttatttctcaatacctgcttcacttgataatcatattataattttttatcatgattattgactatatttttggagtcccattgtttcagtgggcattaacagaatgctttaaaaacttctaagacaagaatctatagcattagtatacactggcacataattttttaaaaagttttaagaaaagattcatttggaattttattcacagtataaaatttcctcacctgaagtaactttgtttgccaaaaaagttgttttaataaactataatttttgaaaacttccttttttattagtttagaaagccccttatttttcaacaaaggggattttgtacacataacatgggttatttagtttaactctggcaaaaaaaaaaaaaaaattttgtatgttgatgtttgtataccgttcagtataaaagtgtcctaagcatattagccaatcttttcacagtagagcatacttaaggctgcttggtactgagtatacttaaatataactccagaatccagggacttggtgttaaaacaggattagagcatgtaaaggtacatctagattcatatttgaatcttaaactgtatttttctcttagtattgctaatgagtaaagaaaagtctcataaggtagccaaatgaaaaagaatgaaagggaaagtgaaaaattaaggggacaaaagatgggatgtgaaaagaagaattctagtttgatggtgactcatattcacgataggatacaaagtgtgatttgttggaaacatgtcccaaatttctaaaattctgcttctctgccaaaagcaatgtctttcttggttgatatttgagttttaaaagggtcaaatctttctaattttttgtatctttagagggcagcactagaagaaatcagcaggtctaatcccaccagtaagaaaactaccacttcttgatttttacagatttaaaaaaatcttttcagtgacctttctttttaatgtaaatacaaatttaaacctaggcttaatataggcgtttcccctttcacccaagtgatgtcacagttcgatgcaaaatcaatgatccagaatgatcgtgggtaaaaataactcaaagtgtttcttaagggtgagttggcatgcaaaaaattacattgattacagtgtgttttggagctggctctgtttgtgtgcatatgataatgcagagttgagccagagcctggaaatgtcattctagatctcactaactactggaatcagtgttttaatctcttggtggaaactttcagttgcttaactctctattggaagatttttttaatgttctacatcatttatgttgtattacaatgtatgtagaaatagtaacctgtgaactatgcttttccataactttttaaaaatatatatatctaaatgaatgcaatgtgcataaatattttttaaacataacagtgaactattgcaccttttgctaatgcctctatttacttgctttggcataaagaatgagccaatgaacctctgtgtcctgtggaaaaatgtataaatgttatctgatattgctcttagatgtaatgctaattaatgttaaatcacaaataaacagtattttaaatata

SEQ ID NO: 365343 - DNA, 2366 bp, Homo sapiens
catggcttttaactaaactcttatccaacagatgctgagcaggaattactctcagatgacgcttcatctgtttcacaaattcagtctcaaactcagtcaccgcaaaatgtccctgaaaaattagaagaaaaccatgagctgttttccaagagcttcatctccatggaagtgcctgtcatggtagtaaatggcaaggatgatatgcatgatgttgaagatgagcttgctaagcgagtgagtaggttaagcacaagtacaaccatagaaaacatcgagattactattaagtctccagagaaaatcgaagaagtcctgtcacctgaaggctccccttcaaaatcgccatccaagaaaaagaagaaattccgcactccttcttttctgaaaaagaacaaaaaaaaggagaaagttgaggcctaaataaagtctttttataattattattataacaatgtgacattgcacatctaaataccacatttaagttgatcattaatatgcaatggtagatcagattgggggatgtagcaaactggactttaagaactggaaagaggttttacaaaagaaaaactttcagattcatctctcattttatatgtccagaaatggctttgaattttaagcaattactagttttaattagctctgccctcatgaagtattattataattcaccataaacagctatctgtctgaattacttcaggccttctccataatatctgttagaaagaaattgccagtgagcaagtgagaatttttatttctcaatacctgcttcacttgataatcatattataattttttatcatgattattgactatatttttggagtcccattgtttcagtgggcattaacagaatgctttaaaaacttctaagacaagaatctatagcattagtatacactggcacataattttttaaaaagttttaagaaaagattcatttggaattttattcacagtataaaatttcctcacctgaagtaactttgtttgccaaaaaagttgttttaataaactataatttttgaaaacttccttttttattagtttagaaagccccttatttttcaacaaaggggattttgtacacataacatgggttatttagtttaactctggcaaaaaaaaaaaaaaaattttgtatgttgatgtttgtataccgttcagtataaaagtgtcctaagcatattagccaatcttttcacagtagagcatacttaaggctgcttggtactgagtatacttaaatataactccagaatccagggacttggtgttaaaacaggattagagcatgtaaaggtacatctagattcatatttgaatcttaaactgtatttttctcttagtattgctaatgagtaaagaaaagtctcataaggtagccaaatgaaaaagaatgaaagggaaagtgaaaaattaaggggacaaaagatgggatgtgaaaagaagaattctagtttgatggtgactcatattcacgataggatacaaagtgtgatttgttggaaacatgtcccaaatttctaaaattctgcttctctgccaaaagcaatgtctttcttggttgatatttgagttttaaaagggtcaaatctttctaattttttgtatctttagagggcagcactagaagaaatcagcaggtctaatcccaccagtaagaaaactaccacttcttgatttttacagatttaaaaaaatcttttcagtgacctttctttttaatgtaaatacaaatttaaacctaggcttaatataggcgtttcccctttcacccaagtgatgtcacagttcgatgcaaaatcaatgatccagaatgatcgtgggtaaaaataactcaaagtgtttcttaagggtgagttggcatgcaaaaaattacattgattacagtgtgttttggagctggctctgtttgtgtgcatatgataatgcagagttgagccagagcctggaaatgtcattctagatctcactaactactggaatcagtgttttaatctcttggtggaaactttcagttgcttaactctctattggaagatttttttaatgttctacatcatttatgttgtattacaatgtatgtagaaatagtaacctgtgaactatgcttttccataactttttaaaaatatatatatctaaatgaatgcaatgtgcataaatattttttaaacataacagtgaactattgcaccttttgctaatgcctctatttacttgctttggcataaagaatgagccaatgaacctctgtgtcctgtggaaaaatgtataaatgttatctgatattgctcttagatgtaatgctaattaatgttaaatcacaaataaacagtattttaaatata

SEQ ID NO: 365344 - DNA, 2884 bp, Homo sapiens
tttcaccgtgttagccaggatggtctcgatctcctgacctcgtgataccatcctggctaacacggtgaaaccctgtctctactaaaaatacaaaaaattagctgggtgtggtggcgggcgcctgtagtcccagctactcgggaggctgaggcaggagaatggcatgaacacgggaggtggagctggcagtgagccaagactgccactgcactccggcctgggcgacagagtgagactccgcctcaaaaaaaaaaaaaaaaaaaaaagaatttgtggaattaaacatctcccaatcagcagcatgaaatctttttcagtattgattgccaaatgatcccaaaactagagaaaaatatgttgtcttcctcatttatacttaattgatttacaatgaaactgttatttcatcaaactgggattatctagcttttgctctttggtttaacaactttgttcctttcccctttatatcattaaagaaaattagcttcttgctaatagatcacagtttattaaaataatgatctgtcttcattggaatcaaagtaatgccttattacattgctaaaacatttcagttttgtaaagtagagcaaaaatgttaagtatgtaaaataacccccaaaaaaccctcccctttcgtagaaaaccatgagctgttttccaagagcttcatctccatggaagtgcctgtcatggtagtaaatggcaaggatgatatgcatgatgttgaagatgagcttgctaagcgagtgagtaggttaagcacaagtacaaccatagaaaacatcgagattactattaagtctccagagaaaatcgaagaagtcctgtcacctgaaggctccccttcaaaatcgccatccaagaaaaagaagaaattccgcactccttcttttctgaaaaagaacaaaaaaaaggagaaagttgaggcctaaataaagtctttttataattattattataacaatgtgacattgcacatctaaataccacatttaagttgatcattaatatgcaatggtagatcagattgggggatgtagcaaactggactttaagaactggaaagaggttttacaaaagaaaaactttcagattcatctctcattttatatgtccagaaatggctttgaattttaagcaattactagttttaattagctctgccctcatgaagtattattataattcaccataaacagctatctgtctgaattacttcaggccttctccataatatctgttagaaagaaattgccagtgagcaagtgagaatttttatttctcaatacctgcttcacttgataatcatattataattttttatcatgattattgactatatttttggagtcccattgtttcagtgggcattaacagaatgctttaaaaacttctaagacaagaatctatagcattagtatacactggcacataattttttaaaaagttttaagaaaagattcatttggaattttattcacagtataaaatttcctcacctgaagtaactttgtttgccaaaaaagttgttttaataaactataatttttgaaaacttccttttttattagtttagaaagccccttatttttcaacaaaggggattttgtacacataacatgggttatttagtttaactctggcaaaaaaaaaaaaaaaattttgtatgttgatgtttgtataccgttcagtataaaagtgtcctaagcatattagccaatcttttcacagtagagcatacttaaggctgcttggtactgagtatacttaaatataactccagaatccagggacttggtgttaaaacaggattagagcatgtaaaggtacatctagattcatatttgaatcttaaactgtatttttctcttagtattgctaatgagtaaagaaaagtctcataaggtagccaaatgaaaaagaatgaaagggaaagtgaaaaattaaggggacaaaagatgggatgtgaaaagaagaattctagtttgatggtgactcatattcacgataggatacaaagtgtgatttgttggaaacatgtcccaaatttctaaaattctgcttctctgccaaaagcaatgtctttcttggttgatatttgagttttaaaagggtcaaatctttctaattttttgtatctttagagggcagcactagaagaaatcagcaggtctaatcccaccagtaagaaaactaccacttcttgatttttacagatttaaaaaaatcttttcagtgacctttctttttaatgtaaatacaaatttaaacctaggcttaatataggcgtttcccctttcacccaagtgatgtcacagttcgatgcaaaatcaatgatccagaatgatcgtgggtaaaaataactcaaagtgtttcttaagggtgagttggcatgcaaaaaattacattgattacagtgtgttttggagctggctctgtttgtgtgcatatgataatgcagagttgagccagagcctggaaatgtcattctagatctcactaactactggaatcagtgttttaatctcttggtggaaactttcagttgcttaactctctattggaagatttttttaatgttctacatcatttatgttgtattacaatgtatgtagaaatagtaacctgtgaactatgcttttccataactttttaaaaatatatatatctaaatgaatgcaatgtgcataaatattttttaaacataacagtgaactattgcaccttttgctaatgcctctatttacttgctttggcataaagaatgagccaatgaacctctgtgtcctgtggaaaaatgtataaatgttatctgatattgctcttagatgtaatgctaattaatgttaaatcacaaataaacagtattttaaatata

SEQ ID NO: 365345 - DNA, 1717 bp, Homo sapiens
agcgtagtcccgccagagcgcgagccgccagcccgtaacggtcgccagtgtgaggggcgggagggaaagaagaggggtttaaattagattttttaaaacacagagcaagcgccagaggcgtcggcatcccaggtgtcgccgcttcctgctgcacagggctcggcgtacaggtccctccctcctcaagccccctccccttctcccgccctaccctctggggctctgcggcgcttaagaggcggccgcagcggcggatccggcggctgctgcagcccgggcggctgccgagaaggagggaggggaaacacaaagccggctacgcgctgcgagataacaagagtaatccacagacttaaaacatgagctcagatgccagccaaggcgtgattaccactcctcctcctcccagcatgcctcacaaagagagatattttgaccgcatcaatgaaaatgacccagaatacattagggagaggaacatgtctcctgatctacgacaagacttcaacatgatggagcagaggaaacgagttactcagatcctgcaaagtcctgcctttcgggaagacttggaatgccttattcaagaacagatgaagaaaggccacaacccaactggattactagcattacagcagattgcagattacatcatggccaattctttctcgggtttttcttcacctcctctcagtcttggcatggtcacacctatcaatgaccttcctggtgcagatacatcctcatatgtgaagggagaaaaacttactcgctgtaaacttgccagcctgtacagacttgtagacttgtttggatgggcacacctggcaaatacctatatctcagtaagaataagtaaggagcaagaccacattataataattcccagaggcctatctttttctgaagctacagcctccaatttggtgaaagtcaatataataggagaagtggttgaccagggaagtaccaatttgaaaattgaccatacaggattcagtccccatgctgcaatctattcaacacgtcctgatgttaagtgtgtgatacacatccatacccttgcaacagcagctgtatcctccatgaaatgtgggatccttccaatttctcaagagtctcttcttctgggagatgttgcctattatgactaccaagggtcacttgaagaacaggaggagagaattcaactgcagaaggttctgggaccaagttgtaaggtgctggtactcaggaatcatggtgtggttgcacttggagaaacattagaggaggcttttcattatatttttaatgtgcaactagcctgtgagattcaggtgcaggccctagcaggtgcaggtggagtagacaatctccatgtactggactttcagaagtataaagctttcacttacactgtagcagcgtctggtggaggaggtgtgaatatgggttcccatcaaaaatggaaggttggcgaaattgagtttgaagggcttatgaggactctggacaacttggggtatagaacaggctatgcttacaggcatcctctcattcgagagaagcctaggcacaagagtgatgtggaaatcccagcaactgtgactgcttttcttgaggcgtcagtccactcttctctaatcatgccagggcacacgtgaaaacagtgctactccaatcttcatgagtattgcctggggctggcggaaccgccccccaatttgttttccaa

SEQ ID NO: 365346 - DNA, 1418 bp, Homo sapiens
agcgtagtcccgccagagcgcgagccgccagcccgtaacggtcgccagtgtgaggggcgggagggaaagaagaggggtttaaattagattttttaaaacacagagcaagcgccagaggcgtcggcatcccaggtgtcgccgcttcctgctgcacagggctcggcgtacaggtccctccctcctcaagccccctccccttctcccgccctaccctctggggctctgcggcgcttaagaggcggccgcagcggcggatccggcggctgctgcagcccgggcggctgccgagaaggagggaggggaaacacaaagccggctacgcgctgcgagataacaagagtaatccacagacttaaaacatgagctcagatgccagccaaggcgtgattaccactcctcctcctcccagcatgcctcacaaagagagatattttgaccgcatcaatgaaaatgacccagaatacattagggagaggaacatgtctcctgatctacgacaagacttcaacatgatggagcagaggaaacgagttactcagatcctgcaaagtcctgcctttcgggaagacttggaatgccttattcaagaacagatgaagaaaggccacaacccaactggattactagcattacagcagattgcagattacatcatggccaattctttctcgggtttttcttcacctcctctcagtcttggcatggtcacacctatcaatgaccttcctggtgcagatacatcctcatatgtgaagggagaaaaacttactcgctgtaaacttgccagcctgtacagacttgtagacttgtttggatgggcacacctggcaaatacctatatctcagtaagaataagtaaggagcaagaccacattataataattcccagaggcctatctttttctgaagctacagcctccaatttggtgaaagtcaatataataggagaagtggttgaccagggaagtaccaatttgaaaattgaccatacaggattcagtccccatgctgcaatctattcaacacgtcctgatgttaagtgtgtgatacacatccatacccttgcaacagcagctgtatcctccatgaaatgtgggatccttccaatttctcaagagtctcttcttctgggagatgttgcctattatgactaccaagggtcacttgaagaacaggaggagagaattcaactgcagaaggttctgggaccaagttgtaaggtgctggtactcaggaatcatggtgtggttgcacttggagaaacattagaggaggcttttcattatatttttaatgtgcaactagcctgtgagattcaggtgcaggccctagcaggtgcaggtggagtcctgtatcagccctttatcctcacacgcttttctacaatggcattcaataaagtgcacgtgtttctggta

SEQ ID NO: 365347 - DNA, 878 bp, Homo sapiens
agcgtagtcccgccagagcgcgagccgccagcccgtaacggtcgccagtgtgaggggcgggagggaaagaagaggggtttaaattagattttttaaaacacagagcaagcgccagaggcgtcggcatcccaggtgtcgccgcttcctgctgcacagggctcggcgtacaggtccctccctcctcaagccccctccccttctcccgccctaccctctggggctctgcggcgcttaagaggcggccgcagcggcggatccggcggctgctgcagcccgggcggctgccgagaaggagggaggggaaacacaaagccggctacgcgctgcgagataacaagagtaatccacagacttaaaacatgagctcagatgccagccaaggcgtgattaccactcctcctcctcccagcatgcctcacaaagagagatattttgaccgcatcaatgaaaatgacccagaatacattagggagaggaacatgtctcctgatctacgacaagacttcaacatgatggagcagaggaaacgagttactcagatcctgcaaagtcctgcctttcgggaagacttggaatgccttattcaagaacagatgaagaaaggccacaacccaactgtaatcctagcactttgggaggccaaggcaggaggatcactggaggccaggagttcaagaccagcctgggcaacatagtaagaccccatctccactaaacaaattaaaaaattagccaggtgtggcagcatgccctgtagtcctagctactcaggaggctgaggtggaaggattgcctgagcctaggagttcgaggctgcagtgagccatgatcacaccactgcattgcagcctgggtgacagagtgatacccctgcctct

SEQ ID NO: 365348 - DNA, 556 bp, Homo sapiens
gaacaaaatcgatatgacttgaaaacagcaggaccacaatctcagttgcttgctggaattgttgtggataagccaccttctgtaagtttatgaagtagtatgatctttgttttttatttaccacattaatttcattgatttttaaatatgaatatttatttttactaaggttaatataagcacaagttaaaaagtcaactcacaagatttaaaatgtcacccacaattcccagtttccaggtgcagcaactttctgttcttttcattgcttctaatgtttactttggtgtttctggttagttagttgagatgaggtctcactctgttgcccaggatagtcgtgaacacctgatctcaggtgatcctccagccttgacctcctgaagtattgggattacaggtataaaccactgctcctcgtcctcctttgatgtttctaaagagcatcttctgctttttcttggtctatcagttttagaccttgactatttttcatcaaatctgtgttatccgttataagaagtaccattgttttatatgtcactaaaagagaaaa

SEQ ID NO: 365349 - DNA, 497 bp, Homo sapiens
aatcagtgttttaatctcttggtggaaactttcagttgcttaactctctattggaagatttttttaatgttctacatcatttatgttgtattacaatgtatgtagaaatagtaacctgtgaactatgcttttccataactttttaaaaatatatatatctaaatgaatgcaatgtgcataaatattttttaaacataacagtgaactattgcaccttttgctaatgcctctatttacttgctttggcataaagaatgagccaatgaacctctgtgtcctgtggaaaaatgtataaatgttatctgatattgctcttagatgtaatgctaattaatgttaaatcacaaataaacagtattttaaatatacggacttgtatcatgaggtttccattcacaggtggttacttagcctattcatggtctgttgagttttatacttcagtgaaacttggtaagttattgatgcttctgaataaagaatgtcctgataaatat

SEQ ID NO: 365350 - DNA, 1145 bp, Homo sapiens
tcctggagaaaccaggcccagcttcatttggaggatttgacaggatcttagtaccaagtggaattgttgcctgcttaattttaattatgcttcccagcaggaggcctaaacacatgatgaagaactaattcagtacttgttggaatgcatgggaaaagagaaacctgaagaagttgttgagccttatgttaaaaacagccgagtagtggtgaaattaaattaagtggtaaagaaaattattttaatgagagcagtctttcaatagcaggtctggttggttattgatggctcctgcagacaataatgatgttaaaatctgcttgggcttagaatcagcaaacaaatcatttgcctaactggagataacaagagtaatccacagacttaaaacatgagctcagatgccagccaaggcgtgattaccactcctcctcctcccagcatgcctcacaaagagagatattttgaccgcatcaatgaaaatgacccagaatacattagggagaggaacatgtctcctgatctacgacaagacttcaacatgatggagcagaggaaacgagttactcagatcctgcaaagtcctgcctttcgggaagacttggaatgccttattcaagaacagatgaagaaaggccacaacccaactggattactagcattacagcagattgcagattacatcatggccaattctttctcgggtttttcttcacctcctctcagtcttggcatggtcacacctatcaatgaccttcctggtgcagatacatcctcatatgtgaagggagaaaaacttactcgctgtaaacttgccagcctgtacagacttgtagacttgtttggatgggcacacctggcaaatacctatatctcaaaggaatcacgtcacggaccaagacccaccttattattaattccccagagggctattcttttttctgtaaggcttaccagctcccaagttggctgaaagtcacctattcatacggcgcagctgtgttggacccgggagttctccatcttgaacaacttgcgccctccgggatgtctaggccccctgtctgcaatcttttcgcccgggcctggatggtacgcgtggtggttgaccatccctatgcctttgcgcacaggggtattcctca

SEQ ID NO: 365351 - DNA, 4189 bp, Homo sapiens
agcgggggagaagctgctgctgctaatgctgctgctgctgctgccgccgccgccgctgctgctgctgctgttggtctgaggctgcagtaggtttctgtgcagcattgcagaatccacacctagagaacagaagacacagacacgtacgtctactacccttgttagaaggaagctttggatcttcggtggataacaagagtaatccacagacttaaaacatgagctcagatgccagccaaggcgtgattaccactcctcctcctcccagcatgcctcacaaagagagatattttgaccgcatcaatgaaaatgacccagaatacattagggagaggaacatgtctcctgatctacgacaagacttcaacatgatggagcagaggaaacgagttactcagatcctgcaaagtcctgcctttcgggaagacttggaatgccttattcaagaacagatgaagaaaggccacaacccaactggattactagcattacagcagattgcagattacatcatggccaattctttctcgggtttttcttcacctcctctcagtcttggcatggtcacacctatcaatgaccttcctggtgcagatacatcctcatatgtgaagggagaaaaacttactcgctgtaaacttgccagcctgtacagacttgtagacttgtttggatgggcacacctggcaaatacctatatctcagtaagaataagtaaggagcaagaccacattataataattcccagaggcctatctttttctgaagctacagcctccaatttggtgaaagtcaatataataggagaagtggttgaccagggaagtaccaatttgaaaattgaccatacaggattcagtccccatgctgcaatctattcaacacgtcctgatgttaagtgtgtgatacacatccatacccttgcaacagcagctgtatcctccatgaaatgtgggatccttccaatttctcaagagtctcttcttctgggagatgttgcctattatgactaccaagggtcacttgaagaacaggaggagagaattcaactgcagaaggttctgggaccaagttgtaaggtgctggtactcaggaatcatggtgtggttgcacttggagaaacattagaggaggcttttcattatatttttaatgtgcaactagcctgtgagattcaggtgcaggccctagcaggtgcaggtggagtagacaatctccatgtactggactttcagaagtataaagctttcacttacactgtagcagcgtctggtggaggaggtgtgaatatgggttcccatcaaaaatggaaggttggcgaaattgagtttgaagggcttatgaggactctggacaacttggggtatagaacaggctatgcttacaggcatcctctcattcgagagaagcctaggcacaagagtgatgtggaaatcccagcaactgtgactgctttttcctttgaagacgatacagtgccactctctcctctcaaatacatggcacagaggcaacagcgtgaaaaaacaagatggctgaactcaccaaatacttacatgaaagtgaatgtgcctgaggagtctcggaacggagaaaccagtccccgaaccaaaatcacgtggatgaaagcagaagactcatctaaagttagtggtggaacacctatcaaaattgaagatccaaatcagtttgttcctttaaacacaaacccgaatgaggtactagaaaagagaaataagattcgggaacaaaatcgatatgacttgaaaacagcaggaccacaatctcagttgcttgctggaattgttgtggataagccaccttctactatgcaatttgaagatgatgatcatggcccaccagctcctcctaacccatttagtcatctcacagaaggagaacttgaagagtataagaggacaatcgaacgtaaacaacaaggcctagaagaaaaccatgagctgttttccaagagcttcatctccatggaagtgcctgtcatggtagtaaatggcaaggatgatatgcatgatgttgaagatgagcttgctaagcgagtgagtaggttaagcacaagtacaaccatagaaaacatcgagattactattaagtctccagagaaaatcgaagaagtcctgtcacctgaaggctccccttcaaaatcgccatccaagaaaaagaagaaattccgcactccttcttttctgaaaaagaacaaaaaaaaggagaaagttgaggcctaaataaagtctttttataattattattataacaatgtgacattgcacatctaaataccacatttaagttgatcattaatatgcaatggtagatcagattgggggatgtagcaaactggactttaagaactggaaagaggttttacaaaagaaaaactttcagattcatctctcattttatatgtccagaaatggctttgaattttaagcaattactagttttaattagctctgccctcatgaagtattattataattcaccataaacagctatctgtctgaattacttcaggccttctccataatatctgttagaaagaaattgccagtgagcaagtgagaatttttatttctcaatacctgcttcacttgataatcatattataattttttatcatgattattgactatatttttggagtcccattgtttcagtgggcattaacagaatgctttaaaaacttctaagacaagaatctatagcattagtatacactggcacataattttttaaaaagttttaagaaaagattcatttggaattttattcacagtataaaatttcctcacctgaagtaactttgtttgccaaaaaagttgttttaataaactataatttttgaaaacttccttttttattagtttagaaagccccttatttttcaacaaaggggattttgtacacataacatgggttatttagtttaactctggcaaaaaaaaaaaaaaaattttgtatgttgatgtttgtataccgttcagtataaaagtgtcctaagcatattagccaatcttttcacagtagagcatacttaaggctgcttggtactgagtatacttaaatataactccagaatccagggacttggtgttaaaacaggattagagcatgtaaaggtacatctagattcatatttgaatcttaaactgtatttttctcttagtattgctaatgagtaaagaaaagtctcataaggtagccaaatgaaaaagaatgaaagggaaagtgaaaaattaaggggacaaaagatgggatgtgaaaagaagaattctagtttgatggtgactcatattcacgataggatacaaagtgtgatttgttggaaacatgtcccaaatttctaaaattctgcttctctgccaaaagcaatgtctttcttggttgatatttgagttttaaaagggtcaaatctttctaattttttgtatctttagagggcagcactagaagaaatcagcaggtctaatcccaccagtaagaaaactaccacttcttgatttttacagatttaaaaaaatcttttcagtgacctttctttttaatgtaaatacaaatttaaacctaggcttaatataggcgtttcccctttcacccaagtgatgtcacagttcgatgcaaaatcaatgatccagaatgatcgtgggtaaaaataactcaaagtgtttcttaagggtgagttggcatgcaaaaaattacattgattacagtgtgttttggagctggctctgtttgtgtgcatatgataatgcagagttgagccagagcctggaaatgtcattctagatctcactaactactggaatcagtgttttaatctcttggtggaaactttcagttgcttaactctctattggaagatttttttaatgttctacatcatttatgttgtattacaatgtatgtagaaatagtaacctgtgaactatgcttttccataactttttaaaaatatatatatctaaatgaatgcaatgtgcataaatattttttaaacataacagtgaactattgcaccttttgctaatgcctctatttacttgctttggcataaagaatgagccaatgaacctctgtgtcctgtggaaaaatgtataaatgttatctgatattgctcttagatgtaatgctaattaatgttaaatcacaaataaacagtattttaaatata

SEQ ID NO: 365352 - DNA, 4137 bp, Homo sapiens
agcgggggagaagctgctgctgctaatgctgctgctgctgctgccgccgccgccgctgctgctgctgctgttggtctgaggctgcagtaggtttctgtgcagcattgcagaatccacacctagagaacagaagacacagacacgtacgtctactacccttgttagaaggaagctttggatcttcggtggataacaagagtaatccacagacttaaaacatgagctcagatgccagccaaggcgtgattaccactcctcctcctcccagcatgcctcacaaagagagatattttgaccgcatcaatgaaaatgacccagaatacattagggagaggaacatgtctcctgatctacgacaagacttcaacatgatggagcagaggaaacgagttactcagatcctgcaaagtcctgcctttcgggaagacttggaatgccttattcaagaacagatgaagaaaggccacaacccaactggattactagcattacagcagattgcagattacatcatggccaattctttctcgggtttttcttcacctcctctcagtcttggcatggtcacacctatcaatgaccttcctggtgcagatacatcctcatatgtgaagggagaaaaacttactcgctgtaaacttgccagcctgtacagacttgtagacttgtttggatgggcacacctggcaaatacctatatctcagtaagaataagtaaggagcaagaccacattataataattcccagaggcctatctttttctgaagctacagcctccaatttggtgaaagtcaatataataggagaagtggttgaccagggaagtaccaatttgaaaattgaccatacaggattcagtccccatgctgcaatctattcaacacgtcctgatgttaagtgtgtgatacacatccatacccttgcaacagcagctgtatcctccatgaaatgtgggatccttccaatttctcaagagtctcttcttctgggagatgttgcctattatgactaccaagggtcacttgaagaacaggaggagagaattcaactgcagaaggttctgggaccaagttgtaaggtgctggtactcaggaatcatggtgtggttgcacttggagaaacattagaggaggcttttcattatatttttaatgtgcaactagcctgtgagattcaggtgcaggccctagcaggtgcaggtggagtagacaatctccatgtactggactttcagaagtataaagctttcacttacactgtagcagcgtctggtggaggaggtgtgaatatgggttcccatcaaaaatggaaggttggcgaaattgagtttgaagggcttatgaggactctggacaacttggggtatagaacaggctatgcttacaggcatcctctcattcgagagaagcctaggcacaagagtgatgtggaaatcccagcaactgtgactgctttttcctttgaagacgatacagtgccactctctcctctcaaatacatggcacagaggcaacagcgtgaaaaaacaagatggctgaactcaccaaatacttacatgaaagtgaatgtgcctgaggagtctcggaacggagaaaccagtccccgaaccaaaatcacgtggatgaaagcagaagactcatctaaagttagtggtggaacacctatcaaaattgaagatccaaatcagtttgttcctttaaacacaaacccgaatgaggtactagaaaagagaaataagattcgggaacaaaatcgatatgacttgaaaacagcaggaccacaatctcagttgcttgctggaattgttgtggataagccaccttctactatgcaatttgaagatgatgatcatggcccaccagctcctcctaacccatttagtcatctcacagaaggagaacttgaagagtataagaggacaatcgaacgtaaacaacaaggcctagaagaaaaccatgagctgttttccaagagcttcatctccatggaagtgcctgtcatggtagtaaatggcaaggatgatatgcatgatgttgaagatgagcttgctaagcgagtgagtaggttaagcacaagtacaaccatagaaaacatcgagattactattaagtctccagagaaaatcgaagaagtcctgtcacctgaaggctccccttcaaaatcgccatccaagaaaaagaagaaattccgcactccttcttttctgaaaaagaacaaaaaaaaggagaaagttgaggcctaaataaagtctttttataattattattataacaatgtgacattgcacatctaaataccacatttaagttgatcattaatatgcaatggtagatcagattgggggatgtagcaaactggactttaagaactggaaagaggttttacaaaagaaaaactttcagattcatctctcattttatatgtccagaaatggctttgaattttaagcaattactagttttaattagctctgccctcatgaagtattattataattcaccataaacagctatctgtctgaattacttcaggccttctccataatatctgttagaaagaaattgccagtgagcaagtgagaatttttatttctcaatacctgcttcacttgataatcatattataattttttatcatgattattgactatatttttggagtcccattgtttcagtgggcattaacagaatgctttaaaaacttctaagacaagaatctatagcattagtatacactggcacataattttttaaaaagttttaagaaaagattcatttggaattttattcacagtataaaatttcctcacctgaagtaactttgtttgccaaaaaagttgttttaataaactataatttttgaaaacttccttttttattagtttagaaagccccttatttttcaacaaaggggattttgtacacataacatgggttatttagtttaactctggcaaaaaaaaaaaaaaaattttgtatgttgatgtttgtataccgttcagtataaaagtgtcctaagcatattagccaatcttttcacagtagagcatacttaaggctgcttggtactgagtatacttaaatataactccagaatccagggacttggtgttaaaacaggattagagcatgtaaaggtacatctagattcatatttgaatcttaaactgtatttttctcttagtattgctaatgagtaaagaaaagtctcataaggtagccaaatgaaaaagaatgaaagggaaagtgaaaaattaaggggacaaaagatgggatgtgaaaagaagaattctagtttgatggtgactcatattcacgataggatacaaagtgtgatttgttggaaacatgtcccaaatttctaaaattctgcttctctgccaaaagcaatgtctttcttggttgatatttgagttttaaaagggtcaaatctttctaattttttgtatctttagagggcagcactagaagaaatcagcaggtctaatcccaccagtaagaaaactaccacttcttgatttttacagatttaaaaaaatcttttcagtgacctttctttttaatgtaaatacaaatttaaacctaggcttaatataggcgtttcccctttcacccaagtgatgtcacagttcgatgcaaaatcaatgatccagaatgatcgtggcattgattacagtgtgttttggagctggctctgtttgtgtgcatatgataatgcagagttgagccagagcctggaaatgtcattctagatctcactaactactggaatcagtgttttaatctcttggtggaaactttcagttgcttaactctctattggaagatttttttaatgttctacatcatttatgttgtattacaatgtatgtagaaatagtaacctgtgaactatgcttttccataactttttaaaaatatatatatctaaatgaatgcaatgtgcataaatattttttaaacataacagtgaactattgcaccttttgctaatgcctctatttacttgctttggcataaagaatgagccaatgaacctctgtgtcctgtggaaaaatgtataaatgttatctgatattgctcttagatgtaatgctaattaatgttaaatcacaaataaacagtattttaaatata

SEQ ID NO: 365353 - DNA, 4268 bp, Homo sapiens
agcgtagtcccgccagagcgcgagccgccagcccgtaacggtcgccagtgtgaggggcgggagggaaagaagaggggtttaaattagattttttaaaacacagagcaagcgccagaggcgtcggcatcccaggtgtcgccgcttcctgctgcacagggctcggcgtacaggtccctccctcctcaagccccctccccttctcccgccctaccctctggggctctgcggcgcttaagaggcggccgcagcggcggatccggcggctgctgcagcccgggcggctgccgagaaggagggaggggaaacacaaagccggctacgcgctgcgagataacaagagtaatccacagacttaaaacatgagctcagatgccagccaaggcgtgattaccactcctcctcctcccagcatgcctcacaaagagagatattttgaccgcatcaatgaaaatgacccagaatacattagggagaggaacatgtctcctgatctacgacaagacttcaacatgatggagcagaggaaacgagttactcagatcctgcaaagtcctgcctttcgggaagacttggaatgccttattcaagaacagatgaagaaaggccacaacccaactggattactagcattacagcagattgcagattacatcatggccaattctttctcgggtttttcttcacctcctctcagtcttggcatggtcacacctatcaatgaccttcctggtgcagatacatcctcatatgtgaagggagaaaaacttactcgctgtaaacttgccagcctgtacagacttgtagacttgtttggatgggcacacctggcaaatacctatatctcagtaagaataagtaaggagcaagaccacattataataattcccagaggcctatctttttctgaagctacagcctccaatttggtgaaagtcaatataataggagaagtggttgaccagggaagtagatgttaagtgtgtgatacacatccatacccttgcaacagcagctgtatcctccatgaaatgtgggatccttccaatttctcaagagtctcttcttctgggagatgttgcctattatgactaccaagggtcacttgaagaacaggaggagagaattcaactgcagaaggttctgggaccaagttgtaaggtgctggtactcaggaatcatggtgtggttgcacttggagaaacattagaggaggcttttcattatatttttaatgtgcaactagcctgtgagattcaggtgcaggccctagcaggtgcaggtggagtagacaatctccatgtactggactttcagaagtataaagctttcacttacactgtagcagcgtctggtggaggaggtgtgaatatgggttcccatcaaaaatggaaggttggcgaaattgagtttgaagggcttatgaggactctggacaacttggggtatagaacaggctatgcttacaggcatcctctcattcgagagaagcctaggcacaagagtgatgtggaaatcccagcaactgtgactgctttttcctttgaagacgatacagtgccactctctcctctcaaatacatggcacagaggcaacagcgtgaaaaaacaagatggctgaactcaccaaatacttacatgaaagtgaatgtgcctgaggagtctcggaacggagaaaccagtccccgaaccaaaatcacgtggatgaaagcagaagactcatctaaagttagtggtggaacacctatcaaaattgaagatccaaatcagtttgttcctttaaacacaaacccgaatgaggtactagaaaagagaaataagattcgggaacaaaatcgatatgacttgaaaacagcaggaccacaatctcagttgcttgctggaattgttgtggataagccaccttctactatgcaatttgaagatgatgatcatggcccaccagctcctcctaacccatttagtcatctcacagaaggagaacttgaagagtataagaggacaatcgaacgtaaacaacaaggcctagaagaaaaccatgagctgttttccaagagcttcatctccatggaagtgcctgtcatggtagtaaatggcaaggatgatatgcatgatgttgaagatgagcttgctaagcgagtgagtaggttaagcacaagtacaaccatagaaaacatcgagattactattaagtctccagagaaaatcgaagaagtcctgtcacctgaaggctccccttcaaaatcgccatccaagaaaaagaagaaattccgcactccttcttttctgaaaaagaacaaaaaaaaggagaaagttgaggcctaaataaagtctttttataattattattataacaatgtgacattgcacatctaaataccacatttaagttgatcattaatatgcaatggtagatcagattgggggatgtagcaaactggactttaagaactggaaagaggttttacaaaagaaaaactttcagattcatctctcattttatatgtccagaaatggctttgaattttaagcaattactagttttaattagctctgccctcatgaagtattattataattcaccataaacagctatctgtctgaattacttcaggccttctccataatatctgttagaaagaaattgccagtgagcaagtgagaatttttatttctcaatacctgcttcacttgataatcatattataattttttatcatgattattgactatatttttggagtcccattgtttcagtgggcattaacagaatgctttaaaaacttctaagacaagaatctatagcattagtatacactggcacataattttttaaaaagttttaagaaaagattcatttggaattttattcacagtataaaatttcctcacctgaagtaactttgtttgccaaaaaagttgttttaataaactataatttttgaaaacttccttttttattagtttagaaagccccttatttttcaacaaaggggattttgtacacataacatgggttatttagtttaactctggcaaaaaaaaaaaaaaaattttgtatgttgatgtttgtataccgttcagtataaaagtgtcctaagcatattagccaatcttttcacagtagagcatacttaaggctgcttggtactgagtatacttaaatataactccagaatccagggacttggtgttaaaacaggattagagcatgtaaaggtacatctagattcatatttgaatcttaaactgtatttttctcttagtattgctaatgagtaaagaaaagtctcataaggtagccaaatgaaaaagaatgaaagggaaagtgaaaaattaaggggacaaaagatgggatgtgaaaagaagaattctagtttgatggtgactcatattcacgataggatacaaagtgtgatttgttggaaacatgtcccaaatttctaaaattctgcttctctgccaaaagcaatgtctttcttggttgatatttgagttttaaaagggtcaaatctttctaattttttgtatctttagagggcagcactagaagaaatcagcaggtctaatcccaccagtaagaaaactaccacttcttgatttttacagatttaaaaaaatcttttcagtgacctttctttttaatgtaaatacaaatttaaacctaggcttaatataggcgtttcccctttcacccaagtgatgtcacagttcgatgcaaaatcaatgatccagaatgatcgtgggtaaaaataactcaaagtgtttcttaagggtgagttggcatgcaaaaaattacattgattacagtgtgttttggagctggctctgtttgtgtgcatatgataatgcagagttgagccagagcctggaaatgtcattctagatctcactaactactggaatcagtgttttaatctcttggtggaaactttcagttgcttaactctctattggaagatttttttaatgttctacatcatttatgttgtattacaatgtatgtagaaatagtaacctgtgaactatgcttttccataactttttaaaaatatatatatctaaatgaatgcaatgtgcataaatattttttaaacataacagtgaactattgcaccttttgctaatgcctctatttacttgctttggcataaagaatgagccaatgaacctctgtgtcctgtggaaaaatgtataaatgttatctgatattgctcttagatgtaatgctaattaatgttaaatcacaaataaacagtattttaaatata

SEQ ID NO: 365354 - DNA, 4397 bp, Homo sapiens
  misc_feature (3746)..(3746): n is a, c, g, or t
agcgggggagaagctgctgctgctaatgctgctgctgctgctgccgccgccgccgctgctgctgctgctgttggtctgaggctgcagtaggtttctgtgcagcattgcagaatccacacctagagaacagaagacacagacacgtacgtctactacccttgttagaaggaagctttggatcttcggtggataacaagagtaatccacagacttaaaacatgagctcagatgccagccaaggcgtgattaccactcctcctcctcccagcatgcctcacaaagagagatattttgaccgcatcaatgaaaatgacccagaatacattagggagaggaacatgtctcctgatctacgacaagacttcaacatgatggagcagaggaaacgagttactcagatcctgcaaagtcctgcctttcgggaagacttggaatgccttattcaagaacagatgaagaaaggccacaacccaactggattactagcattacagcagattgcagattacatcatggccaattctttctcgggtttttcttcacctcctctcagtcttggcatggtcacacctatcaatgaccttcctggtgcagatacatcctcatatgtgaagggagaaaaacttactcgctgtaaacttgccagcctgtacagacttgtagacttgtttggatgggcacacctggcaaatacctatatctcagtaagaataagtaaggagcaagaccacattataataattcccagaggcctatctttttctgaagctacagcctccaatttggtgaaagtcaatataataggagaagtggttgaccagggaagtaccaatttgaaaattgaccatacaggattcagtccccatgctgcaatctattcaacacgtcctgatgttaagtgtgtgatacacatccatacccttgcaacagcagctgtatcctccatgaaatgtgggatccttccaatttctcaagagtctcttcttctgggagatgttgcctattatgactaccaagggtcacttgaagaacaggaggagagaattcaactgcagaaggttctgggaccaagttgtaaggtgctggtactcaggaatcatggtgtggttgcacttggagaaacattagaggaggcttttcattatatttttaatgtgcaactagcctgtgagattcaggtgcaggccctagcaggtgcaggtggagtagacaatctccatgtactggactttcagaagtataaagctttcacttacactgtagcagcgtctggtggaggaggtgtgaatatgggttcccatcaaaaatggaaggttggcgaaattgagtttgaagggcttatgaggactctggacaacttggggtatagaacaggctatgcttacaggcatcctctcattcgagagaagcctaggcacaagagtgatgtggaaatcccagcaactgtgactgctttttcctttgaagacgatacagtgccactctctcctctcaaatacatggcacagaggcaacagcgtgaaaaaacaagatggctgaactcaccaaatacttacatgaaagtgaatgtgcctgaggagtctcggaacggagaaaccagtccccgaaccaaaatcacgtggatgaaagcagaagactcatctaaagttagtggtggaacacctatcaaaattgaagatccaaatcagtttgttcctttaaacacaaacccgaatgaggtactagaaaagagaaataagattcgggaacaaaatcgatatgacttgaaaacagcaggaccacaatctcagttgcttgctggaattgttgtggataagccaccttctactatgcaatttgaagatgatgatcatggcccaccagctcctcctaacccatttagtcatctcacagaaggagaacttgaagagtataagaggacaatcgaacgtaaacaacaaggcctagaagaaaaccatgagctgttttccaagagcttcatctccatggaagtgcctgtcatggtagtaaatggcaaggatgatatgcatgatgttgaagatgagcttgctaagcgagtgagtaggttaagcacaagtacaaccatagaaaacatcgagattactattaagtctccagagaaaatcgaagaagtcctgtcacctgaaggctccccttcaaaatcgccatccaagaaaaagaagaaattccgcactccttcttttctgaaaaagaacaaaaaaaaggagaaagttgaggcctaaataaagtctttttataattattattataacaatgtgacattgcacatctaaataccacatttaagttgatcattaatatgcaatggtagatcagattgggggatgtagcaaactggactttaagaactggaaagaggttttacaaaagaaaaactttcagattcatctctcattttatatgtccagaaatggctttgaattttaagcaattactagttttaattagctctgccctcatgaagtattattataattcaccataaacagctatctgtctgaattacttcaggccttctccataatatctgttagaaagaaattgccagtgagcaagtgagaatttttatttctcaatacctgcttcacttgataatcatattataattttttatcatgattattgactatatttttggagtcccattgtttcagtgggcattaacagaatgctttaaaaacttctaagacaagaatctatagcattagtatacactggcacataattttttaaaaagttttaagaaaagattcatttggaattttattcacagtataaaatttcctcacctgaagtaactttgtttgccaaaaaagttgttttaataaactataatttttgaaaacttccttttttattagtttagaaagccccttatttttcaacaaaggggattttgtacacataacatgggttatttagtttaactctggcaaaaaaaaaaaaaaaattttgtatgttgatgtttgtataccgttcagtataaaagtgtcctaagcatattagccaatcttttcacagtagagcatacttaaggctgcttggtactgagtatacttaaatataactccagaatccagggacttggtgttaaaacaggattagagcatgtaaaggtacatctagattcatatttgaatcttaaactgtatttttctcttagtattgctaatgagtaaagaaaagtctcataaggtagccaaatgaaaaagaatgaaagggaaagtgaaaaattaaggggacaaaagatgggatgtgaaaagaagaattctagtttgatggtgactcatattcacgataggatacaaagtgtgatttgttggaaacatgtcccaaatttctaaaattctgcttctctgccaaaagcaatgtctttcttggttgatatttgagttttaaaagggtcaaatctttctaattttttgtatctttagagggcagcactagaagaaatcagcaggtctaatcccaccagtaagaaaactaccacttcttgatttttacagatttaaaaaaatcttttcagtgacctttctttttaatgtaaatacaaatttaaacctaggcttaatataggcgtttcccctttcacccaagtgatgtcacagttcgatgcaaaatcaatgatccagaatgatcgtgggtaaaaataactcaaagtgtttcttaagggtgagttggcatgcaaaaaattagtaacacaatatttttaaaacgaatgattnttggggagaaacgtttttttgtgttttaaaagaccacgaaaataggggaggttctgtgtgtgcgttcttctgtgggtagtattacatataatatatcagactcgtggggacggcgggacaaaaaactaggggggcacctgttttgggggtggcggtgcccgcattttcccttattgtgggggattttttattgggggtttgggattggggcccaaatttaatggaataatgcagagttgagccagagcctggaaatgtcattctagatctcactaactactggaatcagtgttttaatctcttggtggaaactttcagttgcttaactctctattggaagatttttttaatgttctacatcatttatgttgtattacaatgtatgtagaaatagtaacctgtgaactatgcttttccataactttttaaaaatatatatatctaaatgaatgcaatgtgcataaatattttttaaacataacagtgaactattgcaccttttgctaatgcctctatttacttgctttggcataaagaatgagccaatgaacctctgtgtcctgtggaaaaatgtataaatgttatctgatattgctcttagatgtaatgctaattaatgttaaatcacaaataaacagtattttaaatata

SEQ ID NO: 365355 - DNA, 4388 bp, Homo sapiens
agcgtagtcccgccagagcgcgagccgccagcccgtaacggtcgccagtgtgaggggcgggagggaaagaagaggggtttaaattagattttttaaaacacagagcaagcgccagaggcgtcggcatcccaggtgtcgccgcttcctgctgcacagggctcggcgtacaggtccctccctcctcaagccccctccccttctcccgccctaccctctggggctctgcggcgcttaagaggcggccgcagcggcggatccggcggctgctgcagcccgggcggctgccgagaaggagggaggggaaacacaaagccggctacgcgctgcgagagttgtctcccagagctccgtggaatttcctttctctgctttaacgtacttttaaaagataacaagagtaatccacagacttaaaacatgagctcagatgccagccaaggcgtgattaccactcctcctcctcccagcatgcctcacaaagagagatattttgaccgcatcaatgaaaatgacccagaatacattagggagaggaacatgtctcctgatctacgacaagacttcaacatgatggagcagaggaaacgagttactcagatcctgcaaagtcctgcctttcgggaagacttggaatgccttattcaagaacagatgaagaaaggccacaacccaactggattactagcattacagcagattgcagattacatcatggccaattctttctcgggtttttcttcacctcctctcagtcttggcatggtcacacctatcaatgaccttcctggtgcagatacatcctcatatgtgaagggagaaaaacttactcgctgtaaacttgccagcctgtacagacttgtagacttgtttggatgggcacacctggcaaatacctatatctcagtaagaataagtaaggagcaagaccacattataataattcccagaggcctatctttttctgaagctacagcctccaatttggtgaaagtcaatataataggagaagtggttgaccagggaagtaccaatttgaaaattgaccatacaggattcagtccccatgctgcaatctattcaacacgtcctgatgttaagtgtgtgatacacatccatacccttgcaacagcagctgtatcctccatgaaatgtgggatccttccaatttctcaagagtctcttcttctgggagatgttgcctattatgactaccaagggtcacttgaagaacaggaggagagaattcaactgcagaaggttctgggaccaagttgtaaggtgctggtactcaggaatcatggtgtggttgcacttggagaaacattagaggaggcttttcattatatttttaatgtgcaactagcctgtgagattcaggtgcaggccctagcaggtgcaggtggagtagacaatctccatgtactggactttcagaagtataaagctttcacttacactgtagcagcgtctggtggaggaggtgtgaatatgggttcccatcaaaaatggaaggttggcgaaattgagtttgaagggcttatgaggactctggacaacttggggtatagaacaggctatgcttacaggcatcctctcattcgagagaagcctaggcacaagagtgatgtggaaatcccagcaactgtgactgctttttcctttgaagacgatacagtgccactctctcctctcaaatacatggcacagaggcaacagcgtgaaaaaacaagatggctgaactcaccaaatacttacatgaaagtgaatgtgcctgaggagtctcggaacggagaaaccagtccccgaaccaaaatcacgtggatgaaagcagaagactcatctaaagttagtggtggaacacctatcaaaattgaagatccaaatcagtttgttcctttaaacacaaacccgaatgaggtactagaaaagagaaataagattcgggaacaaaatcgatatgacttgaaaacagcaggaccacaatctcagttgcttgctggaattgttgtggataagccaccttctactatgcaatttgaagatgatgatcatggcccaccagctcctcctaacccatttagtcatctcacagaaggagaacttgaagagtataagaggacaatcgaacgtaaacaacaaggcctagaagaaaaccatgagctgttttccaagagcttcatctccatggaagtgcctgtcatggtagtaaatggcaaggatgatatgcatgatgttgaagatgagcttgctaagcgagtgagtaggttaagcacaagtacaaccatagaaaacatcgagattactattaagtctccagagaaaatcgaagaagtcctgtcacctgaaggctccccttcaaaatcgccatccaagaaaaagaagaaattccgcactccttcttttctgaaaaagaacaaaaaaaaggagaaagttgaggcctaaataaagtctttttataattattattataacaatgtgacattgcacatctaaataccacatttaagttgatcattaatatgcaatggtagatcagattgggggatgtagcaaactggactttaagaactggaaagaggttttacaaaagaaaaactttcagattcatctctcattttatatgtccagaaatggctttgaattttaagcaattactagttttaattagctctgccctcatgaagtattattataattcaccataaacagctatctgtctgaattacttcaggccttctccataatatctgttagaaagaaattgccagtgagcaagtgagaatttttatttctcaatacctgcttcacttgataatcatattataattttttatcatgattattgactatatttttggagtcccattgtttcagtgggcattaacagaatgctttaaaaacttctaagacaagaatctatagcattagtatacactggcacataattttttaaaaagttttaagaaaagattcatttggaattttattcacagtataaaatttcctcacctgaagtaactttgtttgccaaaaaagttgttttaataaactataatttttgaaaacttccttttttattagtttagaaagccccttatttttcaacaaaggggattttgtacacataacatgggttatttagtttaactctggcaaaaaaaaaaaaaaaattttgtatgttgatgtttgtataccgttcagtataaaagtgtcctaagcatattagccaatcttttcacagtagagcatacttaaggctgcttggtactgagtatacttaaatataactccagaatccagggacttggtgttaaaacaggattagagcatgtaaaggtacatctagattcatatttgaatcttaaactgtatttttctcttagtattgctaatgagtaaagaaaagtctcataaggtagccaaatgaaaaagaatgaaagggaaagtgaaaaattaaggggacaaaagatgggatgtgaaaagaagaattctagtttgatggtgactcatattcacgataggatacaaagtgtgatttgttggaaacatgtcccaaatttctaaaattctgcttctctgccaaaagcaatgtctttcttggttgatatttgagttttaaaagggtcaaatctttctaattttttgtatctttagagggcagcactagaagaaatcagcaggtctaatcccaccagtaagaaaactaccacttcttgatttttacagatttaaaaaaatcttttcagtgacctttctttttaatgtaaatacaaatttaaacctaggcttaatataggcgtttcccctttcacccaagtgatgtcacagttcgatgcaaaatcaatgatccagaatgatcgtgggtaaaaataactcaaagtgtttcttaagggtgagttggcatgcaaaaaattacattgattacagtgtgttttggagctggctctgtttgtgtgcatatgataatgcagagttgagccagagcctggaaatgtcattctagatctcactaactactggaatcagtgttttaatctcttggtggaaactttcagttgcttaactctctattggaagatttttttaatgttctacatcatttatgttgtattacaatgtatgtagaaatagtaacctgtgaactatgcttttccataactttttaaaaatatatatatctaaatgaatgcaatgtgcataaatattttttaaacataacagtgaactattgcaccttttgctaatgcctctatttacttgctttggcataaagaatgagccaatgaacctctgtgtcctgtggaaaaatgtataaatgttatctgatattgctcttagatgtaatgctaattaatgttaaatcacaaataaacagtattttaaatata

SEQ ID NO: 365356 - DNA, 4115 bp, Homo sapiens
cacattgagtgtggatatcttgctctttaaaacaaagttcattgttagggcagtattgcaacagaattgccacacaaaaaccagcttaagaaatgtacagcacttcaatttttttataacaagagtaatccacagacttaaaacatgagctcagatgccagccaaggcgtgattaccactcctcctcctcccagcatgcctcacaaagagagatattttgaccgcatcaatgaaaatgacccagaatacattagggagaggaacatgtctcctgatctacgacaagacttcaacatgatggagcagaggaaacgagttactcagatcctgcaaagtcctgcctttcgggaagacttggaatgccttattcaagaacagatgaagaaaggccacaacccaactggattactagcattacagcagattgcagattacatcatggccaattctttctcgggtttttcttcacctcctctcagtcttggcatggtcacacctatcaatgaccttcctggtgcagatacatcctcatatgtgaagggagaaaaacttactcgctgtaaacttgccagcctgtacagacttgtagacttgtttggatgggcacacctggcaaatacctatatctcagtaagaataagtaaggagcaagaccacattataataattcccagaggcctatctttttctgaagctacagcctccaatttggtgaaagtcaatataataggagaagtggttgaccagggaagtaccaatttgaaaattgaccatacaggattcagtccccatgctgcaatctattcaacacgtcctgatgttaagtgtgtgatacacatccatacccttgcaacagcagctgtatcctccatgaaatgtgggatccttccaatttctcaagagtctcttcttctgggagatgttgcctattatgactaccaagggtcacttgaagaacaggaggagagaattcaactgcagaaggttctgggaccaagttgtaaggtgctggtactcaggaatcatggtgtggttgcacttggagaaacattagaggaggcttttcattatatttttaatgtgcaactagcctgtgagattcaggtgcaggccctagcaggtgcaggtggagtagacaatctccatgtactggactttcagaagtataaagctttcacttacactgtagcagcgtctggtggaggaggtgtgaatatgggttcccatcaaaaatggaaggttggcgaaattgagtttgaagggcttatgaggactctggacaacttggggtatagaacaggctatgcttacaggcatcctctcattcgagagaagcctaggcacaagagtgatgtggaaatcccagcaactgtgactgctttttcctttgaagacgatacagtgccactctctcctctcaaatacatggcacagaggcaacagcgtgaaaaaacaagatggctgaactcaccaaatacttacatgaaagtgaatgtgcctgaggagtctcggaacggagaaaccagtccccgaaccaaaatcacgtggatgaaagcagaagactcatctaaagttagtggtggaacacctatcaaaattgaagatccaaatcagtttgttcctttaaacacaaacccgaatgaggtactagaaaagagaaataagattcgggaacaaaatcgatatgacttgaaaacagcaggaccacaatctcagttgcttgctggaattgttgtggataagccaccttctactatgcaatttgaagatgatgatcatggcccaccagctcctcctaacccatttagtcatctcacagaaggagaacttgaagagtataagaggacaatcgaacgtaaacaacaaggcctagaagaaaaccatgagctgttttccaagagcttcatctccatggaagtgcctgtcatggtagtaaatggcaaggatgatatgcatgatgttgaagatgagcttgctaagcgagtgagtaggttaagcacaagtacaaccatagaaaacatcgagattactattaagtctccagagaaaatcgaagaagtcctgtcacctgaaggctccccttcaaaatcgccatccaagaaaaagaagaaattccgcactccttcttttctgaaaaagaacaaaaaaaaggagaaagttgaggcctaaataaagtctttttataattattattataacaatgtgacattgcacatctaaataccacatttaagttgatcattaatatgcaatggtagatcagattgggggatgtagcaaactggactttaagaactggaaagaggttttacaaaagaaaaactttcagattcatctctcattttatatgtccagaaatggctttgaattttaagcaattactagttttaattagctctgccctcatgaagtattattataattcaccataaacagctatctgtctgaattacttcaggccttctccataatatctgttagaaagaaattgccagtgagcaagtgagaatttttatttctcaatacctgcttcacttgataatcatattataattttttatcatgattattgactatatttttggagtcccattgtttcagtgggcattaacagaatgctttaaaaacttctaagacaagaatctatagcattagtatacactggcacataattttttaaaaagttttaagaaaagattcatttggaattttattcacagtataaaatttcctcacctgaagtaactttgtttgccaaaaaagttgttttaataaactataatttttgaaaacttccttttttattagtttagaaagccccttatttttcaacaaaggggattttgtacacataacatgggttatttagtttaactctggcaaaaaaaaaaaaaaaattttgtatgttgatgtttgtataccgttcagtataaaagtgtcctaagcatattagccaatcttttcacagtagagcatacttaaggctgcttggtactgagtatacttaaatataactccagaatccagggacttggtgttaaaacaggattagagcatgtaaaggtacatctagattcatatttgaatcttaaactgtatttttctcttagtattgctaatgagtaaagaaaagtctcataaggtagccaaatgaaaaagaatgaaagggaaagtgaaaaattaaggggacaaaagatgggatgtgaaaagaagaattctagtttgatggtgactcatattcacgataggatacaaagtgtgatttgttggaaacatgtcccaaatttctaaaattctgcttctctgccaaaagcaatgtctttcttggttgatatttgagttttaaaagggtcaaatctttctaattttttgtatctttagagggcagcactagaagaaatcagcaggtctaatcccaccagtaagaaaactaccacttcttgatttttacagatttaaaaaaatcttttcagtgacctttctttttaatgtaaatacaaatttaaacctaggcttaatataggcgtttcccctttcacccaagtgatgtcacagttcgatgcaaaatcaatgatccagaatgatcgtgggtaaaaataactcaaagtgtttcttaagggtgagttggcatgcaaaaaattacattgattacagtgtgttttggagctggctctgtttgtgtgcatatgataatgcagagttgagccagagcctggaaatgtcattctagatctcactaactactggaatcagtgttttaatctcttggtggaaactttcagttgcttaactctctattggaagatttttttaatgttctacatcatttatgttgtattacaatgtatgtagaaatagtaacctgtgaactatgcttttccataactttttaaaaatatatatatctaaatgaatgcaatgtgcataaatattttttaaacataacagtgaactattgcaccttttgctaatgcctctatttacttgctttggcataaagaatgagccaatgaacctctgtgtcctgtggaaaaatgtataaatgttatctgatattgctcttagatgtaatgctaattaatgttaaatcacaaataaacagtattttaaatata

SEQ ID NO: 365357 - DNA, 5351 bp, Homo sapiens
agcgtagtcccgccagagcgcgagccgccagcccgtaacggtcgccagtgtgaggggcgggagggaaagaagaggggtttaaattagattttttaaaacacagagcaagcgccagaggcgtcggcatcccaggtgtcgccgcttcctgctgcacagggctcggcgtacaggtccctccctcctcaagccccctccccttctcccgccctaccctctggggctctgcggcgcttaagaggcggccgcagcggcggatccggcggctgctgcagcccgggcggctgccgagaaggagggaggggaaacacaaagccggctacgcgctgcgagataacaagagtaatccacagacttaaaacatgagctcagatgccagccaaggcgtgattaccactcctcctcctcccagcatgcctcacaaagagagatattttgaccgcatcaatgaaaatgacccagaatacattagggagaggaacatgtctcctgatctacgacaagacttcaacatgatggagcagaggaaacgagttactcagatcctgcaaagtcctgcctttcgggaagacttggaatgccttattcaagaacagatgaagaaaggccacaacccaactggattactagcattacagcagattgcagattacatcatggccaattctttctcgggtttttcttcacctcctctcagtcttggcatggtcacacctatcaatgaccttcctggtgcagatacatcctcatatgtgaagggagaaaaacttactcgctgtaaacttgccagcctgtacagacttgtagacttgtttggatgggcacacctggcaaatacctatatctcagtaagaataagtaaggagcaagaccacattataataattcccagaggcctatctttttctgaagctacagcctccaatttggtgaaagtcaatataataggagaagtggttgaccagggaagtaccaatttgaaaattgaccatacaggattcagtccccatgctgcaatctattcaacacgtcctgatgttaagtgtgtgatacacatccatacccttgcaacagcagctgtatcctccatgaaatgtgggatccttccaatttctcaagagtctcttcttctgggagatgttgcctattatgactaccaagggtcacttgaagaacaggaggagagaattcaactgcagaaggttctgggaccaagttgtaaggtgctggtactcaggaatcatggtgtggttgcacttggagaaacattagaggaggcttttcattatatttttaatgtgcaactagcctgtgagattcaggtgcaggccctagcaggtgcaggtggagtagacaatctccatgtactggactttcagaagtataaagctttcacttacactgtagcagcgtctggtggaggaggtgtgaatatgggttcccatcaaaaatggaaggttggcgaaattgagtttgaagggcttatgaggactctggacaacttggggtatagaacaggctatgcttacaggcatcctctcattcgagagaagcctaggcacaagagtgatgtggaaatcccagcaactgtgactgctttttcctttgaagacgatacagtgccactctctcctctcaaatacatggcacagaggcaacagcgtgaaaaaacaagatggctgaactcaccaaatacttacatgaaagtgaatgtgcctgaggagtctcggaacggagaaaccagtccccgaaccaaaatcacgtggatgaaagcagaagactcatctaaagttagtggtggaacacctatcaaaattgaagatccaaatcagtttgttcctttaaacacaaacccgaatgaggtactagaaaagagaaataagattcgggaacaaaatcgatatgacttgaaaacagcaggaccacaatctcagttgcttgctggaattgttgtggataagccaccttctactatgcaatttgaagatgatgatcatggcccaccagctcctcctaacccatttagtcatctcacagaaggagaacttgaagagtataagaggacaatcgaacgtaaacaacaaggcctagaagatgctgagcaggaattactctcagatgacgcttcatctgtttcacaaattcagtctcaaactcagtcaccgcaaaatgtccctgaaaaattagaaggtactcaatgtaatttcccacatagcattcactgagttagtcttgagtctgtccctctgtgttttgttttcacgtgaggaagttgaatacctcatcacagtaagttttccatattttacttatatctcccaataattacatattttatatcattaaaaatggggcgctacttttgttcagcatttatattgatttaccttaatctgaattttggcaacccgcagttcttaagaatttgtggaattggctgggcgcggtggctcacacctgtaatcccagcactttgggaggctgaggcaggtggatcacgaggtcaggagatcaagaccatcctggctaacacggtgaaaccctgtctctactaaaaatacaaaaaattagctgggtgtggtggcgggcgcctgtagtcccagctactcgggaggctgaggcaggagaatggcatgaacacgggaggtggagctggcagtgagccaagactgccactgcactccggcctgggcgacagagtgagactccgcctcaaaaaaaaaaaaaaaaaaaaaagaatttgtggaattaaacatctcccaatcagcagcatgaaatctttttcagtattgattgccaaatgatcccaaaactagagaaaaatatgttgtcttcctcatttatacttaattgatttacaatgaaactgttatttcatcaaactgggattatctagcttttgctctttggtttaacaactttgttcctttcccctttatatcattaaagaaaattagcttcttgctaatagatcacagtttattaaaataatgatctgtcttcattggaatcaaagtaatgccttattacattgctaaaacatttcagttttgtaaagtagagcaaaaatgttaagtatgtaaaataacccccaaaaaaccctcccctttcgtagaaaaccatgagctgttttccaagagcttcatctccatggaagtgcctgtcatggtagtaaatggcaaggatgatatgcatgatgttgaagatgagcttgctaagcgagtgagtaggttaagcacaagtacaaccatagaaaacatcgagattactattaagtctccagagaaaatcgaagaagtcctgtcacctgaaggctccccttcaaaatcgccatccaagaaaaagaagaaattccgcactccttcttttctgaaaaagaacaaaaaaaaggagaaagttgaggcctaaataaagtctttttataattattattataacaatgtgacattgcacatctaaataccacatttaagttgatcattaatatgcaatggtagatcagattgggggatgtagcaaactggactttaagaactggaaagaggttttacaaaagaaaaactttcagattcatctctcattttatatgtccagaaatggctttgaattttaagcaattactagttttaattagctctgccctcatgaagtattattataattcaccataaacagctatctgtctgaattacttcaggccttctccataatatctgttagaaagaaattgccagtgagcaagtgagaatttttatttctcaatacctgcttcacttgataatcatattataattttttatcatgattattgactatatttttggagtcccattgtttcagtgggcattaacagaatgctttaaaaacttctaagacaagaatctatagcattagtatacactggcacataattttttaaaaagttttaagaaaagattcatttggaattttattcacagtataaaatttcctcacctgaagtaactttgtttgccaaaaaagttgttttaataaactataatttttgaaaacttccttttttattagtttagaaagccccttatttttcaacaaaggggattttgtacacataacatgggttatttagtttaactctggcaaaaaaaaaaaaaaaattttgtatgttgatgtttgtataccgttcagtataaaagtgtcctaagcatattagccaatcttttcacagtagagcatacttaaggctgcttggtactgagtatacttaaatataactccagaatccagggacttggtgttaaaacaggattagagcatgtaaaggtacatctagattcatatttgaatcttaaactgtatttttctcttagtattgctaatgagtaaagaaaagtctcataaggtagccaaatgaaaaagaatgaaagggaaagtgaaaaattaaggggacaaaagatgggatgtgaaaagaagaattctagtttgatggtgactcatattcacgataggatacaaagtgtgatttgttggaaacatgtcccaaatttctaaaattctgcttctctgccaaaagcaatgtctttcttggttgatatttgagttttaaaagggtcaaatctttctaattttttgtatctttagagggcagcactagaagaaatcagcaggtctaatcccaccagtaagaaaactaccacttcttgatttttacagatttaaaaaaatcttttcagtgacctttctttttaatgtaaatacaaatttaaacctaggcttaatataggcgtttcccctttcacccaagtgatgtcacagttcgatgcaaaatcaatgatccagaatgatcgtgggtaaaaataactcaaagtgtttcttaagggtgagttggcatgcaaaaaattacattgattacagtgtgttttggagctggctctgtttgtgtgcatatgataatgcagagttgagccagagcctggaaatgtcattctagatctcactaactactggaatcagtgttttaatctcttggtggaaactttcagttgcttaactctctattggaagatttttttaatgttctacatcatttatgttgtattacaatgtatgtagaaatagtaacctgtgaactatgcttttccataactttttaaaaatatatatatctaaatgaatgcaatgtgcataaatattttttaaacataacagtgaactattgcaccttttgctaatgcctctatttacttgctttggcataaagaatgagccaatgaacctctgtgtcctgtggaaaaatgtataaatgttatctgatattgctcttagatgtaatgctaattaatgttaaatcacaaataaacagtattttaaatata

SEQ ID NO: 365358 - DNA, 5313 bp, Homo sapiens
agcgtagtcccgccagagcgcgagccgccagcccgtaacggtcgccagtgtgaggggcgggagggaaagaagaggggtttaaattagattttttaaaacacagagcaagcgccagaggcgtcggcatcccaggtgtcgccgcttcctgctgcacagggctcggcgtacaggtccctccctcctcaagccccctccccttctcccgccctaccctctggggctctgcggcgcttaagaggcggccgcagcggcggatccggcggctgctgcagcccgggcggctgccgagaaggagggaggggaaacacaaagccggctacgcgctgcgagataacaagagtaatccacagacttaaaacatgagctcagatgccagccaaggcgtgattaccactcctcctcctcccagcatgcctcacaaagagagatattttgaccgcatcaatgaaaatgacccagaatacattagggagaggaacatgtctcctgatctacgacaagacttcaacatgatggagcagaggaaacgagttactcagatcctgcaaagtcctgcctttcgggaagacttggaatgccttattcaagaacagatgaagaaaggccacaacccaactggattactagcattacagcagattgcagattacatcatggccaattctttctcgggtttttcttcacctcctctcagtcttggcatggtcacacctatcaatgaccttcctggtgcagatacatcctcatatgtgaagggagaaaaacttactcgctgtaaacttgccagcctgtacagacttgtagacttgtttggatgggcacacctggcaaatacctatatctcagtaagaataagtaaggagcaagaccacattataataattcccagaggcctatctttttctgaagctacagcctccaatttggtgaaagtcaatataataggagaagtggttgaccagggaagtaccaatttgaaaattgaccatacaggattcagtccccatgctgcaatctattcaacacgtcctgatgttaagtgtgtgatacacatccatacccttgcaacagcagctgtatcctccatgaaatgtgggatccttccaatttctcaagagtctcttcttctgggagatgttgcctattatgactaccaagggtcacttgaagaacaggaggagagaattcaactgcagaaggttctgggaccaagttgtaaggtgctggtactcaggaatcatggtgtggttgcacttggagaaacattagaggaggcttttcattatatttttaatgtgcaactagcctgtgagattcaggtgcaggccctagcaggtgcaggtggagtagacaatctccatgtactggactttcagaagtataaagctttcacttacactgtagcagcgtctggtggaggaggtgtgaatatgggttcccatcaaaaatggaaggttggcgaaattgagtttgaagggcttatgaggactctggacaacttggggtatagaacaggctatgcttacaggcatcctctcattcgagagaagcctaggcacaagagtgatgtggaaatcccagcaactgtgactgctttttcctttgaagacgatacagtgccactctctcctctcaaatacatggcacagaggcaacagcgtgaaaaaacaagatggctgaactcaccaaatacttacatgaaagtgaatgtgcctgaggagtctcggaacggagaaaccagtccccgaaccaaaatcacgtggatgaaagcagaagactcatctaaagttagtggtggaacacctatcaaaattgaagatccaaatcagtttgttcctttaaacacaaacccgaatgaggtactagaaaagagaaataagattcgggaacaaaatcgatatgacttgaaaacagcaggaccacaatctcagttgcttgctggaattgttgtggataagccaccttctactatgcaatttgaagatgatgatcatggcccaccagctcctcctaacccatttagtcatctcacagaaggagaacttgaagagtataagaggacaatcgaacgtaaacaacaaggcctagaagatgctgagcaggaattactctcagatgacgcttcatctgtttcacaaattcagtctcaaactcagtcaccgcaaaatgtccctgaaaaattagaaggtactcaatgtaatttcccacatagcattcactgagttagtcttgagtctgtccctctgtgttttgttttcacgtgaggaagttgaatacctcatcacagtaagttttccatattttacttatatctcccaataattacatattttatatcattaaaaatggggcgctacttttgttcagcatttatattgatttaccttaatctgaattttggcaacccgcagttcttaagaatttgtggaattggctgggcgcggtggctcacacctgtaatcccagcactttgggaggctgaggcaggtggatcacgaggtcaggagatcaagaccatcctggctaacacggtgaaaccctgtctctactaaaaatacaaaaaattagctgggtgtggtggcgggcgcctgtagtcccagctactcgggaggctgaggcaggagaatggcatgaacacgggaggtggagctggcagtgagccaagactgccactgcactccggcctgggcgacagagtgagactccgcctcaaaaaaaaaaaaaaaaaaaaaagaatttgtggaattaaacatctcccaatcagcagcatgaaatctttttcagtattgattgccaaatgatcccaaaactagagaaaaatatgttgtcttcctcatttatacttaattgatttacaatgaaactgttatttcatcaaactgggattatctagcttttgctctttggtttaacaactttgttcctttcccctttatatcattaaagaaaattagcttcttgctaatagatcacagtttattaaaataatgatctgtcttcattggaatcaaagtaatgccttattacattgctaaaacatttcagttttgtaaagtagagcaaaaatgttaagtatgtaaaataacccccaaaaaaccctcccctttcgtagaaaaccatgagctgttttccaagagcttcatctccatggaagtgcctgtcatggtagtaaatggcaaggatgatatgcatgatgttgaagatgagcttgctaagcgagtgagtaggttaagcacaagtacaaccatagaaaacatcgagattactattaagctccccttcaaaatcgccatccaagaaaaagaagaaattccgcactccttcttttctgaaaaagaacaaaaaaaaggagaaagttgaggcctaaataaagtctttttataattattattataacaatgtgacattgcacatctaaataccacatttaagttgatcattaatatgcaatggtagatcagattgggggatgtagcaaactggactttaagaactggaaagaggttttacaaaagaaaaactttcagattcatctctcattttatatgtccagaaatggctttgaattttaagcaattactagttttaattagctctgccctcatgaagtattattataattcaccataaacagctatctgtctgaattacttcaggccttctccataatatctgttagaaagaaattgccagtgagcaagtgagaatttttatttctcaatacctgcttcacttgataatcatattataattttttatcatgattattgactatatttttggagtcccattgtttcagtgggcattaacagaatgctttaaaaacttctaagacaagaatctatagcattagtatacactggcacataattttttaaaaagttttaagaaaagattcatttggaattttattcacagtataaaatttcctcacctgaagtaactttgtttgccaaaaaagttgttttaataaactataatttttgaaaacttccttttttattagtttagaaagccccttatttttcaacaaaggggattttgtacacataacatgggttatttagtttaactctggcaaaaaaaaaaaaaaaattttgtatgttgatgtttgtataccgttcagtataaaagtgtcctaagcatattagccaatcttttcacagtagagcatacttaaggctgcttggtactgagtatacttaaatataactccagaatccagggacttggtgttaaaacaggattagagcatgtaaaggtacatctagattcatatttgaatcttaaactgtatttttctcttagtattgctaatgagtaaagaaaagtctcataaggtagccaaatgaaaaagaatgaaagggaaagtgaaaaattaaggggacaaaagatgggatgtgaaaagaagaattctagtttgatggtgactcatattcacgataggatacaaagtgtgatttgttggaaacatgtcccaaatttctaaaattctgcttctctgccaaaagcaatgtctttcttggttgatatttgagttttaaaagggtcaaatctttctaattttttgtatctttagagggcagcactagaagaaatcagcaggtctaatcccaccagtaagaaaactaccacttcttgatttttacagatttaaaaaaatcttttcagtgacctttctttttaatgtaaatacaaatttaaacctaggcttaatataggcgtttcccctttcacccaagtgatgtcacagttcgatgcaaaatcaatgatccagaatgatcgtgggtaaaaataactcaaagtgtttcttaagggtgagttggcatgcaaaaaattacattgattacagtgtgttttggagctggctctgtttgtgtgcatatgataatgcagagttgagccagagcctggaaatgtcattctagatctcactaactactggaatcagtgttttaatctcttggtggaaactttcagttgcttaactctctattggaagatttttttaatgttctacatcatttatgttgtattacaatgtatgtagaaatagtaacctgtgaactatgcttttccataactttttaaaaatatatatatctaaatgaatgcaatgtgcataaatattttttaaacataacagtgaactattgcaccttttgctaatgcctctatttacttgctttggcataaagaatgagccaatgaacctctgtgtcctgtggaaaaatgtataaatgttatctgatattgctcttagatgtaatgctaattaatgttaaatcacaaataaacagtattttaaatata

SEQ ID NO: 365359 - DNA, 3495 bp, Homo sapiens
agcgtagtcccgccagagcgcgagccgccagcccgtaacggtcgccagtgtgaggggcgggagggaaagaagaggggtttaaattagattttttaaaacacagagcaagcgccagaggcgtcggcatcccaggtgtcgccgcttcctgctgcacagggctcggcgtacaggtccctccctcctcaagccccctccccttctcccgccctaccctctggggctctgcggcgcttaagaggcggccgcagcggcggatccggcggctgctgcagcccgggcggctgccgagaaggagggaggggaaacacaaagccggctacgcgctgcgagctgtgaaagtgaagtttggcttgaaaacacattctgccagtgcaaatccaaaaagtatcaagacaggattcttctactataataaccaactggtaactttgaattgttagtttgaggggggagatgaggaagagccaagagatagcagcagagttgtctcccagagctccgtggaatttcctttctctgctttaacgtacttttaaaagataacaagagtaatccacagacttaaaacatgagctcagatgccagccgtgtgaatatgggttcccatcaaaaatggaaggttggcgaaattgagtttgaagggcttatgaggactctggacaacttggggtatagaacaggctatgcttacaggcatcctctcattcgagagaagcctaggcacaagagtgatgtggaaatcccagcaactgtgactgctttttcctttgaagacgatacagtgccactctctcctctcaaatacatggcacagaggcaacagcgtgaaaaaacaagatggctgaactcaccaaatacttacatgaaagtgaatgtgcctgaggagtctcggaacggagaaaccagtccccgaaccaaaatcacgtggatgaaagcagaagactcatctaaagttagtggtggaacacctatcaaaattgaagatccaaatcagtttgttcctttaaacacaaacccgaatgaggtactagaaaagagaaataagattcgggaacaaaatcgatatgacttgaaaacagcaggaccacaatctcagttgcttgctggaattgttgtggataagccaccttctactatgcaatttgaagatgatgatcatggcccaccagctcctcctaacccatttagtcatctcacagaaggagaacttgaagagtataagaggacaatcgaacgtaaacaacaaggcctagaagaaaaccatgagctgttttccaagagcttcatctccatggaagtgcctgtcatggtagtaaatggcaaggatgatatgcatgatgttgaagatgagcttgctaagcgagtgagtaggttaagcacaagtacaaccatagaaaacatcgagattactattaagtctccagagaaaatcgaagaagtcctgtcacctgaaggctccccttcaaaatcgccatccaagaaaaagaagaaattccgcactccttcttttctgaaaaagaacaaaaaaaaggagaaagttgaggcctaaataaagtctttttataattattattataacaatgtgacattgcacatctaaataccacatttaagttgatcattaatatgcaatggtagatcagattgggggatgtagcaaactggactttaagaactggaaagaggttttacaaaagaaaaactttcagattcatctctcattttatatgtccagaaatggctttgaattttaagcaattactagttttaattagctctgccctcatgaagtattattataattcaccataaacagctatctgtctgaattacttcaggccttctccataatatctgttagaaagaaattgccagtgagcaagtgagaatttttatttctcaatacctgcttcacttgataatcatattataattttttatcatgattattgactatatttttggagtcccattgtttcagtgggcattaacagaatgctttaaaaacttctaagacaagaatctatagcattagtatacactggcacataattttttaaaaagttttaagaaaagattcatttggaattttattcacagtataaaatttcctcacctgaagtaactttgtttgccaaaaaagttgttttaataaactataatttttgaaaacttccttttttattagtttagaaagccccttatttttcaacaaaggggattttgtacacataacatgggttatttagtttaactctggcaaaaaaaaaaaaaaaattttgtatgttgatgtttgtataccgttcagtataaaagtgtcctaagcatattagccaatcttttcacagtagagcatacttaaggctgcttggtactgagtatacttaaatataactccagaatccagggacttggtgttaaaacaggattagagcatgtaaaggtacatctagattcatatttgaatcttaaactgtatttttctcttagtattgctaatgagtaaagaaaagtctcataaggtagccaaatgaaaaagaatgaaagggaaagtgaaaaattaaggggacaaaagatgggatgtgaaaagaagaattctagtttgatggtgactcatattcacgataggatacaaagtgtgatttgttggaaacatgtcccaaatttctaaaattctgcttctctgccaaaagcaatgtctttcttggttgatatttgagttttaaaagggtcaaatctttctaattttttgtatctttagagggcagcactagaagaaatcagcaggtctaatcccaccagtaagaaaactaccacttcttgatttttacagatttaaaaaaatcttttcagtgacctttctttttaatgtaaatacaaatttaaacctaggcttaatataggcgtttcccctttcacccaagtgatgtcacagttcgatgcaaaatcaatgatccagaatgatcgtgggtaaaaataactcaaagtgtttcttaagggtgagttggcatgcaaaaaattacattgattacagtgtgttttggagctggctctgtttgtgtgcatatgataatgcagagttgagccagagcctggaaatgtcattctagatctcactaactactggaatcagtgttttaatctcttggtggaaactttcagttgcttaactctctattggaagatttttttaatgttctacatcatttatgttgtattacaatgtatgtagaaatagtaacctgtgaactatgcttttccataactttttaaaaatatatatatctaaatgaatgcaatgtgcataaatattttttaaacataacagtgaactattgcaccttttgctaatgcctctatttacttgctttggcataaagaatgagccaatgaacctctgtgtcctgtggaaaaatgtataaatgttatctgatattgctcttagatgtaatgctaattaatgttaaatcacaaataaacagtattttaaatata

SEQ ID NO: 365360 - DNA, 3568 bp, Homo sapiens
tatgaggaacctccatactgttttccacaatggctatactaatttacattgctaccaacagtgtgcaaagggtccctttctccctacattctaacacttgttgtctttcatcttttttataatagcgattctaacaggacatgccatctcgtgctttaatttgcattttcttgattagtgatgttttaatacacttgttgaccatttgtatgtcttcttttgagaaatgtttattcagatcctttgcctattttttaattgggttcttctcttgttattttttgagtcccctatatattttggatagtaaccccttaaaagatgtatggtttggcaaatgttattttagattttaccctcttctgtgaaggctcagaaggctgactgccttcagacccaggaacagagacttaaatgagcactgagatttgcttccccagaacagttttatagatagaaaagcacttctggtcagcaacttagaactgttcgtttgtcgggaacagttgtgtgagtggaaattgcaatatcagctgttatcagctctaactaggtcttgaaatttgcataatttcagctccagtgttacatgaaagttatgtggtgtttggaaggatgcctttttctttgttttttagcaaaggagtcttttaaatcatttgtatacaaaaggaattaggatccaaatgctgttattgatacaggtttgatgcttcaaatgtggcttttccctcccttaggggtatagaacaggctatgcttacaggcatcctctcattcgagagaagcctaggcacaagagtgatgtggaaatcccagcaactgtgactgctttttcctttgaagacgatacagtgccactctctcctctcaaatacatggcacagaggcaacagcgtgaaaaaacaagatggctgaactcaccaaatacttacatgaaagtgaatgtgcctgaggagtctcggaacggagaaaccagtccccgaaccaaaatcacgtggatgaaagcagaagactcatctaaagttagtggtggaacacctatcaaaattgaagatccaaatcagtttgttcctttaaacacaaacccgaatgaggtactagaaaagagaaataagattcgggaacaaaatcgatatgacttgaaaacagcaggaccacaatctcagttgcttgctggaattgttgtggataagccaccttctactatgcaatttgaagatgatgatcatggcccaccagctcctcctaacccatttagtcatctcacagaaggagaacttgaagagtataagaggacaatcgaacgtaaacaacaaggcctagaagaaaaccatgagctgttttccaagagcttcatctccatggaagtgcctgtcatggtagtaaatggcaaggatgatatgcatgatgttgaagatgagcttgctaagcgagtgagtaggttaagcacaagtacaaccatagaaaacatcgagattactattaagtctccagagaaaatcgaagaagtcctgtcacctgaaggctccccttcaaaatcgccatccaagaaaaagaagaaattccgcactccttcttttctgaaaaagaacaaaaaaaaggagaaagttgaggcctaaataaagtctttttataattattattataacaatgtgacattgcacatctaaataccacatttaagttgatcattaatatgcaatggtagatcagattgggggatgtagcaaactggactttaagaactggaaagaggttttacaaaagaaaaactttcagattcatctctcattttatatgtccagaaatggctttgaattttaagcaattactagttttaattagctctgccctcatgaagtattattataattcaccataaacagctatctgtctgaattacttcaggccttctccataatatctgttagaaagaaattgccagtgagcaagtgagaatttttatttctcaatacctgcttcacttgataatcatattataattttttatcatgattattgactatatttttggagtcccattgtttcagtgggcattaacagaatgctttaaaaacttctaagacaagaatctatagcattagtatacactggcacataattttttaaaaagttttaagaaaagattcatttggaattttattcacagtataaaatttcctcacctgaagtaactttgtttgccaaaaaagttgttttaataaactataatttttgaaaacttccttttttattagtttagaaagccccttatttttcaacaaaggggattttgtacacataacatgggttatttagtttaactctggcaaaaaaaaaaaaaaaattttgtatgttgatgtttgtataccgttcagtataaaagtgtcctaagcatattagccaatcttttcacagtagagcatacttaaggctgcttggtactgagtatacttaaatataactccagaatccagggacttggtgttaaaacaggattagagcatgtaaaggtacatctagattcatatttgaatcttaaactgtatttttctcttagtattgctaatgagtaaagaaaagtctcataaggtagccaaatgaaaaagaatgaaagggaaagtgaaaaattaaggggacaaaagatgggatgtgaaaagaagaattctagtttgatggtgactcatattcacgataggatacaaagtgtgatttgttggaaacatgtcccaaatttctaaaattctgcttctctgccaaaagcaatgtctttcttggttgatatttgagttttaaaagggtcaaatctttctaattttttgtatctttagagggcagcactagaagaaatcagcaggtctaatcccaccagtaagaaaactaccacttcttgatttttacagatttaaaaaaatcttttcagtgacctttctttttaatgtaaatacaaatttaaacctaggcttaatataggcgtttcccctttcacccaagtgatgtcacagttcgatgcaaaatcaatgatccagaatgatcgtgggtaaaaataactcaaagtgtttcttaagggtgagttggcatgcaaaaaattacattgattacagtgtgttttggagctggctctgtttgtgtgcatatgataatgcagagttgagccagagcctggaaatgtcattctagatctcactaactactggaatcagtgttttaatctcttggtggaaactttcagttgcttaactctctattggaagatttttttaatgttctacatcatttatgttgtattacaatgtatgtagaaatagtaacctgtgaactatgcttttccataactttttaaaaatatatatatctaaatgaatgcaatgtgcataaatattttttaaacataacagtgaactattgcaccttttgctaatgcctctatttacttgctttggcataaagaatgagccaatgaacctctgtgtcctgtggaaaaatgtataaatgttatctgatattgctcttagatgtaatgctaattaatgttaaatcacaaataaacagtattttaaatata

SEQ ID NO: 365361 - DNA, 2363 bp, Homo sapiens
agcgtagtcccgccagagcgcgagccgccagcccgtaacggtcgccagtgtgaggggcgggagggaaagaagaggggtttaaattagattttttaaaacacagagcaagcgccagaggcgtcggcatcccaggtgtcgccgcttcctgctgcacagggctcggcgtacaggtccctccctcctcaagccccctccccttctcccgccctaccctctggggctctgcggcgcttaagaggcggccgcagcggcggatccggcggctgctgcagcccgggcggctgccgagaaggagggaggggaaacacaaagccggctacgcgctgcgagataacaagagtaatccacagacttaaaacatgagctcagatgccagccaaggcgtgattaccactcctcctcctcccagcatgcctcacaaagagagatattttgaccgcatcaatgaaaatgacccagaatacattagggagaggaacatgtctcctgatctacgacaagacttcaacatgatggagcagaggaaacgagttactcagatcctgcaaagtcctgcctttcgggaagacttggaatgccttattcaagaacagatgaagaaaggccacaacccaactggattactagcattacagcagattgcagattacatcatggccaattctttctcgggtttttcttcacctcctctcagtcttggcatggtcacacctatcaatgaccttcctggtgcagatacatcctcatatgtgaagggagaaaaacttactcgctgtaaacttgccagcctgtacagacttgtagacttgtttggatgggcacacctggcaaatacctatatctcagtaagaataagtaaggagcaagaccacattataataattcccagaggcctatctttttctgaagctacagcctccaatttggtgaaagtcaatataataggagaagtggttgaccagggaagtaccaatttgaaaattgaccatacaggattcagtccccatgctgcaatctattcaacacgtcctgatgttaagtgtgtgatacacatccatacccttgcaacagcagctgtatcctccatgaaatgtgggatccttccaatttctcaagagtctcttcttctgggagatgttgcctattatgactaccaagggtcacttgaagaacaggaggagagaattcaactgcagaaggttctgggaccaagttgtaaggtgctggtactcaggaatcatggtgtggttgcacttggagaaacattagaggaggcttttcattatatttttaatgtgcaactagcctgtgagattcaggtgcaggccctagcaggtgcaggtggagtagacaatctccatgtactggactttcagaagtataaagctttcacttacactgtagcagcgtctggtggaggaggtgtgaatatgggttcccatcaaaaatggaaggttggcgaaattgagtttgaagggcttatgaggactctggacaacttggggtatagaacaggctatgcttacaggcatcctctcattcgagagaagcctaggcacaagagtgatgtggaaatcccagcaactgtgactgctttttcctttgaagacgatacagtgccactctctcctctcaaatacatggcacagaggcaacagcgtgaaaaaacaagatggctgaactcaccaaatacttacatgaaagtgaatgtgcctgaggagtctcggaacggagaaaccagtccccgaaccaaaatcacgtggatgaaagcagaagactcatctaaagttagtggtggaacacctatcaaaattgaagatccaaatcagtttgttcctttaaacacaaacccgaatgaggtactagaaaagagaaataagattcgggaacaaaatcgatatgacttgaaaacagcaggaccacaatctcagttgcttgctggaattgttgtggataagccaccttctactatgcaatttgaagatgatgatcatggcccaccagctcctcctaacccatttagtcatctcacagaaggagaacttgaagagtataagaggacaatcgaacgtaaacaacaaggcctagaagaaaaccatgagctgttttccaagagcttcatctccatggaagtgcctgtcatggtagtaaatggcaaggatgatatgcatgatgttgaagatgagcttgctaagcgagtgagtaggttaagcacaagtacaaccatagaaaacatcgagattactattaaccctgtcatggtagtaaatggcaaggatgatatgcatgatgttgaagatgagcttgctaagcgagtgagtaggttaagcacaagtacaaccatagtaatctcgatgttttct

SEQ ID NO: 365362 - DNA, 2035 bp, Homo sapiens
agcgtagtcccgccagagcgcgagccgccagcccgtaacggtcgccagtgtgaggggcgggagggaaagaagaggggtttaaattagattttttaaaacacagagcaagcgccagaggcgtcggcatcccaggtgtcgccgcttcctgctgcacagggctcggcgtacaggtccctccctcctcaagccccctccccttctcccgccctaccctctggggctctgcggcgcttaagaggcggccgcagcggcggatccggcggctgctgcagcccgggcggctgccgagaaggagggaggggaaacacaaagccggctacgcgctgcgagataacaagagtaatccacagacttaaaacatgagctcagatgccagccaaggcgtgattaccactcctcctcctcccagcatgcctcacaaagagagatattttgaccgcatcaatgaaaatgacccagaatacattagggagaggaacatgtctcctgatctacgacaagacttcaacatgatggagcagaggaaacgagttactcagatcctgcaaagtcctgcctttcgggaagacttggaatgccttattcaagaacagatgaagaaaggccacaacccaactggattactagcattacagcagattgcagattacatcatggccaattctttctcgggtttttcttcacctcctctcagtcttggcatggtcacacctatcaatgaccttcctggtgcagatacatcctcatatgtgaagggagaaaaacttactcgctgtaaacttgccagcctgtacagacttgtagacttgtttggatgggcacacctggcaaatacctatatctcagtaagaataagtaaggagcaagaccacattataataattcccagaggcctatctttttctgaagctacagcctccaatttggtgaaagtcaatataataggagaagtggttgaccagggaagtaccaatttgaaaattgaccatacaggattcagtccccatgctgcaatctattcaacacgtcctgatgttaagtgtgtgatacacatccatacccttgcaacagcagctgtatcctccatgaaatgtgggatccttccaatttctcaagagtctcttcttctgggagatgttgcctattatgactaccaagggtcacttgaagaacaggaggagagaattcaactgcagaaggttctgggaccaagttgtaaggtgctggtactcaggaatcatggtgtggttgcacttggagaaacattagaggaggcttttcattatatttttaatgtgcaactagcctgtgagattcaggtgcaggccctagcaggtgcaggtggagtagacaatctccatgtactggactttcagaagtataaagctttcacttacactgtagcagcgtctggtggaggaggtgtgaatatgggttcccatcaaaaatggaaggttggcgaaattgagtttgaagggcttatgaggactctggacaacttggtaggttgcaaaattgaagtaaaacttggatttaatgtcttcagattcaagagcagatgcttccatttttgtagaacatgctccatactcttccagaagctgagtttggccctaggaaagcatttcattgttatttaaccacacctttgagaattaaacagaacttacaaatgtcgtgttttttttttaagattacaatatatgttattaactgtagtcaccatagtacaatatatctcttgaactttttcctcctaactgaaattttgtatcctttgatcaacatctccccacccccacctccttgtaaccactattctactctacttttatgagttcaacttttttttttttcttggaggcaggatcttgcttggagtgccgtgacacaatcagggctcacttgcagtctcaacctgctgggctcaaaccattcttccacctcagcctcctgtgtatctgggacataacgtgtgtgccaccgtgcctggctaatttatttttttttttttactttttgtagagatagggtt

SEQ ID NO: 365363 - DNA, 1445 bp, Homo sapiens
agcgtagtcccgccagagcgcgagccgccagcccgtaacggtcgccagtgtgaggggcgggagggaaagaagaggggtttaaattagattttttaaaacacagagcaagcgccagaggcgtcggcatcccaggtgtcgccgcttcctgctgcacagggctcggcgtacaggtccctccctcctcaagccccctccccttctcccgccctaccctctggggctctgcggcgcttaagaggcggccgcagcggcggatccggcggctgctgcagcccgggcggctgccgagaaggagggaggggaaacacaaagccggctacgcgctgcgagataacaagagtaatccacagacttaaaacatgagctcagatgccagccaaggcgtgattaccactcctcctcctcccagcatgcctcacaaagagagatattttgaccgcatcaatgaaaatgacccagaatacattagggagaggaacatgtctcctgatctacgacaagacttcaacatgatggagcagaggaaacgagttactcagatcctgcaaagtcctgcctttcgggaagacttggaatgccttattcaagaacagatgaagaaaggccacaacccaactggattactagcattacagcagattgcagattacatcatggccaattctttctcgggtttttcttcacctcctctcagtcttggcatggtcacacctatcaatgaccttcctggtgcagatacatcctcatatgtgaagggagaaaaacttactcgctgtaaacttgccagcctgtacagacttgtagacttgtttggatgggcacacctggcaaatacctatatctcagtaagaataagtaaggagcaagaccacattataataattcccagaggcctatctttttctgaagctacagcctccaatttggtgaaagtcaatataataggagaagtggttgaccagggaagtaccaatttgaaaattgaccatacaggattcagtccccatgctgcaatctattcaacacgtcctgatgttaagtgtgtgatacacatccatacccttgcaacagcagctgtatcctccatgaaatgtgggatccttccaatttctcaagagtctcttcttctgggagatgttgcctattatgactaccaagggtcacttgaagaacaggaggagagaattcaactgcagaaggttctgggaccaagttgtaaggtgctggtactcaggaatcatggtgtggttgcacttggagaaacattagaggaggcttttcattatatttttaatgtgcaactagcctgtgagattcaggtaggaaacattattccccttttttaattgctttgttatttgctcgtttagttggattttgtgtacttatttgcaaatacatattagttagtggctttttgtcttttaagagaagttctgctctac

SEQ ID NO: 365364 - DNA, 3798 bp, Homo sapiens
agctgctgcacatagcgacccagtccgttgtggagaacgctggccaagaagcggctcggagtcccgcgcgccgtcatagctacagcttggaggccgcggagcctaagcagcgaggagaggggggcgggactaaacctcgaggcttccggttccgggacgaccgctcccggagttttgcttccgaggtcaaggcgagtagcatgtgcgggagactcacgttgccggcgaagtgggagagagaaaagtggtaacctggggctgggggccggcgcggcggagctcggagtagtagagcggagtgaagacacgggggaggatagagactggcattcctttgggccgggggattggcgggagtcgtgctgggtgctctcgccgtgttgaggtcccagtgaggggaaggagaagcggaagagggtctctagtcggggcctagggcaaagggactacaaaaaggatgcagatgactatagaaatgaggacgacgaggagatgctgtggaggagcagtagaggtgagaagatgatgcaaagaaactgtgtcagtgaggaactgtatagagggtcatagaggtgaggtggcggagagaaactaactaacggaccatagaggtgggggagccattgtagaaggacgtggacgcgaaagggtcgtgtagatgggcatatgtgtgaagcagcaacgtagaggggctgaagaggagaaattcatggagagaaagaatgcacctagagtgagctctgcagagtgctgcgtgggatatccctagagtttggtctagtgaaggcacgctaaccaggcacctaaggcatttcaagtagtgacttcccacatttggctaggaatgtgggtcctcctccgaagtgggtaccccctccgtatcttgttacccctgcgtggggagtggatgggtcggaggggcctgccccgaaacttggccccaggccctcctcgcagacgttacaggaaggagactctccaagccttggatatgccagtgttgcctgtaactgcaactgaaatccgccagtatttgcgggggcatgggatccccttccaggatggtcacagttgcctgcgggcactgagcccctttgcagagtcttcacagctcaaaggccagactggtgttaccacttccttcagcctcttcattgacaagaccacaggccactttctctgcatgaccagcctagcagaagggagctgggaagacttccaggccagcgtggaggggcgaggggatggggccagggaggggtttctgcttagcaaggcaccagaatttgaggacagcgaggaggtccggaggatctggaaccgagcaatacctctctgggagctgcctgatcaggaggaggttcagctggctgatacaatgtttggccttaccaaggttacagatgacacactcaagcgtttcagtgtgcgatatctgcgacctgctcgcagtcttgtcttcccttggttctcccctgggggctcaggattacgaggcctgaagctcctagaggctaaatgccagggggatggagtgagctacgaggaaaccactattccccgacccagcgcctaccacaatctgtttggattaccactgattagtcgtcgagatgctgaggtggtactgacgagtcgtgagcttgacagcctggccttgaaccagtccacggggctgcctacccttactctaccccgaggaacgacctgcttaccccctgccttactcccttacctggaacagttccggcggattgtattctggttgggggatgaccttcggtcctgggaagccgccaagttgtttgcacgaaaactgaaccccaaacgatgcttcttggtgcgaccaggagaccagcaaccccgtcccctggaggccctgaacggaggcttcaatctttctcgtattcttcgtaccgccctgcctgcctggcacaagtccatcgtatctttccggcagcttcgggaggaggtgctaggagaactgtcaaatgtggagcaagcagctggcctccgctggagccgctttccagacctcaatcgtatcttgaagggacatcgaaagggcgagctgacggtcttcacagggccaacaggcagtggaaagacgacattcatcagtgagtatgccctggatttgtgttcccagggggtgaacacactgtggggtagcttcgagatcagcaatgtgagactagcccgggtcatgctgacacagtttgccgaggggcggctggaagatcaactggacaaatatgatcactgggctgaccgctttgaggacctgcccctctatttcatgactttccatggacagcaaagcatcaggactgtaatagatacaatgcaacatgcagtctacgtctatgacatttgtcatgtgatcatcgacaacctgcagttcatgatgggtcacgagcagctgtccacagacaggatcgcagctcaagactacatcatcggggtctttcggaagtttgcaacagacaataactgccatgtgacactggtcattcacccccggaaagaggatgatgacaaggaactgcagacagcgtccatttttggctcagccaaagcaagccaggaagcagacaatgttctgatcctgcaggacaggaagctggtaaccgggccagggaaacggtatctgcaggtgtccaagaaccgctttgatggagatgtaggtgtcttcccgcttgagttcaacaagaactccctcaccttctccattccaccaaagaacaaggcccggctcaagaagatcaaggatgacactggaccagtggccaaaaagccctcttctggcaaaaagggggctacgacacagaactctgagatttgctcaggccaggcccccactcccgaccagccagacacctccaagcgttcaaagtgaaggccgtgcagagctggtcactgaaatgagcctgataggataggctggagcataaaactctgcaagggctcctctatcctgtggtcctgagctgtgtgcccttctcagtctgaggggcctaacctagagcaggtttccatagtgagaaaattcaatgtagcagactactgagaaactactgtgttgctcaggctttgtttgaggtcctgtatatacagcactgaaaagagagataaagtccctgcctgcatgcattctggcggaagagacaagcaagcaatgaacaaattagcagaaaacctagttttagtgaaaaatgctgtaaagaaaatagaaatgcgatagagtgctggcaggctagtgtagataagtggtctgaaaaggtgtctctgagccgagggcatgtgagctggggcctaaacaactagaaggagagagccacgtgaacatccggcgaaggggacccaggcagagagaaaaggaaatccaagccctgaggtaggaatgagcaggtcagattcaaggcagtgaggtcaggccgcatgaacctggaggggaatcggggacttcatgcgaaactccagcctaggctttcaaagtcaaagggtgatacagtgggtaccaagctcctctgctccccactttgtagagcctagcatgaggtggcatgtactagaattggatcctaggtgcttagccctgcaatatcagggcctcactggtgggagctgcctcgggctgggttgcttggtcatagagccatagaaggaagctgtcagcccggagtgcctgccacctagacactgatgccattgtgtgctgcctcaagactgctggagtcaggacattttatagagccttttccagttttactaaaaaatttttccattgcaaaaaaa

SEQ ID NO: 365365 - DNA, 4123 bp, Homo sapiens
agctgctgcacatagcgacccagtccgttgtggagaacgctggccaagaagcggctcggagtcccgcgcgccgtcatagctacagcttggaggccgcggagcctaagcagcgaggagaggggggcgggactaaacctcgaggcttccggttccgggacgaccgctcccggagttttgcttccgaggtcaaggcgagtagcatgtgcgggagactcacgttgccggcgaagtgggagagagaaaagtggtaacctggggctgggggccggcgcggcggagctcggagtagtagagcggagtgaagacacgggggaggatagagactggcattcctttgggccgggggattggcgggagtcgtgctgggtgctctcgccgtgttgaggtcccagtgaggggaaggagaagcggaagagggtctctagtcggggcctagggcaaagggactacaaaaaggatgcagatgactatagaaatgaggacgacgaggagatgctgtggaggagcagtagaggtgagaagatgatgcaaagaaactgtgtcagtgaggaactgtatagagggtcatagaggtgaggtggcggagagaaactaactaacggaccatagaggtgggggagccattgtagaaggacgtggacgcgaaagggtcgtgtagatgggcatatgtgtgaagcagcaacgtagaggggctgaagaggagaaattcatggagagaaagaatgcacctagagtgagctctgcagagtgctgcgtgggatatccctagagtttggtctagtgaaggcacgctaaccaggcacctaaggcatttcaagtagtgacttcccacatttggctaggaatgtgggtcctcctccgaagtgggtaccccctccgtatcttgttacccctgcgtggggagtggatgggtcggaggggcctgccccgaaacttggccccaggccctcctcgcagacgttacaggaaggagactctccaagccttggatatgccagtgttgcctgtaactgcaactgaaatccgccagtatttgcgggggcatgggatccccttccaggatggtcacagttgcctgcgggcactgagcccctttgcagagtcttcacagctcaaaggccagactggtgttaccacttccttcagcctcttcattgacaagaccacaggccactttctctgcatgaccagcctagcagaagggagctgggaagacttccaggccagcgtggaggggcgaggggatggggccagggaggggtttctgcttagcaaggcaccagaatttgaggacagcgaggaggtccggaggatctggaaccgagcaatacctctctgggagctgcctgatcaggaggaggttcagctggctgatacaatgtttggccttaccaaggttacagatgacacactcaagcgtttcagtgtgcgatatctgcgacctgctcgcagtcttgtcttcccttggttctcccctgggggctcaggattacgaggcctgaagctcctagaggctaaatgccagggggatggagtgagctacgaggaaaccactattccccgacccagcgcctaccacaatctgtttggattaccactgattagtcgtcgagatgctgaggtggtactgacgagtcgtgagcttgacagcctggccttgaaccagtccacggggctgcctacccttactctaccccgaggaacgacctgcttaccccctgccttactcccttacctggaacagttccggcggattgtattctggttgggggatgaccttcggtcctgggaagccgccaagttgtttgcacgaaaactgaaccccaaacgatgcttcttggtgcgaccaggagaccagcaaccccgtcccctggaggccctgaacggaggcttcaatctttctcgtattcttcgtaccgccctgcctgcctggcacaagtccatcgtatctttccggcagcttcgggaggaggtgctaggagaactgtcaaatgtggagcaagcagctggcctccgctggagccgctttccagacctcaatcgtatcttgaagggacatcgaaagggcgagctgacggtcttcacagggccaacaggcagtggaaagacgacattcatcagtgagtatgccctggatttgtgttcccagggggtgaacacactgtggggtagcttcgagatcagcaatgtgagactagcccgggtcatgctgacacagtttgccgaggggcggctggaagatcaactggacaaatatgatcactgggctgaccgctttgaggacctgcccctctatttcatgactttccatggacagcaaagcatcaggactgtaatagatacaatgcaacatgcagtctacgtctatgacatttgtcatgtgatcatcgacaacctgcagttcatgatgggtcacgagcagctgtccacagacaggtgacggtgacatcctctcttgtctagcttgagcccgcttggacatacaacacacacttctcaggcagctggcctctaggcacacatgctgtgctctcctattttctgagatgtgtgcaggcacgtaccacccccatgtgtatcatatggaggtgtggggtatggcagcaggatgtatggacagggatctgagtgtgagtccttgggtagagggaggtagagtgggttgtggtagtttgtggggagatgtgaatggatcaagagtatgtgtatgttcttgtccttctgtgtctgataagctctttgtgttgttgggatggcgtaggatcgcagctcaagactacatcatcggggtctttcggaagtttgcaacagacaataactgccatgtgacactggtcattcacccccggaaagaggatgatgacaaggaactgcagacagcgtccatttttggctcagccaaagcaagccaggaagcagacaatgttctgatcctgcaggacaggaagctggtaaccgggccagggaaacggtatctgcaggtgtccaagaaccgctttgatggagatgtaggtgtcttcccgcttgagttcaacaagaactccctcaccttctccattccaccaaagaacaaggcccggctcaagaagatcaaggatgacactggaccagtggccaaaaagccctcttctggcaaaaagggggctacgacacagaactctgagatttgctcaggccaggcccccactcccgaccagccagacacctccaagcgttcaaagtgaaggccgtgcagagctggtcactgaaatgagcctgataggataggctggagcataaaactctgcaagggctcctctatcctgtggtcctgagctgtgtgcccttctcagtctgaggggcctaacctagagcaggtttccatagtgagaaaattcaatgtagcagactactgagaaactactgtgttgctcaggctttgtttgaggtcctgtatatacagcactgaaaagagagataaagtccctgcctgcatgcattctggcggaagagacaagcaagcaatgaacaaattagcagaaaacctagttttagtgaaaaatgctgtaaagaaaatagaaatgcgatagagtgctggcaggctagtgtagataagtggtctgaaaaggtgtctctgagccgagggcatgtgagctggggcctaaacaactagaaggagagagccacgtgaacatccggcgaaggggacccaggcagagagaaaaggaaatccaagccctgaggtaggaatgagcaggtcagattcaaggcagtgaggtcaggccgcatgaacctggaggggaatcggggacttcatgcgaaactccagcctaggctttcaaagtcaaagggtgatacagtgggtaccaagctcctctgctccccactttgtagagcctagcatgaggtggcatgtactagaattggatcctaggtgcttagccctgcaatatcagggcctcactggtgggagctgcctcgggctgggttgcttggtcatagagccatagaaggaagctgtcagcccggagtgcctgccacctagacactgatgccattgtgtgctgcctcaagactgctggagtcaggacattttatagagccttttccagttttactaaaaaatttttccattgcaaaaaaa

SEQ ID NO: 365366 - DNA, 1958 bp, Homo sapiens
agctgctgcacatagcgacccagtccgttgtggagaacgctggccaagaagcggctcggagtcccgcgcgccgtcatagctacagcttggaggccgcggagcctaagcagcgaggagaggggggcgggactaaacctcgaggcttccggttccgggacgaccgctcccggagttttgcttccgaggtcaaggcgagtagcatgtgcgggagactcacgttgccggcgaagtgggagagagaaaagtgggccaacaggcagtggaaagacgacattcatcagtgagtatgccctggatttgtgttcccagggggtgaacacactgtggggtagcttcgagatcagcaatgtgagactagcccgggtcatgctgacacagtttgccgaggggcggctggaagatcaactggacaaatatgatcactgggctgaccgctttgaggacctgcccctctatttcatgactttccatggacagcaaagcatcaggactgtaatagatacaatgcaacatgcagtctacgtctatgacatttgtcatgtgatcatcgacaacctgcagttcatgatgggtcacgagcagctgtccacagacaggatcgcagctcaagactacatcatcggggtctttcggaagtttgcaacagacaataactgccatgtgacactggtcattcacccccggaaagaggatgatgacaaggaactgcagacagcgtccatttttggctcagccaaagcaagccaggaagcagacaatgttctgatcctgcaggacaggaagctggtaaccgggccagggaaacggtatctgcaggtgtccaagaaccgctttgatggagatgtaggtgtcttcccgcttgagttcaacaagaactccctcaccttctccattccaccaaagaacaaggcccggctcaagaagatcaaggatgacactggaccagtggccaaaaagccctcttctggcaaaaagggggctacgacacagaactctgagatttgctcaggccaggcccccactcccgaccagccagacacctccaagcgttcaaagtgaaggccgtgcagagctggtcactgaaatgagcctgataggataggctggagcataaaactctgcaagggctcctctatcctgtggtcctgagctgtgtgcccttctcagtctgaggggcctaacctagagcaggtttccatagtgagaaaattcaatgtagcagactactgagaaactactgtgttgctcaggctttgtttgaggtcctgtatatacagcactgaaaagagagataaagtccctgcctgcatgcattctggcggaagagacaagcaagcaatgaacaaattagcagaaaacctagttttagtgaaaaatgctgtaaagaaaatagaaatgcgatagagtgctggcaggctagtgtagataagtggtctgaaaaggtgtctctgagccgagggcatgtgagctggggcctaaacaactagaaggagagagccacgtgaacatccggcgaaggggacccaggcagagagaaaaggaaatccaagccctgaggtaggaatgagcaggtcagattcaaggcagtgaggtcaggccgcatgaacctggaggggaatcggggacttcatgcgaaactccagcctaggctttcaaagtcaaagggtgatacagtgggtaccaagctcctctgctccccactttgtagagcctagcatgaggtggcatgtactagaattggatcctaggtgcttagccctgcaatatcagggcctcactggtgggagctgcctcgggctgggttgcttggtcatagagccatagaaggaagctgtcagcccggagtgcctgccacctagacactgatgccattgtgtgctgcctcaagactgctggagtcaggacattttatagagccttttccagttttactaaaaaatttttccattgcaaaaaaa

SEQ ID NO: 365367 - DNA, 2764 bp, Homo sapiens
agctgctgcacatagcgacccagtccgttgtggagaacgctggccaagaagcggctcggagtcccgcgcgccgtcatagctacagcttggaggccgcggagcctaagcagcgaggagaggggggcgggactaaacctcgaggcttccggttccgggacgaccgctcccggagttttgcttccgaggtcaaggcgagtagcatgtgcgggagactcacgttgccggcgaagtgggagagagaaaagtggtaacctggggctgggggccggcgcggcggagctcggagtagtagagcggagtgaagacacgggggaggatagagactggcattcctttgggccgggggattggcgggagtcgtgctgggtgctctcgccgtgttgaggtcccagtgaggggaaggagaagcggaagagggtctctagtcggggcctagggcaaagggactacaaaaaggatgcagatgactatagaaatgaggacgacgaggagatgctgtggaggagcagtagaggtgagaagatgatgcaaagaaactgtgtcagtgaggaactgtatagagggtcatagaggtgaggtggcggagagaaactaactaacggaccatagaggtgggggagccattgtagaaggacgtggacgcgaaagggtcgtgtagatgggcatatgtgtgaagcagcaacgtagaggggctgaagaggagaaattcatggagagaaagaatgcacctagagtgagctctgcagagtgctgcgtgggatatccctagagtttggtctagtgaaggcacgctaaccaggcacctaaggcatttcaagtagtgacttcccacatttggctaggaatgtgggtcctcctccgaagtgggtaccccctccgtatcttgttacccctgcgtggggagtggatgggtcggaggggcctgccccgaaacttggccccaggccctcctcgcagacgttacaggaaggagactctccaagccttggatatgccagtgttgcctgtaactgcaactgaaatccgccagtatttgcgggggcatgggatccccttccaggatggtcacagttgcctgcgggcactgagcccctttgcagagtcttcacagctcaaaggccagactggtgttaccacttccttcagcctcttcattgacaagaccacaggccactttctctgcatgaccagcctagcagaagggagctgggaagacttccaggccagcgtggaggggcgaggggatggggccagggaggggtttctgcttagcaaggcaccagaatttgaggacagcgaggaggtccggaggatctggaaccgagcaatacctctctgggagctgcctgatcaggaggaggttcagctggctgatacaatgtttggccttaccaaggttacagatgacacactcaagcgtttcagtgtgcgatatctgcgacctgctcgcagtcttgtcttcccttggttctcccctgggggctcaggattacgaggcctgaagctcctagaggctaaatgccagggggatggagtgagctacgaggaaaccactattccccgacccagcgcctaccacaatctgtttggattaccactgattagtcgtcgagatgctgaggtggtactgacgagtcgtgagcttgacagcctggccttgaaccagtccacggggctgcctacccttactctaccccgaggaacgacctgcttaccccctgccttactcccttacctggaacagttccggcggattgtattctggttgggggatgaccttcggtcctgggaagccgccaagttgtttgcacgaaaactgaaccccaaacgatgcttcttggtgcgaccaggagaccagcaaccccgtcccctggaggccctgaacggaggcttcaatctttctcgtattcttcgtaccgccctgcctgcctggcacaagtccatcgtatctttccggcagcttcgggaggaggtgctaggagaactgtcaaatgtggagcaagcagctggcctccgctggagccgctttccagacctcaatcgtatcttgaagggacatcgaaagggcgagctgacggtcttcacagggccaacaggcagtggaaagacgacattcatcagtgagtatgccctggatttgtgttcccagggggtgaacacactgtggggtagcttcgagatcagcaatgtgagactagcccgggtcatgctgacacagtttgccgaggggcggctggaagatcaactggacaaatatgatcactgggctgaccgctttgaggacctgcccctctatttcatgactttccatggacagcaaagcatcaggactgtaatagatacaatgcaacatgcagtctacgtctatgacatttgtcatgtgatcatcgacaacctgcagttcatgatgggtcacgagcagctgtccacagacaggatcgcagctcaagactacatcatcggggtctttcggaagtttgcaacagacaataactgccatgtgacactggtcattcacccccggaaagaggatgatgacaaggaactgcagacagcgtccatttttggctcagccaaagtgagtggcctttagcggagctcaagctttggaaaatagagtgggtaggtgtgaccagggacagccctcattcagccttaatcgtcttgactgtccatccgaacaggcaggaggcaatgcctctggggccatgacatgaggaatatatgtgctggaaatacaaaggctgatagttggttcttatgc

SEQ ID NO: 365368 - DNA, 2002 bp, Homo sapiens
agctgctgcacatagcgacccagtccgttgtggagaacgctggccaagaagcggctcggagtcccgcgcgccgtcatagctacagcttggaggccgcggagcctaagcagcgaggagaggggggcgggactaaacctcgaggcttccggttccgggacgaccgctcccggagttttgcttccgaggtcaaggcgagtagcatgtgcgggagactcacgttgccggcgaagtgggagagagaaaagtgggccaacaggcagtggaaagacgacattcatcagtgagtatgccctggatttgtgttcccagggggtgaacacactgtggggtagcttcgagatcagcaatgtgagactagcccgggtcatgctgacacagtttgccgaggggcggctggaagatcaactggacaaatatgatcactgggctgaccgctttgaggacctgcccctctatttcatgactttccatggacagcaaagcatcaggactgtaatagatacaatgcaacatgcagtctacgtctatgacatttgtcatgtgatcatcgacaacctgcagttcatgatgggtcacgagcagctgtccacagacaggatcgcagctcaagactacatcatcggggtctttcggaagtttgcaacagacaataactgccatgtgacactggtcattcacccccggaaagaggatgatgacaaggaactgcagacagcgtccatttttggctcagccaaagtgagtggcctttagcggagctcaagctttggaaaatagagtgggcaagccaggaagcagacaatgttctgatcctgcaggacaggaagctggtaaccgggccagggaaacggtatctgcaggtgtccaagaaccgctttgatggagatgtaggtgtcttcccgcttgagttcaacaagaactccctcaccttctccattccaccaaagaacaaggcccggctcaagaagatcaaggatgacactggaccagtggccaaaaagccctcttctggcaaaaagggggctacgacacagaactctgagatttgctcaggccaggcccccactcccgaccagccagacacctccaagcgttcaaagtgaaggccgtgcagagctggtcactgaaatgagcctgataggataggctggagcataaaactctgcaagggctcctctatcctgtggtcctgagctgtgtgcccttctcagtctgaggggcctaacctagagcaggtttccatagtgagaaaattcaatgtagcagactactgagaaactactgtgttgctcaggctttgtttgaggtcctgtatatacagcactgaaaagagagataaagtccctgcctgcatgcattctggcggaagagacaagcaagcaatgaacaaattagcagaaaacctagttttagtgaaaaatgctgtaaagaaaatagaaatgcgatagagtgctggcaggctagtgtagataagtggtctgaaaaggtgtctctgagccgagggcatgtgagctggggcctaaacaactagaaggagagagccacgtgaacatccggcgaaggggacccaggcagagagaaaaggaaatccaagccctgaggtaggaatgagcaggtcagattcaaggcagtgaggtcaggccgcatgaacctggaggggaatcggggacttcatgcgaaactccagcctaggctttcaaagtcaaagggtgatacagtgggtaccaagctcctctgctccccactttgtagagcctagcatgaggtggcatgtactagaattggatcctaggtgcttagccctgcaatatcagggcctcactggtgggagctgcctcgggctgggttgcttggtcatagagccatagaaggaagctgtcagcccggagtgcctgccacctagacactgatgccattgtgtgctgcctcaagactgctggagtcaggacattttatagagccttttccagttttactaaaaaatttttccattgcaaaaaaa

SEQ ID NO: 365369 - DNA, 1884 bp, Homo sapiens
agctgctgcacatagcgacccagtccgttgtggagaacgctggccaagaagcggctcggagtcccgcgcgccgtcatagctacagcttggaggccgcggagcctaagcagcgaggagaggggggcgggactaaacctcgaggcttccggttccgggacgaccgctcccggagttttgcttccgaggtcaagggggtgaacacactgtggggtagcttcgagatcagcaatgtgagactagcccgggtcatgctgacacagtttgccgaggggcggctggaagatcaactggacaaatatgatcactgggctgaccgctttgaggacctgcccctctatttcatgactttccatggacagcaaagcatcaggactgtaatagatacaatgcaacatgcagtctacgtctatgacatttgtcatgtgatcatcgacaacctgcagttcatgatgggtcacgagcagctgtccacagacaggatcgcagctcaagactacatcatcggggtctttcggaagtttgcaacagacaataactgccatgtgacactggtcattcacccccggaaagaggatgatgacaaggaactgcagacagcgtccatttttggctcagccaaagtgagtggcctttagcggagctcaagctttggaaaatagagtgggcaagccaggaagcagacaatgttctgatcctgcaggacaggaagctggtaaccgggccagggaaacggtatctgcaggtgtccaagaaccgctttgatggagatgtaggtgtcttcccgcttgagttcaacaagaactccctcaccttctccattccaccaaagaacaaggcccggctcaagaagatcaaggatgacactggaccagtggccaaaaagccctcttctggcaaaaagggggctacgacacagaactctgagatttgctcaggccaggcccccactcccgaccagccagacacctccaagcgttcaaagtgaaggccgtgcagagctggtcactgaaatgagcctgataggataggctggagcataaaactctgcaagggctcctctatcctgtggtcctgagctgtgtgcccttctcagtctgaggggcctaacctagagcaggtttccatagtgagaaaattcaatgtagcagactactgagaaactactgtgttgctcaggctttgtttgaggtcctgtatatacagcactgaaaagagagataaagtccctgcctgcatgcattctggcggaagagacaagcaagcaatgaacaaattagcagaaaacctagttttagtgaaaaatgctgtaaagaaaatagaaatgcgatagagtgctggcaggctagtgtagataagtggtctgaaaaggtgtctctgagccgagggcatgtgagctggggcctaaacaactagaaggagagagccacgtgaacatccggcgaaggggacccaggcagagagaaaaggaaatccaagccctgaggtaggaatgagcaggtcagattcaaggcagtgaggtcaggccgcatgaacctggaggggaatcggggacttcatgcgaaactccagcctaggctttcaaagtcaaagggtgatacagtgggtaccaagctcctctgctccccactttgtagagcctagcatgaggtggcatgtactagaattggatcctaggtgcttagccctgcaatatcagggcctcactggtgggagctgcctcgggctgggttgcttggtcatagagccatagaaggaagctgtcagcccggagtgcctgccacctagacactgatgccattgtgtgctgcctcaagactgctggagtcaggacattttatagagccttttccagttttactaaaaaatttttccattgcaaaaaaa

SEQ ID NO: 365370 - DNA, 1533 bp, Homo sapiens
cccggattcaagcgattctcctgcctcagcctcccaagaagctgggactataggtgcatgccaccatgcccagctaattttttgtatttttagtagagatggggtttcaccgtgttagccaggatggtcttgatttcctgacatcgtgatccactcgactcggcctcccaaagttctgggattacaggcgtgagccattgtacccagcccctctccccattcttatcactcctccctgccctgtcagcccccctttctgctttgctcatgtcctcttactcctgctttcctccttctgccccctgttccccaggcaagccaggaagcagacaatgttctgatcctgcaggacaggaagctggtaaccgggccagggaaacggtatctgcaggtgtccaagaaccgctttgatggagatgtaggtgtcttcccgcttgagttcaacaagaactccctcaccttctccattccaccaaagaacaaggcccggctcaagaagatcaaggatgacactggaccagtggccaaaaagccctcttctggcaaaaagggggctacgacacagaactctgagatttgctcaggccaggcccccactcccgaccagccagacacctccaagcgttcaaagtgaaggccgtgcagagctggtcactgaaatgagcctgataggataggctggagcataaaactctgcaagggctcctctatcctgtggtcctgagctgtgtgcccttctcagtctgaggggcctaacctagagcaggtttccatagtgagaaaattcaatgtagcagactactgagaaactactgtgttgctcaggctttgtttgaggtcctgtatatacagcactgaaaagagagataaagtccctgcctgcatgcattctggcggaagagacaagcaagcaatgaacaaattagcagaaaacctagttttagtgaaaaatgctgtaaagaaaatagaaatgcgatagagtgctggcaggctagtgtagataagtggtctgaaaaggtgtctctgagccgagggcatgtgagctggggcctaaacaactagaaggagagagccacgtgaacatccggcgaaggggacccaggcagagagaaaaggaaatccaagccctgaggtaggaatgagcaggtcagattcaaggcagtgaggtcaggccgcatgaacctggaggggaatcggggacttcatgcgaaactccagcctaggctttcaaagtcaaagggtgatacagtgggtaccaagctcctctgctccccactttgtagagcctagcatgaggtggcatgtactagaattggatcctaggtgcttagccctgcaatatcagggcctcactggtgggagctgcctcgggctgggttgcttggtcatagagccatagaaggaagctgtcagcccggagtgcctgccacctagacactgatgccattgtgtgctgcctcaagactgctggagtcaggacattttatagagccttttccagttttactaaaaaatttttccattgcaaaaaaa

SEQ ID NO: 365371 - DNA, 981 bp, Homo sapiens
agctgctgcacatagcgacccagtccgttgtggagaacgctggccaagaagcggctcggagtcccgcgcgccgtcatagctacagcttggaggccgcggagcctaagcagcgaggagaggggggcgggactaaacctcgaggcttccggttccgggacgaccgctcccggagttttgcttccgaggtcaaggcgagtagcatgtgcgggagactcacgttgccggcgaagtgggagagagaaaagtggtaacctggggctgggggccggcgcggcggagctcggagtagtagagcggagtgaagacacgggggaggatagagactggcattccgttatgtgtgcctgtgggtgattgtgctgtggagtcagtgcttgtgtgctgctcatcgcctgatgtttgatgtgtcccagatgatgtgtggaatgtgatgaatgctgtgaatgatgtgtgtctactatgtctgtgtggtgccctagtgtgcacaatgtgtgacattacaaacaagtgattgcagactgcactcatatgaaattgatggacaggacagcagggaggattgcgtcgtgtgatgtgatgcaatagtcagaagtgttggagcaatggattgcattgcggaaaatgaaaaacttggtgtcaaggttggagggaaactagtaatagcacgtggttcataagaagtgtcgcagtgttgttgactgggaagaagagaaaaacttcaaactataaactgtggaacccagatcagacagtggttgtggtgagaggaatgacccaatattggttagagaaaatagtgaaccaggtttgggggaacaagccagaaaagaacggggaggtccagatttgagtaagaccttggtgggcaaatttaaattagtatggataggaaaagggcaaaaggcaaaaacgtgttataggaacggggggggcgttagaaaaagacaagagagggaaaaaattccaatgggggatgacgga

SEQ ID NO: 365372 - DNA, 3842 bp, Homo sapiens
agctgctgcacatagcgacccagtccgttgtggagaacgctggccaagaagcggctcggagtcccgcgcgccgtcatagctacagcttggaggccgcggagcctaagcagcgaggagaggggggcgggactaaacctcgaggcttccggttccgggacgaccgctcccggagttttgcttccgaggtcaaggcgagtagcatgtgcgggagactcacgttgccggcgaagtgggagagagaaaagtggtaacctggggctgggggccggcgcggcggagctcggagtagtagagcggagtgaagacacgggggaggatagagactggcattcctttgggccgggggattggcgggagtcgtgctgggtgctctcgccgtgttgaggtcccagtgaggggaaggagaagcggaagagggtctctagtcggggcctagggcaaagggactacaaaaaggatgcagatgactatagaaatgaggacgacgaggagatgctgtggaggagcagtagaggtgagaagatgatgcaaagaaactgtgtcagtgaggaactgtatagagggtcatagaggtgaggtggcggagagaaactaactaacggaccatagaggtgggggagccattgtagaaggacgtggacgcgaaagggtcgtgtagatgggcatatgtgtgaagcagcaacgtagaggggctgaagaggagaaattcatggagagaaagaatgcacctagagtgagctctgcagagtgctgcgtgggatatccctagagtttggtctagtgaaggcacgctaaccaggcacctaaggcatttcaagtagtgacttcccacatttggctaggaatgtgggtcctcctccgaagtgggtaccccctccgtatcttgttacccctgcgtggggagtggatgggtcggaggggcctgccccgaaacttggccccaggccctcctcgcagacgttacaggaaggagactctccaagccttggatatgccagtgttgcctgtaactgcaactgaaatccgccagtatttgcgggggcatgggatccccttccaggatggtcacagttgcctgcgggcactgagcccctttgcagagtcttcacagctcaaaggccagactggtgttaccacttccttcagcctcttcattgacaagaccacaggccactttctctgcatgaccagcctagcagaagggagctgggaagacttccaggccagcgtggaggggcgaggggatggggccagggaggggtttctgcttagcaaggcaccagaatttgaggacagcgaggaggtccggaggatctggaaccgagcaatacctctctgggagctgcctgatcaggaggaggttcagctggctgatacaatgtttggccttaccaaggttacagatgacacactcaagcgtttcagtgtgcgatatctgcgacctgctcgcagtcttgtcttcccttggttctcccctgggggctcaggattacgaggcctgaagctcctagaggctaaatgccagggggatggagtgagctacgaggaaaccactattccccgacccagcgcctaccacaatctgtttggattaccactgattagtcgtcgagatgctgaggtggtactgacgagtcgtgagcttgacagcctggccttgaaccagtccacggggctgcctacccttactctaccccgaggaacgacctgcttaccccctgccttactcccttacctggaacagttccggcggattgtattctggttgggggatgaccttcggtcctgggaagccgccaagttgtttgcacgaaaactgaaccccaaacgatgcttcttggtgcgaccaggagaccagcaaccccgtcccctggaggccctgaacggaggcttcaatctttctcgtattcttcgtaccgccctgcctgcctggcacaagtccatcgtatctttccggcagcttcgggaggaggtgctaggagaactgtcaaatgtggagcaagcagctggcctccgctggagccgctttccagacctcaatcgtatcttgaagggacatcgaaagggcgagctgacggtcttcacagggccaacaggcagtggaaagacgacattcatcagtgagtatgccctggatttgtgttcccagggggtgaacacactgtggggtagcttcgagatcagcaatgtgagactagcccgggtcatgctgacacagtttgccgaggggcggctggaagatcaactggacaaatatgatcactgggctgaccgctttgaggacctgcccctctatttcatgactttccatggacagcaaagcatcaggactgtaatagatacaatgcaacatgcagtctacgtctatgacatttgtcatgtgatcatcgacaacctgcagttcatgatgggtcacgagcagctgtccacagacaggatcgcagctcaagactacatcatcggggtctttcggaagtttgcaacagacaataactgccatgtgacactggtcattcacccccggaaagaggatgatgacaaggaactgcagacagcgtccatttttggctcagccaaagtgagtggcctttagcggagctcaagctttggaaaatagagtgggcaagccaggaagcagacaatgttctgatcctgcaggacaggaagctggtaaccgggccagggaaacggtatctgcaggtgtccaagaaccgctttgatggagatgtaggtgtcttcccgcttgagttcaacaagaactccctcaccttctccattccaccaaagaacaaggcccggctcaagaagatcaaggatgacactggaccagtggccaaaaagccctcttctggcaaaaagggggctacgacacagaactctgagatttgctcaggccaggcccccactcccgaccagccagacacctccaagcgttcaaagtgaaggccgtgcagagctggtcactgaaatgagcctgataggataggctggagcataaaactctgcaagggctcctctatcctgtggtcctgagctgtgtgcccttctcagtctgaggggcctaacctagagcaggtttccatagtgagaaaattcaatgtagcagactactgagaaactactgtgttgctcaggctttgtttgaggtcctgtatatacagcactgaaaagagagataaagtccctgcctgcatgcattctggcggaagagacaagcaagcaatgaacaaattagcagaaaacctagttttagtgaaaaatgctgtaaagaaaatagaaatgcgatagagtgctggcaggctagtgtagataagtggtctgaaaaggtgtctctgagccgagggcatgtgagctggggcctaaacaactagaaggagagagccacgtgaacatccggcgaaggggacccaggcagagagaaaaggaaatccaagccctgaggtaggaatgagcaggtcagattcaaggcagtgaggtcaggccgcatgaacctggaggggaatcggggacttcatgcgaaactccagcctaggctttcaaagtcaaagggtgatacagtgggtaccaagctcctctgctccccactttgtagagcctagcatgaggtggcatgtactagaattggatcctaggtgcttagccctgcaatatcagggcctcactggtgggagctgcctcgggctgggttgcttggtcatagagccatagaaggaagctgtcagcccggagtgcctgccacctagacactgatgccattgtgtgctgcctcaagactgctggagtcaggacattttatagagccttttccagttttactaaaaaatttttccattgcaaaaaaa

SEQ ID NO: 365373 - DNA, 2775 bp, Homo sapiens
agctgctgcacatagcgacccagtccgttgtggagaacgctggccaagaagcggctcggagtcccgcgcgccgtcatagctacagcttggaggccgcggagcctaagcagcgaggagaggggggcgggactaaacctcgaggcttccggttccgggacgaccgctcccggagttttgcttccgaggtcaaggcgagtagcatgtgcgggagactcacgttgccggcgaagtgggagagagaaaagtggtaacctggggctgggggccggcgcggcggagctcggagtagtagagcggagtgaagacacgggggaggatagagactggcattcctttgggccgggggattggcgggagtcgtgctgggtgctctcgccgtgttgaggtcccagtgaggggaaggagaagcggaagagggtctctagtcggggcctagggcaaagggactacaaaaaggatgcagatgactatagaaatgaggacgacgaggagatgctgtggaggagcagtagaggtgagaagatgatgcaaagaaactgtgtcagtgaggaactgtatagagggtcatagaggtgaggtggcggagagaaactaactaacggaccatagaggtgggggacttgacagcctggccttgaaccagtccacggggctgcctacccttactctaccccgaggaacgacctgcttaccccctgccttactcccttacctggaacagttccggcggattgtattctggttgggggatgaccttcggtcctgggaagccgccaagttgtttgcacgaaaactgaaccccaaacgatgcttcttggtgcgaccaggagaccagcaaccccgtcccctggaggccctgaacggaggcttcaatctttctcgtattcttcgtaccgccctgcctgcctggcacaagtccatcgtatctttccggcagcttcgggaggaggtgctaggagaactgtcaaatgtggagcaagcagctggcctccgctggagccgctttccagacctcaatcgtatcttgaagggacatcgaaagggcgagctgacggtcttcacagggccaacaggcagtggaaagacgacattcatcagtgagtatgccctggatttgtgttcccagggggtgaacacactgtggggtagcttcgagatcagcaatgtgagactagcccgggtcatgctgacacagtttgccgaggggcggctggaagatcaactggacaaatatgatcactgggctgaccgctttgaggacctgcccctctatttcatgactttccatggacagcaaagcatcaggactgtaatagatacaatgcaacatgcagtctacgtctatgacatttgtcatgtgatcatcgacaacctgcagttcatgatgggtcacgagcagctgtccacagacaggatcgcagctcaagactacatcatcggggtctttcggaagtttgcaacagacaataactgccatgtgacactggtcattcacccccggaaagaggatgatgacaaggaactgcagacagcgtccatttttggctcagccaaagcaagccaggaagcagacaatgttctgatcctgcaggacaggaagctggtaaccgggccagggaaacggtatctgcaggtgtccaagaaccgctttgatggagatgtaggtgtcttcccgcttgagttcaacaagaactccctcaccttctccattccaccaaagaacaaggcccggctcaagaagatcaaggatgacactggaccagtggccaaaaagccctcttctggcaaaaagggggctacgacacagaactctgagatttgctcaggccaggcccccactcccgaccagccagacacctccaagcgttcaaagtgaaggccgtgcagagctggtcactgaaatgagcctgataggataggctggagcataaaactctgcaagggctcctctatcctgtggtcctgagctgtgtgcccttctcagtctgaggggcctaacctagagcaggtttccatagtgagaaaattcaatgtagcagactactgagaaactactgtgttgctcaggctttgtttgaggtcctgtatatacagcactgaaaagagagataaagtccctgcctgcatgcattctggcggaagagacaagcaagcaatgaacaaattagcagaaaacctagttttagtgaaaaatgctgtaaagaaaatagaaatgcgatagagtgctggcaggctagtgtagataagtggtctgaaaaggtgtctctgagccgagggcatgtgagctggggcctaaacaactagaaggagagagccacgtgaacatccggcgaaggggacccaggcagagagaaaaggaaatccaagccctgaggtaggaatgagcaggtcagattcaaggcagtgaggtcaggccgcatgaacctggaggggaatcggggacttcatgcgaaactccagcctaggctttcaaagtcaaagggtgatacagtgggtaccaagctcctctgctccccactttgtagagcctagcatgaggtggcatgtactagaattggatcctaggtgcttagccctgcaatatcagggcctcactggtgggagctgcctcgggctgggttgcttggtcatagagccatagaaggaagctgtcagcccggagtgcctgccacctagacactgatgccattgtgtgctgcctcaagactgctggagtcaggacattttatagagccttttccagttttactaaaaaatttttccattgcaaaaaaa

SEQ ID NO: 365374 - DNA, 2974 bp, Homo sapiens
  misc_feature (2793)..(2793): n is a, c, g, or t
  misc_feature (2795)..(2795): n is a, c, g, or t
  misc_feature (2797)..(2798): n is a, c, g, or t
  misc_feature (2807)..(2807): n is a, c, g, or t
  misc_feature (2818)..(2819): n is a, c, g, or t
  misc_feature (2826)..(2827): n is a, c, g, or t
  misc_feature (2833)..(2833): n is a, c, g, or t
  misc_feature (2835)..(2835): n is a, c, g, or t
  misc_feature (2837)..(2837): n is a, c, g, or t
agctgctgcacatagcgacccagtccgttgtggagaacgctggccaagaagcggctcggagtcccgcgcgccgtcatagctacagcttggaggccgcggagcctaagcagcgaggagaggggggcgggactaaacctcgaggcttccggttccgggacgaccgctcccggagttttgcttccgaggtcaaggcgagtagcatgtgcgggagactcacgttgccggcgaagtgggagagagaaaagtggtaacctggggctgggggccggcgcggcggagctcggagtagtagagcggagtgaagacacgggggaggatagagactggcattcctttgggccgggggattggcgggagtcgtgctgggtgctctcgccgtgttgaggtcccagtgaggggaaggagaagcggaagagggtctctagtcggggcctagggcaaagggactacaaaaaggatgcagatgactatagaaatgaggacgacgaggagatgctgtggaggagcagtagaggtgagaagatgatgcaaagaaactgtgtcagtgaggaactgtatagagggtcatagaggtgaggtggcggagagaaactaactaacggaccatagaggtgggggagccattgtagaaggacgtggacgcgaaagggtcgtgtagatgggcatatgtgtgaagcagcaacgtagaggggctgaagaggagaaattcatggagagaaagaatgcacctagagtgagctctgcagagtgctgcgtgggatatccctagagtttggtctagtgaaggcacgctaaccaggcacctaaggcatttcaagtagtgacttcccacatttggctaggaatgtgggtcctcctccgaagtgggtaccccctccgtatcttgttacccctgcgtggggagtggatgggtcggaggggcctgccccgaaacttggccccaggccctcctcgcagacgttacaggaaggagactctccaagccttggatatgccagtgttgcctgtaactgcaactgaaatccgccagtatttgcgggggcatgggatccccttccaggatggtcacagttgcctgcgggcactgagcccctttgcagagtcttcacagctcaaaggccagactggtgttaccacttccttcagcctcttcattgacaagaccacaggccactttctctgcatgaccagcctagcagaagggagctgggaagacttccaggccagcgtggaggggcgaggggatggggccagggaggggtttctgcttagcaaggcaccagaatttgaggacagcgaggaggtccggaggatctggaaccgagcaatacctctctgggagctgcctgatcaggaggaggttcagctggctgatacaatgtttggccttaccaaggttacagatgacacactcaagcgtttcagtgtgcgatatctgcgacctgctcgcagtcttgtcttcccttggttctcccctgggggctcaggattacgaggcctgaagctcctagaggctaaatgccagggggatggagtgagctacgaggaaaccactattccccgacccagcgcctaccacaatctgtttggattaccactgattagtcgtcgagatgctgaggtggtactgacgagtcgtgagcttgacagcctggccttgaaccagtccacggggctgcctacccttactctaccccgaggaacgacctgcttaccccctgccttactcccttacctggaacagttccggcggattgtattctggttgggggatgaccttcggtcctgggaagccgccaagttgtttgcacgaaaactgaaccccaaacgatgcttcttggtgcgaccaggagaccagcaaccccgtcccctggaggccctgaacggaggcttcaatctttctcgtattcttcgtaccgccctgcctgcctggcacaagtccatcgtatctttccggcagcttcgggaggaggtgctaggagaactgtcaaatgtggagcaagcagctggcctccgctggagccgctttccagacctcaatcgtatcttgaagggacatcgaaagggcgagctgacggtcttcacagggccaacaggcagtggaaagacgacattcatcagtgagtatgccctggatttgtgttcccagggggtgaacacactgtggggtagcttcgagatcagcaatgtgagactagcccgggtcatgctgacacagtttgccgaggggcggctggaagatcaactggacaaatatgatcactgggctgaccgctttgaggacctgcccctctatttcatgactttccatggacagcaaagcatcaggactgtaatagatacaatgcaacatgcagtctacgtctatgacatttgtcatgtgatcatcgacaacctgcagttcatgatgggtcacgagcagctgtccacagacaggatcgcagctcaagactacatcatcggggtctttcggaagtttgcaacagacaataactgccatgtgacactggtcattcacccccggaaagaggatgatgacaaggaactgcagacagcgtccatttttggctcagccaaagtgagtggcctttagcggagctcaagctttggaaaatagagtgggcaagccaggaagcagacaatgttctgatcctgcaggacaggaagctggtaaccgggccagggaaacggtatctgcaggtgtccaagaaccgctttgatggagatgtaggtgtcttcccgcttgagttcaacaagaactccctcaccttctccattccaccaaagaacagncngnncagagatcnggtggccggcnnggcaaanncctctntngnaagggtcgacggattcggtatggtcgcgggcctcgaagaaactccagtaggagcgggatggcgaaggcgagaggggcaacggggccccgggcaggccggggccagcagaagcagagcggggggtacaaccgggaagc

SEQ ID NO: 365375 - DNA, 2550 bp, Homo sapiens
agctgctgcacatagcgacccagtccgttgtggagaacgctggccaagaagcggctcggagtcccgcgcgccgtcatagctacagcttggaggccgcggagcctaagcagcgaggagaggggggcgggactaaacctcgaggcttccggttccgggacgaccgctcccggagttttgcttccgaggtcaaggcgagtagcatgtgcgggagactcacgttgccggcgaagtgggagagagaaaagtggtaacctggggctgggggccggcgcggcggagctcggagtagtagagcggagtgaagacacgggggaggatagagactggcattcctttgggccgggggattggcgggagtcgtgctgggtgctctcgccgtgttgaggtcccagtgaggggaaggagaagcggaagagggtctctagtcggggcctagggcaaagggactacaaaaaggatgcagatgactatagaaatgaggacgacgaggagatgctgtggaggagcagtagagggccaacaggcagtggaaagacgacattcatcagtgagtatgccctggatttgtgttcccagggggtgaacacactgtggggtagcttcgagatcagcaatgtgagactagcccgggtcatgctgacacagtttgccgaggggcggctggaagatcaactggacaaatatgatcactgggctgaccgctttgaggacctgcccctctatttcatgactttccatggacagcaaagcatcaggactgtaatagatacaatgcaacatgcagtctacgtctatgacatttgtcatgtgatcatcgacaacctgcagttcatgatgggtcacgagcagctgtccacagacaggtgacggtgacatcctctcttgtctagcttgagcccgcttggacatacaacacacacttctcaggcagctggcctctaggcacacatgctgtgctctcctattttctgagatgtgtgcaggcacgtaccacccccatgtgtatcatatggaggtgtggggtatggcagcaggatgtatggacagggatctgagtgtgagtccttgggtagagggaggtagagtgggttgtggtagtttgtggggagatgtgaatggatcaagagtatgtgtatgttcttgtccttctgtgtctgataagctctttgtgttgttgggatggcgtaggatcgcagctcaagactacatcatcggggtctttcggaagtttgcaacagacaataactgccatgtgacactggtcattcacccccggaaagaggatgatgacaaggaactgcagacagcgtccatttttggctcagccaaagcaagccaggaagcagacaatgttctgatcctgcaggacaggaagctggtaaccgggccagggaaacggtatctgcaggtgtccaagaaccgctttgatggagatgtaggtgtcttcccgcttgagttcaacaagaactccctcaccttctccattccaccaaagaacaaggcccggctcaagaagatcaaggatgacactggaccagtggccaaaaagccctcttctggcaaaaagggggctacgacacagaactctgagatttgctcaggccaggcccccactcccgaccagccagacacctccaagcgttcaaagtgaaggccgtgcagagctggtcactgaaatgagcctgataggataggctggagcataaaactctgcaagggctcctctatcctgtggtcctgagctgtgtgcccttctcagtctgaggggcctaacctagagcaggtttccatagtgagaaaattcaatgtagcagactactgagaaactactgtgttgctcaggctttgtttgaggtcctgtatatacagcactgaaaagagagataaagtccctgcctgcatgcattctggcggaagagacaagcaagcaatgaacaaattagcagaaaacctagttttagtgaaaaatgctgtaaagaaaatagaaatgcgatagagtgctggcaggctagtgtagataagtggtctgaaaaggtgtctctgagccgagggcatgtgagctggggcctaaacaactagaaggagagagccacgtgaacatccggcgaaggggacccaggcagagagaaaaggaaatccaagccctgaggtaggaatgagcaggtcagattcaaggcagtgaggtcaggccgcatgaacctggaggggaatcggggacttcatgcgaaactccagcctaggctttcaaagtcaaagggtgatacagtgggtaccaagctcctctgctccccactttgtagagcctagcatgaggtggcatgtactagaattggatcctaggtgcttagccctgcaatatcagggcctcactggtgggagctgcctcgggctgggttgcttggtcatagagccatagaaggaagctgtcagcccggagtgcctgccacctagacactgatgccattgtgtgctgcctcaagactgctggagtcaggacattttatagagccttttccagttttactaaaaaatttttccattgcaaaaaaa

SEQ ID NO: 365376 - DNA, 1517 bp, Homo sapiens
  misc_feature (40)..(40): n is a, c, g, or t
  misc_feature (42)..(42): n is a, c, g, or t
  misc_feature (46)..(46): n is a, c, g, or t
gagggcgccgaaaaaatcattacggctaaggtacgaggcngngtgntgactgtaatagatacaatgcaacatgcagtctacgtctatgacatttgtcatgtgatcatcgacaacctgcagttcatgatgggtcacgagcagctgtccacagacaggatcgcagctcaagactacatcatcggggtctttcggaagtttgcaacagacaataactgccatgtgacactggtcattcacccccggaaagaggatgatgacaaggaactgcagacagcgtccatttttggctcagccaaagcaagccaggaagcagacaatgttctgatcctgcaggacaggaagctggtaaccgggccagggaaacggtatctgcaggtgtccaagaaccgctttgatggagatgtaggtgtcttcccgcttgagttcaacaagaactccctcaccttctccattccaccaaagaacaaggcccggctcaagaagatcaaggatgacactggaccagtggccaaaaagccctcttctggcaaaaagggggctacgacacagaactctgagatttgctcaggccaggcccccactcccgaccagccagacacctccaagcgttcaaagtgaaggccgtgcagagctggtcactgaaatgagcctgataggataggctggagcataaaactctgcaagggctcctctatcctgtggtcctgagctgtgtgcccttctcagtctgaggggcctaacctagagcaggtttccatagtgagaaaattcaatgtagcagactactgagaaactactgtgttgctcaggctttgtttgaggtcctgtatatacagcactgaaaagagagataaagtccctgcctgcatgcattctggcggaagagacaagcaagcaatgaacaaattagcagaaaacctagttttagtgaaaaatgctgtaaagaaaatagaaatgcgatagagtgctggcaggctagtgtagataagtggtctgaaaaggtgtctctgagccgagggcatgtgagctggggcctaaacaactagaaggagagagccacgtgaacatccggcgaaggggacccaggcagagagaaaaggaaatccaagccctgaggtaggaatgagcaggtcagattcaaggcagtgaggtcaggccgcatgaacctggaggggaatcggggacttcatgcgaaactccagcctaggctttcaaagtcaaagggtgatacagtgggtaccaagctcctctgctccccactttgtagagcctagcatgaggtggcatgtactagaattggatcctaggtgcttagccctgcaatatcagggcctcactggtgggagctgcctcgggctgggttgcttggtcatagagccatagaaggaagctgtcagcccggagtgcctgccacctagacactgatgccattgtgtgctgcctcaagactgctggagtcaggacattttatagagccttttccagttttactaaaaaatttttccattgcaaaaaaa

SEQ ID NO: 365377 - DNA, 1321 bp, Homo sapiens
  misc_feature (1321)..(1321): n is a, c, g, or t
agctgctgcacatagcgacccagtccgttgtggagaacgctggccaagaagcggctcggagtcccgcgcgccgtcatagctacagcttggaggccgcggagcctaagcagcgaggagaggggggcgggactaaacctcgaggcttccggttccgggacgaccgctcccggagttttgcttccgaggtcaaggcgagtagcatgtgcgggagactcacgttgccggcgaagtgggagagagaaaagtgggccaacaggcagtggaaagacgacattcatcagtgagtatgccctggatttgtgttcccagggggtgaacacactgtggggtagcttcgagatcagcaatgtgagactagcccgggtcatgctgacacagtttgccgaggggcggctggaagatcaactggacaaatatgatcactgggctgaccgctttgaggacctgcccctctatttcatgactttccatggacagcaaagcatcaggactgtaatagatacaatgcaacatgcagtctacgtctatgacatttgtcatgtgatcatcgacaacctgcagttcatgatgggtcacgagcagctgtccacagacaggatcgcagctcaagactacatcatcggggtctttcggaagtttgcaacagacaataactgccatgtgacactggtcattcacccccggaaagaggatgatgacaaggaactgcagacagcgtccatttttggctcagccaaagcaagccaggaagcagacaatgttctgatcctgcaggacaggaagctggtaaccgggccagggaaacggtatctgcaggtgtccaagaaccgctttgatggagatgtaggtgtcttcccgcttgagttcaacaagaactccctcaccttctccattccaccaaagaacaaggcccggctcaagaagatcaaggatgacactggaccagtggccaaaaagccctcttctggcaaaaagggggctacgacacagaactctgagatttgctcaggccaggcccccactcccgaccagccagacacctccaagcgttcaaagtgaaggcggcaagcggtccgaaagaccgatagggatgcggcggacataaaccttgaggggcctcaaatcgaggggccagaggtgcaccatatcatcagagggcaaacaacacgtgcactaggaaaaactctgcgcacagagaaaccgtgtcgcagcgtaggaggtataataaagaaaaaagccggttgtcggacgaagaacaaagacattacatgcgaacacgacagagggtatgtggcgtctcagcgaggcgcacagtatatgn

SEQ ID NO: 365378 - DNA, 405 bp, Homo sapiens
ccacgaggagccgccgcggctcaggagcgggtggtgggcgtctgagaagtcgccaccatgaggaagctcttcagcttcgggagacgcctgggccaggcgctcctgagctccatggaccaagagtatgcgggtccgggttacgacattcgggactgggaactgcggaagatccacagggctgccatcaagggcgacgccgcggaggtggagcgctgcctgacgcgcaggttccgggacttggacgcccgcgacagaaaagacaggactgttctacatttggcctgtgcccatggccgtgtgcaagtggtcactctcttgctgcacagaagatgccagatcgacatctgtgacagactaaacaggacacctttaatgaaggtatatagtagccaactctttcagcat

SEQ ID NO: 365379 - DNA, 362 bp, Homo sapiens
ctgattttaaaaagcaaaattacaggccaggcatggtggctcacacctgtaatcccagcactttgggaggccgaggcgggtggatcacctgaggtcaggattttgagaccagcctggctaacatggtgaaaccccatgtctactaaaaatacaaaaattagctgggcatcatggcgggcgcctgtaatcccacctcccgaggagctgggacaacaggcacatgcgaccatgcccagaaacagcagctatgaagcctgcaaatttgaaaaaaagaaaagaacgtgcaaaagaacacaacctaaaagtggcttcagaggaaaagcaagaaaggctccaaagaagtgaaaataaacagccacagg

SEQ ID NO: 365380 - DNA, 1180 bp, Homo sapiens
ccacgaggagccgccgcggctcaggagcgggtggtgggcgtctgagaagtcgccaccatgaggaagctcttcagcttcgggagacgcctgggccaggcgctcctgagctccatggaccaagagtatgcgggtccgggttacgacattcgggactgggaactgcggaagatccacagggctgccatcaagggcgacgccgcggaggtggagcgctgcctgacgcgcaggttccgggacttggacgcccgcgacagaaaagacaggactgttctacatttggcctgtgcccatggccgtgtgcaagtggtcactctcttgctgcacagaagatgccagatcgacatctgtgacagactaaacaggacacctttaatgaaggctgtacacagccaggaagaggcttgtgccatcgttctcctggaatgtggcgccaatccaaacattgaggatatctacggcaacactgctctccattatgccgtgtataataaggggacttcactggcagaaagactgctttcccaccatgcaaatattgaagcactaaacaaggagggaaacactccacttttgtttgctataaattccaggagacagcatatggtggaatttttattgaagaaccaggcaaatatacatgccgttgacaatttcaaaagaacagccctcatacttgcagtacagcataacttgtcaagtatcgtcaccctcctgcttcaacaaaatatacgtatctcttctcaagacatgtttggccaaactgccgaggattatgctctttgttctgatttgagaagcatccgacaacaaattttggaacataaaaataaaatgcttaaaaatcatcttcgaaatgacaatcaagaagcagcagccatgaagaatgaaagttttaaaacacaaggagcaagttcaaaagtctcgctctatcaccagtctggagtccagtggcatgatctcagattactgcagccttcacctcccaggttcaagcaattctcctgcctcagcctcccgaggagctgggacaacaggcacatgcgaccatgcccagaaacagcagctatgaagcctgcaaatttgaaaaaaagaaaagaacgtgcaaaagaacacaacctaaaagtggcttcagaggaaaagcaagaaaggctccaaagaagtgaaaataaacagccacagg

SEQ ID NO: 365381 - DNA, 360 bp, Homo sapiens
gctggatccatcaatccgggttaccaggatctgttttctagttgtggcttcattttcagacaagttgtttccatatgatagcctcatagaaggtactaccagcttagtcctagcaagaaaaaagagtacttactcttcaatatttgcagcagaagtcccaggtctgttcttatgagggcagtttgagtcacttgctcttctctgaacgtggagaaggcactgtttagatgatggaggttggattcaggtgcatcccctggaatggggtttggcattagcttcacgtggtctagaataaaggggttctccaaaggaaaattagggtaggaatgctgagtaagcagaacaaacagatgtcta

SEQ ID NO: 365382 - DNA, 118 bp, Homo sapiens
tttaaagctaggttttaaaggtaggtcactggccagtttttatttcaatatatagtaggtaaacatacaggtctaaaatgatctaacaattccttaaaagtaaggctttgaagtttgc

SEQ ID NO: 365383 - DNA, 441 bp, Homo sapiens
gaaaggtttttataggtattcttcatcaaattgaagaagttatctttattcctattattctgagatcattcaataccgtaaatgggtgctgaattgcatcaaatttttttttctacattatgtgacttttcttctttagtctgttaatatggtgcattacattgattcagctgaatggtactctccccacccaacaacccagctgtctgtatgttcttaaggtggaagctcagagtgttgttttttttaacactatgaccctgaataaagcaacatatctatatagctagtcccagaatcactggtaattgcttacataagaagctccgtatggccagatgatacagattgtggacacatgagaaaaaccttcttgttgcaagtaaaatatatctgtggctgagaaaaaaagaccgtcaaatgaaaaattctacatacaaa

SEQ ID NO: 365384 - DNA, 2053 bp, Homo sapiens
ctcgactagaagactaagggggcgctccccggcttcctgcggcgtcggtggcgagctgaggtggaggcaggctgcggcagacggcgacagtggcggcggcgccatggcagggcttgcaggatccctgctgccttggtgatcccgggctgacagccagagagcacagcggctcagctcctggagagtgagggttgaagaaagcggagggcagccgcctgcgcccgctggctcccattaggtcggttcctgcagcggtgcccggcagccttggtgaaggccctgcccggcagagatcatgtattgcctccagtggctgctgcccgtcctcctcatccccaagcccctcaaccccgccctgtggttcagccactccatgttcatgggcttctacctgctcagcttcctcctggaacggaagccttgcacaatttgtgccttggttttcctggcagccctgttccttatctgctatagctgctggggaaactgtttcctgtaccactgctccgattccccgcttccagaatcggcgcatgatcccggcgttgtgggcacctaacggcctgccctgttagctttccaaggaagcagaagacgggaggggaggcattgacataggtcataaagcattggagtttcaaatcccgcagcctcgcgggtgtcacattcctgacggcgcctttttggcctgtgatgttttatccttacaatgtgaataatggcactgaccggtgcttttattgtaaagtcctatagtcgtgggtggtcttgtggttgtgtgtgttctgtccccatctaggtcctggctggccgcatgaccacccctctcgcctcattactgtgaggagtctgggtccatcctggtcagctgccccaatgtgacctggggcagataaaatgccagtctcattgtcacctctgtgacccctccttgtcagggtctccttccttcccagaatgttactgactcctcagtccctcttctggtttccctttatttctcttctacccttttccttttttggggagtacctgtccaagacagggctcatttttgcacttatctcgaatttgaagagattgctgacgcccgagagcctcgctttttcatccttctttccttgttcagcaggctagacagaaacatgtcttgactgttagttgtccacaaatcttcagtattttctccacttcatttttaagaaaggaagcaacagatagatgttgctctttcacctgggtgtctgggctcaagctttcccgcccagcctcacttcctttgcccttcctcctgcctttctcaactgtcccaaggagggggcctcattgtgtctcccgtgcatgctctgcagcattgaagtatggtgtgttcacgtagttctagcagtccccagctgagtgagtgggagagtacctgtgtgtttcgtaacggccttgatccccttgatagatgtttggatattttttggtgtgccctgtgtgtgtgtgtgtacaaatacatgtgtatattccttttaaagaagctttatcgaacgtggtctgattttgaggtttagcaatagctagctatatatggtaggtgccgctacagtttttatttagcatggggattgcagagtgaccagcacactggactccgaggtggttcagacaagacagaggggagcagtggccatcatcctcccgccaggagcttcttcgttcctgcgcatatagactgtacgttatgaagaatacccaggaagactttgtgactgtcacttgctgctttttctgcgcttcagtaacaagtgttggcaaacgagactttctcctggcccctgcctgctggagatcagcatgcctgtcctttcagtctgatccatccatctctctcttgcctgaggggaaagagagatgggccaggcagagaacagaactggaggcagtccatctagggaatgggactgtgaggccatacttgtgaaacgtctggactgctattctagagcttttatttggtgtgttcgttgcacagctgtttgaaatgtttaataaagctttataaacttta

SEQ ID NO: 365385 - DNA, 1030 bp, Homo sapiens
  misc_feature (999)..(999): n is a, c, g, or t
  misc_feature (1001)..(1001): n is a, c, g, or t
  misc_feature (1004)..(1004): n is a, c, g, or t
  misc_feature (1007)..(1007): n is a, c, g, or t
  misc_feature (1009)..(1009): n is a, c, g, or t
cattaggctagtagaggccggtgttaatcggacgaggctgaggtggaggcaggctgcggcagacggcgacagtggcggcggcgccatggcagggcttgcaggatccctgctgccttggtgatcccgggctgacagccagagagcacagcggctcagctcctggagagtgagggttgaagaaagcggagggcagccgcctgcgcccgctggctcccattaggtcggttcctgcagcggtgcccggcagccttggtgaaggccctgcccggcagagatcatgtattgcctccagtggctgctgcccgtcctcctcatccccaagcccctcaaccccgccctgtggttcagccactccatgttcatgggcttctacctgctcagcttcctcctggaacggaagccttgcacaatttgtgccttggttttcctggcagccctgttccttatctgctatagctgctggggaaactgtttcctgtaccactgctccgattccccgcttccagaatcggcgcatgatcccggcgttgtgggcacctaacggcctgccctgttagctttccaaggaagcagaagacgggaggggaggcattgacataggtcataaagcattggagtttcaaatcccgcagcctcgcgggtgtcacattcctgacggcgcctttttggcctgtgatgttttatccttacaatgtgaataatggcactgaccggtgcttttattgtaaagtcctatagtcgtgggtggtcttgtggttgtgtgtgttctgtccccatctaggtcctggctggccgcatgaccacccctctcgcctcattactgtgaggagtctgggtccatcctggtcagctgccccaatgtgacctggggcagataaaatgccagtctcattgtcacctctgtgacccctccttgtcagggtctccttccttcccagaatgttactgactcctcagtccctcttctggtttccctttatttctctacctcctttgggngnccnccnanacgggcttgcgcttcgacgag

SEQ ID NO: 365386 - DNA, 404 bp, Homo sapiens
cggccgcgccgccatattgtcccttctgggtcaccttaggcgtcgccgggtccccgtcactggggttttccttccgcataccccgggaaggcagggcgcccctgtccggcttcaggtgattgccgtgattggacctagcctgggccttggggggtcccttcccagcccggaggtgggtcatagtactcctgggtgctggctctggccttgtccaaggtcagcgcccttgcaggatgagacaggcagagccgggggcacggggctgggagcgcgaccaccatctctgcagccccgggttccacggcagggtgcccagcttgtgagaggcctgtcattctgtccccatcagtttagttgcgttgctttagttgcttttttgggggggaggtggggggacgtggggg

SEQ ID NO: 365387 - DNA, 2251 bp, Homo sapiens
ctcgactagaagactaagggggcgctccccggcttcctgcggcgtcggtggcgagctgaggtggaggcaggctgcggcagacggcgacagtggcggcggcgccatggcagggcttgcaggatccctgctgccttggtgatcccgggctgacagccagagagcacagcggctcagctcctggagagtgagggttgaagaaagcggagggcagccgcctgcgcccgctggctcccattaggtcggttcctgcagcggtgcccggcagccttggtgaaggccctgcccggcagagatcatgtattgcctccagtggctgctgcccgtcctcctcatccccaagcccctcaaccccgccctgtggttcagccactccatgttcatgggcttctacctgctcagcttcctcctggaacggaagccttgcacaatttgtgccttggttttcctggcagccctgttccttatctgctatagctgctggggaaactgtttcctgtaccactgctccgattccccgcttccagaatcggcgcatgatcccggcgttgtgggcacctaacggcctgccctgttagctttccaaggaagcagaagacgggaggggaggcattgacataggtcataaagcattggagtttcaaatcccgcagcctcgcgggtgtcacattcctgacggcgcctttttggcctgtgatgttttatccttacaatgtgaataatggcactgaccggtgcttttattgtaaagtcctatagtcgtgggtggtcttgtggttgtgtgtgttctgtccccatctaggtcctggctggccgcatgaccacccctctcgcctcattactgtgaggagtctgggtccatcctggtcagctgccccaatgtgacctggggcagataaaatgccagtctcattgtcacctctgtgacccctccttgtcagggtctccttccttcccagaatgttactgactcctcagtccctcttctggtttccctttatttctcttctacccttttccttttttggggagtacctgtccaagacagggctcatttttgcacttatctcgaatttgaagagattgctgacgcccgagagcctcgctttttcatccttctttccttgttcagcaggctagacagaaacatgtcttgactgttagttgtccacaaatcttcagtattttctccacttcatttttaagaaaggaagcaacagatagatgttgctctttcacctgggtgtctgggctcaagctttcccgcccagcctcacttcctttgcccttcctcctgcctttctcaactgtcccaaggagggggcctcattgtgtctcccgtgcatgctctgcagcattgaagtatggtgtgttcacgtagttctagcagtccccagctgagtgagtgggagagtacctgtgtgtttcgtaacggccttgatccccttgatagatgtttggatattttttggtgtgccctgtgtgtgtgtgtgtacaaatacatgtgtatattccttttaaagaagctttatcgaacgtggtctgattttgaggtttagcaatagctagctatatatggtaggtgccgctacagtttttatttagcatggggattgcagagtgaccagcacactggactccgaggtggttcagacaagacagaggggagcagtggccatcatcctcccgccaggagcttcttcgttcctgcgcatatagactgtacgttatgaagaatacccaggaagactttgtgactgtcacttgctgctttttctgcgcttcagtaacaagtgttggcaaacgagactttctcctggcccctgcctgctggagatcagcatgcctgtcctttcagtctgatccatccatctctctcttgcctgaggggaaagagagatgggccaggcagagaacagaactggaggcagtccatctagggaatgggactgtgaggccatacttgtgaaacgtctggactgctattctagagcttttatttggtgtgttcgttgcacagctgtttgaaatgtttaataaagctttataaactttaaaaaaaaaaaaaacacgcaaaagggggggtcctaaatcccgggggcaagtttgcggccccgttttggaacaaggcccaaggggggataaaaaggggggcgttaacatctgggggaagggcgggcttggggcccttctggggcttggcacccaagataggcggataatggttgtgacacaccttgggaatttgataaaa

SEQ ID NO: 365388 - DNA, 2169 bp, Homo sapiens
ctcgactagaagactaagggggcgctccccggcttcctgcggcgtcggtggcgagctgaggtggaggcaggctgcggcagacggcgacagtggcggcggcgccatggcagggcttgcaggatccctgctgccttggtgatcccgggctgacagccagagagcacagcggctcagctcctggagagtgagggttgaagaaagcggagggcagccgcctgcgcccgctggctcccattaggtcggttcctgcagcggtgcccggcagccttggtgaaggccctgcccggcagagatcatgtattgcctccagtggctgctgcccgtcctcctcatccccaagcccctcaaccccgccctgtggttcagccactccatgttcatgggcttctacctgctcagcttcctcctggaacggaagccttgcacaatttgtgccttggttttcctggcagccctgttccttatctgctatagctgctggggaaactgtttcctgtaccactgctccgattccccgcttccagaatcggcgcatgatcccggcgttgtgggcacctaacggcctgccctgttagctttccaaggaagcagaagacgggaggggaggcattgacataggtcataaagcattggagtttcaaatcccgcagcctcgcgggtgtcacattcctgacggcgcctttttggcctgtgatgttttatccttacaatgtgaataatggcactgaccggtgcttttattgtaaagtcctatagtcgtgggtggtcttgtggttgtgtgtgttctgtccccatctaggtcctggctggccgcatgaccacccctctcgcctcattactgtgaggagtctgggtccatcctggtcagctgccccaatgtgacctggggcagataaaatgccagtctcattgtcacctctgtgacccctccttgtcagggtctccttccttcccagaatgttactgactcctcagtccctcttctggtttccctttatttctcttctacccttttccttttttggggagtacctgtccaagacagggctcatttttgcacttatctcgaatttgaagagattgctgacgcccgagagcctcgctttttcatccttctttccttgttcagcaggctagacagaaacatgtcttgactgttagttgtccacaaatcttcagtattttctccacttcatttttaagaaaggaagcaacagatagatgttgctctttcacctgggtgtctgggctcaagctttcccgcccagcctcacttcctttgcccttcctcctgcctttctcaactgtcccaaggagggggcctcattgtgtctcccgtgcatgctctgcagcattgaagtatggtgtgttcacgtagttctagcagtccccagctgagtgagtgggagagtacctgtgtgtttcgtaacggccttgatccccttgatagatgtttggatattttttggtgtgccctgtgtgtgtgtgtgtacaaatacatgtgtatattccttttaaagaagctttatcgaacgtggtctgattttgaggtttagcaatagctagctatatatggtaggtgccgctacagtttttatttagcatggggattgcagagtgaccagcacactggactccgaggtggttcagacaagacagaggggagcagtggccatcatcctcccgccaggagcttcttcgttcctgcgcatatagactgtacgttatgaagaatacccaggaagactttgtgactgtcacttgctgctttttctgcgcttcagtaacaagtgttggcaaacgagactttctcctggcccctgcctgctggagatcagcatgcctgtcctttcagtctgatccatccatctctctcttgcctgaggggaaagagagatgggccaggcagagaacagaactggaggcagtccatctagggaatgggactgtgaggccatacttgtgaaacgtctggactgctattctagagcttttatttggtgtgttcgttgcacagctgtttgaaatgtttaataaagctttataaactttaaaaaaaaaaaaagtaaaaggaactcggcaaatcttaccccgcctgtttaccaaaacatcacctctagcatcaccagtattagaggcaccgcctgccgtgacactttgcatccagag

SEQ ID NO: 365389 - DNA, 2035 bp, Homo sapiens
cattaggctagtagaggccggtgttaatcggacgaggctgaggtggaggcaggctgcggcagacggcgacagtggcggcggcgccatggcagggcttgcaggatccctgctgccttggtgatcccgggctgacagccagagagcacagcggctcagctcctggagagtgagggttgaagaaagcggagggcagccgcctgcgcccgctggctcccattaggtcggttcctgcagcggtgcccggcagccttggtgaaggccctgcccggcagagatcatgtattgcctccagtggctgctgcccgtcctcctcatccccaagcccctcaaccccgccctgtggttcagccactccatgttcatgggcttctacctgctcagcttcctcctggaacggaagccttgcacaatttgtgccttggttttcctggcagccctgttccttatctgctatagctgctggggaaactgtttcctgtaccactgctccgattccccgcttccagaatcggcgcatgatcccggcgttgtgggcacctaacggcctgccctgttagctttccaaggaagcagaagacgggaggggaggcattgacataggtcataaagcattggagtttcaaatcccgcagcctcgcgggtgtcacattcctgacggcgcctttttggcctgtgatgttttatccttacaatgtgaataatggcactgaccggtgcttttattgtaaagtcctatagtcgtgggtggtcttgtggttgtgtgtgttctgtccccatctaggtcctggctggccgcatgaccacccctctcgcctcattactgtgaggagtctgggtccatcctggtcagctgccccaatgtgacctggggcagataaaatgccagtctcattgtcacctctgtgacccctccttgtcagggtctccttccttcccagaatgttactgactcctcagtccctcttctggtttccctttatttctcttctacccttttccttttttggggagtacctgtccaagacagggctcatttttgcacttatctcgaatttgaagagattgctgacgcccgagagcctcgctttttcatccttctttccttgttcagcaggctagacagaaacatgtcttgactgttagttgtccacaaatcttcagtattttctccacttcatttttaagaaaggaagcaacagatagatgttgctctttcacctgggtgtctgggctcaagctttcccgcccagcctcacttcctttgcccttcctcctgcctttctcaactgtcccaaggagggggcctcattgtgtctcccgtgcatgctctgcagcattgaagtatggtgtgttcacgtagttctagcagtccccagctgagtgagtgggagagtacctgtgtgtttcgtaacggccttgatccccttgatagatgtttggatattttttggtgtgccctgtgtgtgtgtgtgtacaaatacatgtgtatattccttttaaagaagctttatcgaacgtggtctgattttgaggtttagcaatagctagctatatatggtaggtgccgctacagtttttatttagcatggggattgcagagtgaccagcacactggactccgaggtggttcagacaagacagaggggagcagtggccatcatcctcccgccaggagcttcttcgttcctgcgcatatagactgtacgttatgaagaatacccaggaagactttgtgactgtcacttgctgctttttctgcgcttcagtaacaagtgttggcaaacgagactttctcctggcccctgcctgctggagatcagcatgcctgtcctttcagtctgatccatccatctctctcttgcctgaggggaaagagagatgggccaggcagagaacagaactggaggcagtccatctagggaatgggactgtgaggccatacttgtgaaacgtctggactgctattctagagcttttatttggtgtgttcgttgcacagctgtttgaaatgtttaataaagctttataaacttta

SEQ ID NO: 365390 - DNA, 2057 bp, Homo sapiens
ctcgactagaagactaagggggcgctccccggcttcctgcggcgtcggtggcgagctgaggtggaggcaggctgcggcagacggcgacagtggcggcggcgccatggcagggcttgcaggatccctgctgccttggtgatcccgggctgacagccagagagcacagcggctcagctcctggagagtgagggttgaagaaagcggagggcagccgcctgcgcccgctggctcccattaggtcggttcctgcagcggtgcccggcagccttggtgaaggccctgcccggcagagatcatgtattgcctccagtggctgctgcccgtcctcctcatccccaagcccctcaaccccgccctgtggttcagccactccatgttcatgggcttctacctgctcagcttcctcctggaacggaagccttgcacaatttgtgccttggttttcctggcagccctgttccttatctgctatagctgctggggaaactgtttcctgtaccactgctccgattccccgcttccagaatcggcgcatgatcccggcgttgtgggcacctaacggcctgccctgttagctttccaaggaagcagaagacgggaggggaggcattgacataggtcataaagcattggagtttcaaatcccgcagcctcgcgggtgtcacattcctgacggcgcctttttggcctgtgatgttttatccttacaatgtgaataatggcactgaccggtgcttttattgtaaagtcctatagtcgtgggtggtcttgtggttgtgtgtgttctgtccccatctaggtcctggctggccgcatgaccacccctctcgcctcattactgtgaggagtctgggtccatcctggtcagctgccccaatgtgacctggggcagataaaatgccagtctcattgtcacctctgtgacccctccttgtcagggtctccttccttcccagaatgttactgactcctcagtccctcttctggtttccctttatttctcttctacccttttccttttttggggagtacctgtccaagacagggctcatttttgcacttatctcgaatttgaagagattgctgacgcccgagagcctcgctttttcatccttctttccttgttcagcaggctagacagaaacatgtcttgactgttagttgtccacaaatcttcagtattttctccacttcatttttaagaaaggaagcaacagatagatgttgctctttcacctgggtgtctgggctcaagctttcccgcccagcctcacttcctttgcccttcctcctgcctttctcaactgtcccaaggagggggcctcattgtgtctcccgtgcatgctctgcagcattgaagtatggtgtgttcacgtagttctagcagtccccagctgagtgagtgggagagtacctgtgtgtttcgtaacggccttgatccccttgatagatgtttggatattttttggtgtgccctgtgtgtgtgtgtgtacaaatacatgtgtatattccttttaaagaagctttatcgaacgtggtctgattttgaggtttagcaatagctagctatatatggtaggtgccgctacagtttttatttagcatggggattgcagagtgaccagcacactggactccgaggtggttcagacaagacagaggggagcagtggccatcatcctcccgccaggagcttcttcgttcctgcgcatatagactgtacgttatgaagaatacccaggaagactttgtgactgtcacttgctgctttttctgcgcttcagtaacaagtgttggcaaacgagactttctcctggcccctgcctgctggagatcagcatgcctgtcctttcagtctgatccatccatctctctcttgcctgaggggaaagagagatgggccaggcagagaacagaactggaggcagtccatctagggaatgggactgtgaggccatacttgtgaaacgtctggactgctattctagagctttcaccggctgtgctttctcctcatatgcctcaaatgtttcatcaagctcgggttttcttcttaa

SEQ ID NO: 365391 - DNA, 1768 bp, Homo sapiens
  misc_feature (1655)..(1655): n is a, c, g, or t
  misc_feature (1658)..(1658): n is a, c, g, or t
  misc_feature (1660)..(1660): n is a, c, g, or t
  misc_feature (1662)..(1662): n is a, c, g, or t
  misc_feature (1669)..(1669): n is a, c, g, or t
  misc_feature (1674)..(1674): n is a, c, g, or t
  misc_feature (1676)..(1677): n is a, c, g, or t
  misc_feature (1685)..(1685): n is a, c, g, or t
  misc_feature (1687)..(1687): n is a, c, g, or t
ctcgactagaagactaagggggcgctccccggcttcctgcggcgtcggtggcgagctgaggtggaggcaggctgcggcagacggcgacagtggcggcggcgccatggcagggcttgcaggatccctgctgccttggtgatcccgggctgacagccagagagcacagcggctcagctcctggagagtgagggttgaagaaagcggagggcagccgcctgcgcccgctggctcccattaggtcggttcctgcagcggtgcccggcagccttggtgaaggccctgcccggcagagatcatgtattgcctccagtggctgctgcccgtcctcctcatccccaagcccctcaaccccgccctgtggttcagccactccatgttcatgggcttctacctgctcagcttcctcctggaacggaagccttgcacaatttgtgccttggttttcctggcagccctgttccttatctgctatagctgctggggaaactgtttcctgtaccactgctccgattccccgcttccagaatcggcgcatgatcccggcgttgtgggcacctaacggcctgccctgttagctttccaaggaagcagaagacgggaggggaggcattgacataggtcataaagcattggagtttcaaatcccgcagcctcgcgggtgtcacattcctgacggcgcctttttggcctgtgatgttttatccttacaatgtgaataatggcactgaccggtgcttttattgtaaagtcctatagtcgtgggtggtcttgtggttgtgtgtgttctgtccccatctaggtcctggctggccgcatgaccacccctctcgcctcattactgtgaggagtctgggtccatcctggtcagctgccccaatgtgacctggggcagataaaatgccagtctcattgtcacctctgtgacccctccttgtcagggtctccttccttcccagaatgttactgactcctcagtccctcttctggtttccctttatttctcttctacccttttccttttttggggagtacctgtccaagacagggctcatttttgcacttatctcgaatttgaagagattgctgacgcccgagagcctcgctttttcatccttctttccttgttcagcaggctagacagaaacatgtcttgactgttagttgtccacaaatcttcagtattttctccacttcatttttaagaaaggaagcaacagatagatgttgctctttcacctgggtgtctgggctcaagctttcccgcccagcctcacttcctttgcccttcctcctgcctttctcaactgtcccaaggagggggcctcattgtgtctcccgtgcatgctctgcagcattgaagtatggtgtgttcacgtagttctagcagtccccagctgagtgagtgggagagtacctgtgtgtttcgtaacggccttgatccccttgatagatgtttggatattttttggtgtgccctgtgtgtgtgtgtgtacaaatacatgtgtatattccttttaaagaagctttatcgaacgtggtctgattttgaggtttagcaatagctagctatatatggtaggtgccgctacagtttttatttagcatggggattgcagagtgaccagcacactggactccgaggtggttcagacaanccngncngggggcngggcntnntccccgcngngttttcggcgcgcttaacgggtttgaaaacccgcactggcgcccggggtttcggcccacaggggaagatcggccgcggaaa

SEQ ID NO: 365392 - DNA, 1592 bp, Homo sapiens
ctcgactagaagactaagggggcgctccccggcttcctgcggcgtcggtggcgagctgaggtggaggcaggctgcggcagacggcgacagtggcggcggcgccatggcagggcttgcaggatccctgctgccttggtgatcccgggctgacagccagagagcacagcggctcagctcctggagagtgagggttgaagaaagcggagggcagccgcctgcgcccgctggctcccattaggtcggttcctgcagcggtgcccggcagccttggtgaaggccctgcccggcagagatcatgtattgcctccagtggctgctgcccgtcctcctcatccccaagcccctcaaccccgccctgtggttcagccactccatgttcatgggcttctacctgctcagcttcctcctggaacggaagccttgcacaatttgtgccttggttttcctggcagccctgttccttatctgctatagctgctggggaaactgtttcctgtaccactgctccgattccccgcttccagaatcggcgcatgatcccggcgttgtgggcacctaacggcctgccctgttagctttccaaggaagcagaagacgggaggggaggcattgacataggtcataaagcattggagtttcaaatcccgcagcctcgcgggtgtcacattcctgacggcgcctttttggcctgtgatgttttatccttacaatgtgaataatggcactgaccggtgcttttattgtaaagtcctatagtcgtgggtggtcttgtggttgtgtgtgttctgtccccatctaggtcctggctggccgcatgaccacccctctcgcctcattactgtgaggagtctgggtccatcctggtcagctgccccaatgtgacctggggcagataaaatgccagtctcattgtcacctctgtgacccctccttgtcagggtctccttccttcccagaatgttactgactcctcagtccctcttctggtttccctttatttctcttctacccttttccttttttggggagtacctgtccaagacagggctcatttttgcacttatctcgaatttgaagagattgctgacgcccgagagcctcgctttttcatccttctttccttgttcagcaggctagacagaaacatgtcttgactgttagttgtccacaaatcttcagtattttctccacttcatttttaagaaaggaagcaacagatagatgttgctctttcacctgggtgtctgggctcaagctttcccgcccagcctcacttcctttgcccttcctcctgcctttctcaactgtcccaaggagggggcctcattgtgtctcccgtgcatgctctgcagcattgaagtatggtgtgttcacgtagttctagcagtccccagctgagtgagtgggagagtacctgtgtgtttcgtaacggccttgatccccttgatagatgtcggtcttcggggtgcctgggtgtggtgtgtgtccctctgtgtttttctttaagactttcgacgggccgttgggttgccggcctctttgcgggcggccgctttcctgggctgccggcgccgggcccgggctccacgggc

SEQ ID NO: 365393 - DNA, 2060 bp, Homo sapiens
  misc_feature (95)..(95): n is a, c, g, or t
aacaaaaaactatgtgctcagtaaggtgccgagcgacgcttcgggttggttaatttcagacagggcagctgatgtggaagatggtggactgcggngaagtgacagggggccatggcaggcttgcaggatccctgctgccttggtgatcccgggctgacagccagagagcacagcggctcagctcctggagagtgagggttgaagaaagcggagggcagccgcctgcgcccgctggctcccattaggtcggttcctgcagcggtgcccggcagccttggtgaaggccctgcccggcagagatcatgtattgcctccagtggctgctgcccgtcctcctcatccccaagcccctcaaccccgccctgtggttcagccactccatgttcatgggcttctacctgctcagcttcctcctggaacggaagccttgcacaatttgtgccttggttttcctggcagccctgttccttatctgctatagctgctggggaaactgtttcctgtaccactgctccgattccccgcttccagaatcggcgcatgatcccggcgttgtgggcacctaacggcctgccctgttagctttccaaggaagcagaagacgggaggggaggcattgacataggtcataaagcattggagtttcaaatcccgcagcctcgcgggtgtcacattcctgacggcgcctttttggcctgtgatgttttatccttacaatgtgaataatggcactgaccggtgcttttattgtaaagtcctatagtcgtgggtggtcttgtggttgtgtgtgttctgtccccatctaggtcctggctggccgcatgaccacccctctcgcctcattactgtgaggagtctgggtccatcctggtcagctgccccaatgtgacctggggcagataaaatgccagtctcattgtcacctctgtgacccctccttgtcagggtctccttccttcccagaatgttactgactcctcagtccctcttctggtttccctttatttctcttctacccttttccttttttggggagtacctgtccaagacagggctcatttttgcacttatctcgaatttgaagagattgctgacgcccgagagcctcgctttttcatccttctttccttgttcagcaggctagacagaaacatgtcttgactgttagttgtccacaaatcttcagtattttctccacttcatttttaagaaaggaagcaacagatagatgttgctctttcacctgggtgtctgggctcaagctttcccgcccagcctcacttcctttgcccttcctcctgcctttctcaactgtcccaaggagggggcctcattgtgtctcccgtgcatgctctgcagcattgaagtatggtgtgttcacgtagttctagcagtccccagctgagtgagtgggagagtacctgtgtgtttcgtaacggccttgatccccttgatagatgtttggatattttttggtgtgccctgtgtgtgtgtgtgtacaaatacatgtgtatattccttttaaagaagctttatcgaacgtggtctgattttgaggtttagcaatagctagctatatatggtaggtgccgctacagtttttatttagcatggggattgcagagtgaccagcacactggactccgaggtggttcagacaagacagaggggagcagtggccatcatcctcccgccaggagcttcttcgttcctgcgcatatagactgtacgttatgaagaatacccaggaagactttgtgactgtcacttgctgctttttctgcgcttcagtaacaagtgttggcaaacgagactttctcctggcccctgcctgctggagatcagcatgcctgtcctttcagtctgatccatccatctctctcttgcctgaggggaaagagagatgggccaggcagagaacagaactggaggcagtccatctagggaatgggactgtgaggccatacttgtgaaacgtctggactgctattctagagcttttatttggtgtgttcgttgcacagctgtttgaaatgtttaataaagctttataaacttta

SEQ ID NO: 365394 - DNA, 2049 bp, Homo sapiens
cggccgcgccgccatattgtcccttctgggtcaccttaggcgtcgccgggtccccgtcactggggttttccttccgcataccccgggaaggcagggcgcccctgtccggcttcaggatccctgctgccttggtgatcccgggctgacagccagagagcacagcggctcagctcctggagagtgagggttgaagaaagcggagggcagccgcctgcgcccgctggctcccattaggtcggttcctgcagcggtgcccggcagccttggtgaaggccctgcccggcagagatcatgtattgcctccagtggctgctgcccgtcctcctcatccccaagcccctcaaccccgccctgtggttcagccactccatgttcatgggcttctacctgctcagcttcctcctggaacggaagccttgcacaatttgtgccttggttttcctggcagccctgttccttatctgctatagctgctggggaaactgtttcctgtaccactgctccgattccccgcttccagaatcggcgcatgatcccggcgttgtgggcacctaacggcctgccctgttagctttccaaggaagcagaagacgggaggggaggcattgacataggtcataaagcattggagtttcaaatcccgcagcctcgcgggtgtcacattcctgacggcgcctttttggcctgtgatgttttatccttacaatgtgaataatggcactgaccggtgcttttattgtaaagtcctatagtcgtgggtggtcttgtggttgtgtgtgttctgtccccatctaggtcctggctggccgcatgaccacccctctcgcctcattactgtgaggagtctgggtccatcctggtcagctgccccaatgtgacctggggcagataaaatgccagtctcattgtcacctctgtgacccctccttgtcagggtctccttccttcccagaatgttactgactcctcagtccctcttctggtttccctttatttctcttctacccttttccttttttggggagtacctgtccaagacagggctcatttttgcacttatctcgaatttgaagagattgctgacgcccgagagcctcgctttttcatccttctttccttgttcagcaggctagacagaaacatgtcttgactgttagttgtccacaaatcttcagtattttctccacttcatttttaagaaaggaagcaacagatagatgttgctctttcacctgggtgtctgggctcaagctttcccgcccagcctcacttcctttgcccttcctcctgcctttctcaactgtcccaaggagggggcctcattgtgtctcccgtgcatgctctgcagcattgaagtatggtgtgttcacgtagttctagcagtccccagctgagtgagtgggagagtacctgtgtgtttcgtaacggccttgatccccttgatagatgtttggatattttttggtgtgccctgtgtgtgtgtgtgtacaaatacatgtgtatattccttttaaagaagctttatcgaacgtggtctgattttgaggtttagcaatagctagctatatatggtaggtgccgctacagtttttatttagcatggggattgcagagtgaccagcacactggactccgaggtggttcagacaagacagaggggagcagtggccatcatcctcccgccaggagcttcttcgttcctgcgcatatagactgtacgttatgaagaatacccaggaagactttgtgactgtcacttgctgctttttctgcgcttcagtaacaagtgttggcaaacgagactttctcctggcccctgcctgctggagatcagcatgcctgtcctttcagtctgatccatccatctctctcttgcctgaggggaaagagagatgggccaggcagagaacagaactggaggcagtccatctagggaatgggactgtgaggccatacttgtgaaacgtctggactgctattctagagcttttatttggtgtgttcgttgcacagctgtttgaaatgtttaataaagctttataaacttta

SEQ ID NO: 365395 - DNA, 1303 bp, Homo sapiens
ctcgactagaagactaagggggcgctccccggcttcctgcggcgtcggtggcgagctgaggtggaggcaggctgcggcagacggcgacagtggcggcggcgccatggcagggcttgcaggatccctgctgccttggtgatcccgggctgacagccagagagcacagcggctcagctcctggagagtgagggttgaagaaagcggagggcagccgcctgcgcccgctggctcccattaggtcggttcctgcagcggtgcccggcagccttggtgaaggccctgcccggcagagatcatgtattgcctccagtggctgctgcccgtcctcctcatccccaagcccctcaaccccgccctgtggttcagccactccatgttcatgggcttctacctgctcagcttcctcctggaacggaagccttgcacaatttgtgccttggttttcctggcagccctgttccttatctgctatagctgctggggaaactgtttcctgtaccactgctccgattccccgcttccagaatcggcgcatgatcccggcgttgtgggcacctaacggcctgccctgttagctttccaaggaagcagaagacgggaggggaggcattgacataggtcataaagcattggagtttcaaatcccgcagcctcgcgggtgtcacattcctgacggcgcctttttggcctgtgatgttttatccttacaatgtgaataatggcactgaccggtgcttttattgtaaagtcctatagtcgtgggtggtcttgtggttgtgtgtgttctgtccccatctaggtcctggctggccgcatgaccacccctctcgcctcattactgtgaggagtctgggtccatcctggtcagctgccccaatgtgacctggggcagataaaatgccagtctcattgtcacctctgtgacccctccttgtcagggtctccttccttcccagaatgttactgactcctcagtccctcttctggtttccctttatttctcttctacccttttccttttttggggagtacctgtccaagacagggctcatttttgcacttatctcgaatttgaagagattgctgacgcccgagagcctcgctttttcatccttctttccttgttcagcaggctagacagaaacatgtcttgactgttagttgtccacaaatcttcagtattttctccacttcatttttaagaaaggaagcaacagatagatgttgctctttcacctgggtgtctgggctcaagctttcccgcccagcctcacatgccactcaatataagccggtagagcac

SEQ ID NO: 365396 - DNA, 1048 bp, Homo sapiens
  misc_feature (1017)..(1017): n is a, c, g, or t
  misc_feature (1019)..(1019): n is a, c, g, or t
  misc_feature (1022)..(1022): n is a, c, g, or t
  misc_feature (1025)..(1025): n is a, c, g, or t
  misc_feature (1027)..(1027): n is a, c, g, or t
ctcgactagaagactaagggggcgctccccggcttcctgcggcgtcggtggcgagctgaggtggaggcaggctgcggcagacggcgacagtggcggcggcgccatggcagggcttgcaggatccctgctgccttggtgatcccgggctgacagccagagagcacagcggctcagctcctggagagtgagggttgaagaaagcggagggcagccgcctgcgcccgctggctcccattaggtcggttcctgcagcggtgcccggcagccttggtgaaggccctgcccggcagagatcatgtattgcctccagtggctgctgcccgtcctcctcatccccaagcccctcaaccccgccctgtggttcagccactccatgttcatgggcttctacctgctcagcttcctcctggaacggaagccttgcacaatttgtgccttggttttcctggcagccctgttccttatctgctatagctgctggggaaactgtttcctgtaccactgctccgattccccgcttccagaatcggcgcatgatcccggcgttgtgggcacctaacggcctgccctgttagctttccaaggaagcagaagacgggaggggaggcattgacataggtcataaagcattggagtttcaaatcccgcagcctcgcgggtgtcacattcctgacggcgcctttttggcctgtgatgttttatccttacaatgtgaataatggcactgaccggtgcttttattgtaaagtcctatagtcgtgggtggtcttgtggttgtgtgtgttctgtccccatctaggtcctggctggccgcatgaccacccctctcgcctcattactgtgaggagtctgggtccatcctggtcagctgccccaatgtgacctggggcagataaaatgccagtctcattgtcacctctgtgacccctccttgtcagggtctccttccttcccagaatgttactgactcctcagtccctcttctggtttccctttatttctctacctcctttgggngnccnccnanacgggcttgcgcttcgacgag

SEQ ID NO: 365397 - DNA, 1287 bp, Homo sapiens
ctgcatgataggccgtgggttaattcggcgaggccatctgtctggctgcgcatacaccctctcgcctcattactgtgaggagtctgggtccatcctggtcagctgccccaatgtgacctggggcagataaaatgccagtctcattgtcacctctgtgacccctccttgtcagggtctccttccttcccagaatgttactgactcctcagtccctcttctggtttccctttatttctcttctacccttttccttttttggggagtacctgtccaagacagggctcatttttgcacttatctcgaatttgaagagattgctgacgcccgagagcctcgctttttcatccttctttccttgttcagcaggctagacagaaacatgtcttgactgttagttgtccacaaatcttcagtattttctccacttcatttttaagaaaggaagcaacagatagatgttgctctttcacctgggtgtctgggctcaagctttcccgcccagcctcacttcctttgcccttcctcctgcctttctcaactgtcccaaggagggggcctcattgtgtctcccgtgcatgctctgcagcattgaagtatggtgtgttcacgtagttctagcagtccccagctgagtgagtgggagagtacctgtgtgtttcgtaacggccttgatccccttgatagatgtttggatattttttggtgtgccctgtgtgtgtgtgtgtacaaatacatgtgtatattccttttaaagaagctttatcgaacgtggtctgattttgaggtttagcaatagctagctatatatggtaggtgccgctacagtttttatttagcatggggattgcagagtgaccagcacactggactccgaggtggttcagacaagacagaggggagcagtggccatcatcctcccgccaggagcttcttcgttcctgcgcatatagactgtacgttatgaagaatacccaggaagactttgtgactgtcacttgctgctttttctgcgcttcagtaacaagtgttggcaaacgagactttctcctggcccctgcctgctggagatcagcatgcctgtcctttcagtctgatccatccatctctctcttgcctgaggggaaagagagatgggccaggcagagaacagaactggaggcagtccatctagggaatgggactgtgaggccatacttgtgaaacgtctggactgctattctagagcttttatttggtgtgttcgttgcacagctgtttgaaatgtttaataaagctttataaacttta

SEQ ID NO: 365398 - DNA, 1453 bp, Homo sapiens
ctcgactagaagactaagggggcgctccccggcttcctgcggcgtcggtggcgagctgaggtggaggcaggctgcggcagacggcgacagtggcggcggcgccatggcagggcttgcaggatccctgctgccttggtgatcccgggctgacagccagagagcacagcggctcagctcctggagagtgagggttgaagaaagcggagggcagccgcctgcgcccgctggctcccattaggtcggttcctgcagcggtgcccggcagccttggtgaaggccctgcccggcagagatcatgtattgcctccagtggctgctgcccgtcctcctcatccccaagcccctcaaccccgccctgtggttcagccactccatgttcatgggcttctacctgctcagcttcctcctggaacggaagccttgcacaatttgtgccttggttttcctggcagccctgttcttatctcgaatttgaagagattgctgacgcccgagagcctcgctttttcatccttctttccttgttcagcaggctagacagaaacatgtcttgactgttagttgtccacaaatcttcagtattttctccacttcatttttaagaaaggaagcaacagatagatgttgctctttcacctgggtgtctgggctcaagctttcccgcccagcctcacttcctttgcccttcctcctgcctttctcaactgtcccaaggagggggcctcattgtgtctcccgtgcatgctctgcagcattgaagtatggtgtgttcacgtagttctagcagtccccagctgagtgagtgggagagtacctgtgtgtttcgtaacggccttgatccccttgatagatgtttggatattttttggtgtgccctgtgtgtgtgtgtgtacaaatacatgtgtatattccttttaaagaagctttatcgaacgtggtctgattttgaggtttagcaatagctagctatatatggtaggtgccgctacagtttttatttagcatggggattgcagagtgaccagcacactggactccgaggtggttcagacaagacagaggggagcagtggccatcatcctcccgccaggagcttcttcgttcctgcgcatatagactgtacgttatgaagaatacccaggaagactttgtgactgtcacttgctgctttttctgcgcttcagtaacaagtgttggcaaacgagactttctcctggcccctgcctgctggagatcagcatgcctgtcctttcagtctgatccatccatctctctcttgcctgaggggaaagagagatgggccaggcagagaacagaactggaggcagtccatctagggaatgggactgtgaggccatacttgtgaaacgtctggactgctattctagagcttttatttggtgtgttcgttgcacagctgtttgaaatgtttaataaagctttataaacttta

SEQ ID NO: 365399 - DNA, 862 bp, Homo sapiens
cattaggctagtagaggccggtgttaatcggacgaggtctttcacctgggtgtctgggctcaagctttcccgcccagcctcacttcctttgcccttcctcctgcctttctcaactgtcccaaggagggggcctcattgtgtctcccgtgcatgctctgcagcattgaagtatggtgtgttcacgtagttctagcagtccccagctgagtgagtgggagagtacctgtgtgtttcgtaacggccttgatccccttgatagatgtttggatattttttggtgtgccctgtgtgtgtgtgtgtacaaatacatgtgtatattccttttaaagaagctttatcgaacgtggtctgattttgaggtttagcaatagctagctatatatggtaggtgccgctacagtttttatttagcatggggattgcagagtgaccagcacactggactccgaggtggttcagacaagacagaggggagcagtggccatcatcctcccgccaggagcttcttcgttcctgcgcatatagactgtacgttatgaagaatacccaggaagactttgtgactgtcacttgctgctttttctgcgcttcagtaacaagtgttggcaaacgagactttctcctggcccctgcctgctggagatcagcatgcctgtcctttcagtctgatccatccatctctctcttgcctgaggggaaagagagatgggccaggcagagaacagaactggaggcagtccatctagggaatgggactgtgaggccatacttgtgaaacgtctggactgctattctagagcttttatttggtgtgttcgttgcacagctgtttgaaatgtttaataaagctttataaacttta

SEQ ID NO: 365400 - DNA, 470 bp, Homo sapiens
cattaggctagtagaggccggtgttaatcggacgaggctgaggtggaggcaggctgcggcagacggcgacagtggcggcggcgccatggcagggcttgcaggatccctgctgccttggtgatcccgggctgacagccagagagcacagcggctcagctcctggagagtgagggttgaagaaagcggagggcagccgcctgcgcccgctggctcccattagcatggaggaatcgtgatgatggctgcagcccccagaaggtgaacttggcaggagctggctgagatgatttttctgctgatggtgaaatgtgctggcagagtctatacagcacctagcaacaggtagtaagctccttgggtgccgaatcagtattttctgccttggaatcaaatgtcagaagtcaacactcaaacttcttttgaccaaaaagattctacgacaattatccagaagttacaatgcaaggaag

SEQ ID NO: 365401 - DNA, 254 bp, Homo sapiens
tgtctgtctgtctgttctttgtctgtttgtctgttgtgttgacttttctcttcaggatccctgctgccttggtgatcccgggctgacagccagagagcacagcggctcagctcctggagagtgagggttgaagaaagcggagggcagccgcctgcgcccgctggctcccattaggtcggttcctgcagcggtgcccggcagccttggtgaaggccctgcccggcagagatcatgtattgcctccagtggctgct

SEQ ID NO: 365402 - DNA, 438 bp, Homo sapiens
tagtcgtgggtggtcttgtggttgtgtgtgttctgtccccatctaggtcctggctggccgcatgaccacccctctcgcctcattactgtgaggagtctgggtccatcctggtcagctgccccaatgtgacctggggcagataaaatgccagtctcattgtcacctctgtgacccctccttgtcagggtctccttccttcccagaatgttactgactcctcagtccctcttctggtttccctttatttctcttctacccttttccttttttggggagtacctgtccaagacagggctcatttttgcacttatctcgaatttgaagagattgctgacgcccgagagcctcgctttttcatccttctttccttgttcagcaggctagacagaaacatgtcttgactgttagttgtccacaaatcttcagtattttctccac

SEQ ID NO: 365403 - DNA, 451 bp, Homo sapiens
agtgctacctccactaacagggcacaccaaaaaaatatcccaacatctatcagacagaggggagcagtggccatcatcctcccgccaggagcttcttcgttcctgcgcatatagactgtacgttatgaagaatacccaggaagactttgtgactgtcacttgctgctttttctgcgcttcagtaacaagtgttggcaaacgagactttctcctggcccctgcctgctggagatcagcatgcctgtcctttcagtctgatccatccatctctctcttgcctgaggggaaagagagatgggccaggcagagaacagaactggaggcagtccatctagggaatgggactgtgaggccatacttgtgaaacgtctggactgctattctagagcttttatttggtgtgttcgttgcacagctgtttgaaatgtttaataaagctttataaacttta

SEQ ID NO: 365404 - DNA, 2168 bp, Homo sapiens
cattaggctagtagaggccggtgttaatcggacgaggctgaggtggaggcaggctgcggcagacggcgacagtggcggcggcgccatggcagggcttgcaggggcgcgagttgggaaccctctcccacccgaaaccccgtcagacttacctgcagcagcacgcggaagatgtaccagccgatgatgagcagttcagccgaggccgccgccactgccgccatggttccaagaatggatccctgctgccttggtgatcccgggctgacagccagagagcacagcggctcagctcctggagagtgagggttgaagaaagcggagggcagccgcctgcgcccgctggctcccattaggtcggttcctgcagcggtgcccggcagccttggtgaaggccctgcccggcagagatcatgtattgcctccagtggctgctgcccgtcctcctcatccccaagcccctcaaccccgccctgtggttcagccactccatgttcatgggcttctacctgctcagcttcctcctggaacggaagccttgcacaatttgtgccttggttttcctggcagccctgttccttatctgctatagctgctggggaaactgtttcctgtaccactgctccgattccccgcttccagaatcggcgcatgatcccggcgttgtgggcacctaacggcctgccctgttagctttccaaggaagcagaagacgggaggggaggcattgacataggtcataaagcattggagtttcaaatcccgcagcctcgcgggtgtcacattcctgacggcgcctttttggcctgtgatgttttatccttacaatgtgaataatggcactgaccggtgcttttattgtaaagtcctatagtcgtgggtggtcttgtggttgtgtgtgttctgtccccatctaggtcctggctggccgcatgaccacccctctcgcctcattactgtgaggagtctgggtccatcctggtcagctgccccaatgtgacctggggcagataaaatgccagtctcattgtcacctctgtgacccctccttgtcagggtctccttccttcccagaatgttactgactcctcagtccctcttctggtttccctttatttctcttctacccttttccttttttggggagtacctgtccaagacagggctcatttttgcacttatctcgaatttgaagagattgctgacgcccgagagcctcgctttttcatccttctttccttgttcagcaggctagacagaaacatgtcttgactgttagttgtccacaaatcttcagtattttctccacttcatttttaagaaaggaagcaacagatagatgttgctctttcacctgggtgtctgggctcaagctttcccgcccagcctcacttcctttgcccttcctcctgcctttctcaactgtcccaaggagggggcctcattgtgtctcccgtgcatgctctgcagcattgaagtatggtgtgttcacgtagttctagcagtccccagctgagtgagtgggagagtacctgtgtgtttcgtaacggccttgatccccttgatagatgtttggatattttttggtgtgccctgtgtgtgtgtgtgtacaaatacatgtgtatattccttttaaagaagctttatcgaacgtggtctgattttgaggtttagcaatagctagctatatatggtaggtgccgctacagtttttatttagcatggggattgcagagtgaccagcacactggactccgaggtggttcagacaagacagaggggagcagtggccatcatcctcccgccaggagcttcttcgttcctgcgcatatagactgtacgttatgaagaatacccaggaagactttgtgactgtcacttgctgctttttctgcgcttcagtaacaagtgttggcaaacgagactttctcctggcccctgcctgctggagatcagcatgcctgtcctttcagtctgatccatccatctctctcttgcctgaggggaaagagagatgggccaggcagagaacagaactggaggcagtccatctagggaatgggactgtgaggccatacttgtgaaacgtctggactgctattctagagcttttatttggtgtgttcgttgcacagctgtttgaaatgtttaataaagctttataaacttta

SEQ ID NO: 365405 - DNA, 359 bp, Homo sapiens
  misc_feature (131)..(131): n is a, c, g, or t
  misc_feature (133)..(133): n is a, c, g, or t
  misc_feature (326)..(326): n is a, c, g, or t
  misc_feature (353)..(353): n is a, c, g, or t
caaagacacgccctccagccaccatgactggggggcttcggcagaacccggagaccaccatggcctcatttgggccacaagtgaaaaacatggttcaggctggagcttccgggacgcgggcggcacgctgngnggtctcgggaagggcgtgtctttgtcctgccctgcatccaacagatccagaggatctctctcaacacactgaccctcaatgtcaagagtgaaaaggtttacactcgccatggggtccccatctcagtcactggcattgcccaggtaaaaatccaggggggcaggaacaagggagatgttgggcggccgcaagnttatttcccttttagttgagggtttanttttag

SEQ ID NO: 365406 - DNA, 300 bp, Homo sapiens
  misc_feature (31)..(31): n is a, c, g, or t
gcacgagcactgctatgattgccaactccancagtgtgaggttggcaaggggagcccttgccaacctcacactgctatgattgccaactccagcggtcccatgtcagccttctgatgatcccactccaccccacctcaacttatttaacttcctaattaaatcagactgtttgagcctgttgtctagaatattttcctgaccaagactgagggatgggctggaggttttcaactttgctacccaaataaattgctgtaagtaagtactaataaaacagaagcaactggaaattaaaaaaa

SEQ ID NO: 365407 - DNA, 171 bp, Homo sapiens
  misc_feature (31)..(31): n is a, c, g, or t
gcacgagcactgctatgattgccaactccancagtgtgaggttggcaaggggagcccttgccaacctcacactgctatgattgccaactccagcggtcccatgtcagccttctgatgatcccactccaccccacctcaacttatttaacttcctaattaaatcagactgtt

SEQ ID NO: 365408 - DNA, 1450 bp, Homo sapiens
tcatccacgcgttggtgagctctccatattgtcgagctgcaggaggtcgcgaattcactagtgattagagactgcgaggatcgcccggcgggagaaggagctggaggcccgggtgcggaagccagcggaagcggagcgctacaagctggagcgcctagccgaggcagagaagtcccaactaattatgcaggcggaggcagaagccgcgtctgtgcggatgcgtggggaagctgaggcctttgccataggggcccgagcccgagccgaggctgagcagatggccaagaaggcagaagccttccagctgtaccaagaggctgctcagctggacatgctgctagagaagctgccccaggtggcagaggagatcagtggtcccttgacttcagccaataagatcacactggtgtccagcggcagtgggaccatgggggcagccaaagtgactggggaagtactggacattctaactcgcctgccagagagtgtggaaagactcacaggcgtgagcatctcccaggtgaggtctcaggttggagctgaggagaattgctaggttcctgtgttgtgtgacacagtatgcctagcatttaaccagcatccaggcctgggagtcattgatgtttattaatcactttctgtgtgccagacacagtgctaagcttctacataaatgagttgttttaaatcaaactaccattagggtatataggattttacaaagtccagaaactcaacatccagcatgttcctactcattctgctagtgcagctggagtgaaatccaggtcgactgtctctgcaacctgtgcttgtggtcaccccactagtatagggaactagttgcagcctattgacagttaattaattctagggcatatcactgcttttctcagcgccccagttaattcacctgtagatcatggtagaagtcagcaaacaggctctggaaccactgttttgttgcgaatcctagctacaatgcctgctagctgtaatcttggacaagtaatcaacctctctatacctgtttcctcatcttaaaattgggttaataattagaaactaccctgttgaattgttgaggggctcgagcaaatatttgcagtgtttagaatagtgcctggtatatagtaagcattatgtgtatgttaaagaaatggggccaggtgcagtggcttacgcctgtaatcccagcactttgggaggctgaggcaggcagatcacctgaggttaggagttggagaccagcctggccaacatggtgaaacaccatctttactaaaaatacaaaaaaaaattagccaggcttggtggtgcatgcctgtaatctcagctactcgggaagctgaggcaggagaattgctggaacccaggagccgaaggttgcagtgagctgagatcacaccactgcactccagcctgggtgacagaataagactctatctca

SEQ ID NO: 365409 - DNA, 2513 bp, Homo sapiens
  misc_feature (7)..(7): n is a, c, g, or t
  misc_feature (35)..(35): n is a, c, g, or t
  misc_feature (46)..(46): n is a, c, g, or t
  misc_feature (78)..(79): n is a, c, g, or t
ggaaaanagcttatgaacatgaattacgaaatttnaatacgactcnactaatagggaaatttgccctcgaggcccaannaattcggcacgagggtctgcgagcggcccctgcccggctcccaggtccctgcgcgaccccgcccttcccgagaccccagccgggctgccgcccgcgtcccggaaggtgagtgggggaggggagatggagcctggggctgccgagaagcagggagagaggggaaagctccagcctgaaccatgtttttcacttgtggcccaaatgaggccatggtggtctccggtaagtactgttgttcccttcccagccagtgaccccagaacccctgtgagtctggcctctgccccttctccctctccctaccaacttcccagcaccagacttctgccccttgatggccacgaactgcccagtttgattcccaccattccaaggcccagactgcttcccctccagctcccagattctctcctgtgggttgtgtcccctcacccccgccagttcctcagtcttccacattcaagctctgccaccgttcctcactgccccacaccttgcaggggttctgccgaagccccccagtcatggtggctggagggcgtgtctttgtcctgccctgcatccaacagatccagaggatctctctcaacacactgaccctcaatgtcaagagtgaaaaggtttacactcgccatggggtccccatctcagtcactggcattgcccaggtgaagctttcagagccttttccccacagtccacttccccatcaccctctctcccagacattaagacatcttctggccacagtcttctcaacccttgcctgcagagaagttcctctgctagtctcatcttttccaggcaccccaaggcacttgcctcctcctcctttctttccctgaaatggaagaagcatttcttagagggctctcccttctctctctgctttttctctgacttcatgagacccccaccacacctttcctacccctactctggctacaggtaaaaatccaggggcagaacaaggagatgttggcggccgcctgtcagatgttcctggggaagacggaggctgagattgcccacattgccctggagacgttagagggccaccagagggccatcatggcccacatgactgtggaggagatctataaggacaggcagaaattctcagaacaggttttcaaagtggcctcctcagacctggtcaacatgggcatcagtgtggttagctacactctgaaggacattcacgatgaccaggactatttgcactctttggggaaggctcgaacagctcaagtccaaaaagatgcacggattggagaagcagaggccaagagagatgctgggatccgggaagctaaagccaagcaggaaaaggtgtctgctcagtacctgagtgagatcgagatggccaaggcacagagagattacgaactgaagaaggccgcctatgacatcgaggtcaacacccgccgagcacaggctgacctggcctatcagcttcaggtggccaagactaagcagcagattgaggagcagcgggtgcaggtgcaggtggtggagcgggcccagcaggtggcagtgcaggagcaggagatcgcccggcgggagaaggagctggaggcccgggtgcggaagccagcggaagcggagcgctacaagctggagcgcctagccgaggcagagaagtcccaactaattatgcaggcggaggcagaagccgcgtctgtgcggatgcgtggggaagctgaggcctttgccataggggcccgagcccgagccgaggctgagcagatggccaagaaggcagaagccttccagctgtaccaagaggctgctcagctggacatgctgctagagaagctgccccaggtggcagaggagatcagtggtcccttgacttcagccaataagatcacactggtgtccagcggcagtgggaccatgggggcagccaaagtgactggggaagtactggacattctaactcgcctgccagagagtgtggaaagactcacaggcgtgagcatctcccaggtgaatcacaagcctttgagaacagcctgagccttcagccctcacagatgcccagcctcatagctgaagttgcctgaatgatcctcctgttgcatgtaacccactggcctccctgagcatgtccattgacagtgaggtcccacccctcatctctccttgccaaatagtttgtgccttgtcttgaagggggttgctccccttgccaacctcacactgctatgattgccaactccagcggtcccatgtcagccttctgatgatcccactccaccccacctcaacttatttaacttcctaattaaatcagactgtttgagcctgttgtctagaatattttcctgaccaagactgagggatgggctggaggttttcaactttgctacccaaataaattgctgtaagtaagtactaataaaacagaagcaactggaaattaaaaaaa

SEQ ID NO: 365410 - DNA, 2600 bp, Homo sapiens
  misc_feature (7)..(7): n is a, c, g, or t
  misc_feature (35)..(35): n is a, c, g, or t
  misc_feature (46)..(46): n is a, c, g, or t
  misc_feature (78)..(79): n is a, c, g, or t
ggaaaanagcttatgaacatgaattacgaaatttnaatacgactcnactaatagggaaatttgccctcgaggcccaannaattcggcacgagggtctgcgagcggcccctgcccggctcccaggtccctgcgcgaccccgcccttcccgagaccccagccgggctgccgcccgcgtcccggaaggtgagtgggggaggggagatggagcctggggctgccgagaagcagggagagaggggaaagctccagcctgaaccatgtttttcacttgtggcccaaatgaggccatggtggtctccggtaagtactgttgttcccttcccagccagtgaccccagaacccctgtgagtctggcctctgccccttctccctctccctaccaacttcccagcaccagacttctgccccttgatggccacgaactgcccagtttgattcccaccattccaaggcccagactgcttcccctccagctcccagattctctcctgtgggttgtgtcccctcacccccgccagttcctcagtcttccacattcaagctctgccaccgttcctcactgccccacaccttgcaggggttctgccgaagccccccagtcatggtggctggagggcgtgtctttgtcctgccctgcatccaacagatccagaggtaggcaagaagggaaccagggaagggggacctccgttttctctttttcctcctcttcttactgtctgtcccttctttttcccctaggatctctctcaacacactgaccctcaatgtcaagagtgaaaaggtttacactcgccatggggtccccatctcagtcactggcattgcccaggtgaagctttcagagccttttccccacagtccacttccccatcaccctctctcccagacattaagacatcttctggccacagtcttctcaacccttgcctgcagagaagttcctctgctagtctcatcttttccaggcaccccaaggcacttgcctcctcctcctttctttccctgaaatggaagaagcatttcttagagggctctcccttctctctctgctttttctctgacttcatgagacccccaccacacctttcctacccctactctggctacaggtaaaaatccaggggcagaacaaggagatgttggcggccgcctgtcagatgttcctggggaagacggaggctgagattgcccacattgccctggagacgttagagggccaccagagggccatcatggcccacatgactgtggaggagatctataaggacaggcagaaattctcagaacaggttttcaaagtggcctcctcagacctggtcaacatgggcatcagtgtggttagctacactctgaaggacattcacgatgaccaggactatttgcactctttggggaaggctcgaacagctcaagtccaaaaagatgcacggattggagaagcagaggccaagagagatgctgggatccgggaagctaaagccaagcaggaaaaggtgtctgctcagtacctgagtgagatcgagatggccaaggcacagagagattacgaactgaagaaggccgcctatgacatcgaggtcaacacccgccgagcacaggctgacctggcctatcagcttcaggtggccaagactaagcagcagattgaggagcagcgggtgcaggtgcaggtggtggagcgggcccagcaggtggcagtgcaggagcaggagatcgcccggcgggagaaggagctggaggcccgggtgcggaagccagcggaagcggagcgctacaagctggagcgcctagccgaggcagagaagtcccaactaattatgcaggcggaggcagaagccgcgtctgtgcggatgcgtggggaagctgaggcctttgccataggggcccgagcccgagccgaggctgagcagatggccaagaaggcagaagccttccagctgtaccaagaggctgctcagctggacatgctgctagagaagctgccccaggtggcagaggagatcagtggtcccttgacttcagccaataagatcacactggtgtccagcggcagtgggaccatgggggcagccaaagtgactggggaagtactggacattctaactcgcctgccagagagtgtggaaagactcacaggcgtgagcatctcccaggtgaatcacaagcctttgagaacagcctgagccttcagccctcacagatgcccagcctcatagctgaagttgcctgaatgatcctcctgttgcatgtaacccactggcctccctgagcatgtccattgacagtgaggtcccacccctcatctctccttgccaaatagtttgtgccttgtcttgaagggggttgctccccttgccaacctcacactgctatgattgccaactccagcggtcccatgtcagccttctgatgatcccactccaccccacctcaacttatttaacttcctaattaaatcagactgtttgagcctgttgtctagaatattttcctgaccaagactgagggatgggctggaggttttcaactttgctacccaaataaattgctgtaagtaagtactaataaaacagaagcaactggaaattaaaaaaa

SEQ ID NO: 365411 - DNA, 2105 bp, Homo sapiens
  misc_feature (7)..(7): n is a, c, g, or t
  misc_feature (35)..(35): n is a, c, g, or t
  misc_feature (46)..(46): n is a, c, g, or t
  misc_feature (78)..(79): n is a, c, g, or t
ggaaaanagcttatgaacatgaattacgaaatttnaatacgactcnactaatagggaaatttgccctcgaggcccaannaattcggcacgagggtctgcgagcggcccctgcccggctcccaggtccctgcgcgaccccgcccttcccgagaccccagccgggctgccgcccgcgtcccggaaggtgagtgggggaggggagatggagcctggggctgccgagaagcagggagagaggggaaagctccagcctgaaccatgtttttcacttgtggcccaaatgaggccatggtggtctccgggttctgccgaagccccccagtcatggtggctggagggcgtgtctttgtcctgccctgcatccaacagatccagaggatctctctcaacacactgaccctcaatgtcaagagtgaaaaggtttacactcgccatggggtccccatctcagtcactggcattgcccaggtgaagctttcagagccttttccccacagtccacttccccatcaccctctctcccagacattaagacatcttctggccacagtcttctcaacccttgcctgcagagaagttcctctgctagtctcatcttttccaggcaccccaaggcacttgcctcctcctcctttctttccctgaaatggaagaagcatttcttagagggctctcccttctctctctgctttttctctgacttcatgagacccccaccacacctttcctacccctactctggctacaggtaaaaatccaggggcagaacaaggagatgttggcggccgcctgtcagatgttcctggggaagacggaggctgagattgcccacattgccctggagacgttagagggccaccagagggccatcatggcccacatgactgtggaggagatctataaggacaggcagaaattctcagaacaggttttcaaagtggcctcctcagacctggtcaacatgggcatcagtgtggttagctacactctgaaggacattcacgatgaccaggactatttgcactctttggggaaggctcgaacagctcaagtccaaaaagatgcacggattggagaagcagaggccaagagagatgctgggatccgggaagctaaagccaagcaggaaaaggtgtctgctcagtacctgagtgagatcgagatggccaaggcacagagagattacgaactgaagaaggccgcctatgacatcgaggtcaacacccgccgagcacaggctgacctggcctatcagcttcaggtggccaagactaagcagcagattgaggagcagcgggtgcaggtgcaggtggtggagcgggcccagcaggtggcagtgcaggagcaggagatcgcccggcgggagaaggagctggaggcccgggtgcggaagccagcggaagcggagcgctacaagctggagcgcctagccgaggcagagaagtcccaactaattatgcaggcggaggcagaagccgcgtctgtgcggatgcgtggggaagctgaggcctttgccataggggcccgagcccgagccgaggctgagcagatggccaagaaggcagaagccttccagctgtaccaagaggctgctcagctggacatgctgctagagaagctgccccaggtggcagaggagatcagtggtcccttgacttcagccaataagatcacactggtgtccagcggcagtgggaccatgggggcagccaaagtgactggggaagtactggacattctaactcgcctgccagagagtgtggaaagactcacaggcgtgagcatctcccaggtgaatcacaagcctttgagaacagcctgagccttcagccctcacagatgcccagcctcatagctgaagttgcctgaatgatcctcctgttgcatgtaacccactggcctccctgagcatgtccattgacagtgaggtcccacccctcatctctccttgccaaatagtttgtgccttgtcttgaagggggttgctccccttgccaacctcacactgctatgattgccaactccagcggtcccatgtcagccttctgatgatcccactccaccccacctcaacttatttaacttcctaattaaatcagactgtt

SEQ ID NO: 365412 - DNA, 2472 bp, Homo sapiens
  misc_feature (7)..(7): n is a, c, g, or t
  misc_feature (35)..(35): n is a, c, g, or t
  misc_feature (46)..(46): n is a, c, g, or t
  misc_feature (78)..(79): n is a, c, g, or t
ggaaaanagcttatgaacatgaattacgaaatttnaatacgactcnactaatagggaaatttgccctcgaggcccaannaattcggcacgagggtctgcgagcggcccctgcccggctcccaggtccctgcgcgaccccgcccttcccgagaccccagccgggctgccgcccgcgtcccggaaggtgagtgggggaggggagatggagcctggggctgccgagaagcagggagagaggggaaagctccagcctgaaccatgtttttcacttgtggcccaaatgaggccatggtggtctccgggttctgccgaagccccccagtcatggtggctggagggcgtgtctttgtcctgccctgcatccaacagatccagaggatctctctcaacacactgaccctcaatgtcaagagtgaaaaggtttacactcgccatggggtccccatctcagtcactggcattgcccaggtgaagctttcagagccttttccccacagtccacttccccatcaccctctctcccagacattaagacatcttctggccacagtcttctcaacccttgcctgcagagaagttcctctgctagtctcatcttttccaggcaccccaaggcacttgcctcctcctcctttctttccctgaaatggaagaagcatttcttagagggctctcccttctctctctgctttttctctgacttcatgagacccccaccacacctttcctacccctactctggctacaggtaaaaatccaggggcagaacaaggagatgttggcggccgcctgtcagatgttcctggggaagacggaggctgagattgcccacattgccctggagacgttagagggccaccagagggccatcatggcccacatgactgtggaggagatctataaggacaggcagaaattctcagaacaggttttcaaagtggcctcctcagacctggtcaacatgggcatcagtgtggttagctacactctgaaggacattcacgatgaccaggactatttgcactctttggggaaggctcgaacagctcaagtccaaaaagatgcacggattggagaagcagaggccaagagagatgctgggatccgggaagctaaagccaagcaggaaaaggtgtctgctcagtacctgagtgagatcgagatggccaaggcacagagagattacgaactgaagaaggccgcctatgacatcgaggtcaacacccgccgagcacaggctgacctggcctatcagcttcaggtggccaagactaagcagcagattgaggagcagcgggtgcaggtgcaggtggtggagcgggcccagcaggtggcagtgcaggagcaggagatcgcccggcgggagaaggagctggaggcccgggtgcggaagccagcggaagcggagcgctacaagctggagcgcctagccgaggcagagaagtcccaactaattatgcaggcggaggcagaagccgcgtctgtgcggatgcgtggggaagctgaggcctttgccataggggcccgagcccgagccgaggctgagcagatggccaagaaggcagaagccttccagctgtaccaagaggctgctcagctggacatgctgctagagaagctgccccaggtggcagaggagatcagtggtcccttgacttcagccaataagatcacactggtgtccagcggcagtgggaccatgggggcagccaaagtgactggggaagtactggacattctaactcgcctgccagagagtgtggaaagactcacaggcgtgagcatctcccaggtgaatcacaagcctttgagaacagcctgagccttcagccctcacagatgcccagcctcatagctgaagttgcctgaatgatcctcctgttgcatgtaacccactggcctccctgagcatgtccattgacagtgaggtcccacccctcatctctccttgccaaatagtttgtgccttgtcttgaagggggttgctccccttgccaacctcacactgctatgattgccaactccagcggtcccatgtcagccttctgatgatcccactccaccccacctcaacttatttaacttcctaattaaatcagactgttaaaaaaaaaaaaaaaaaaaaaagaaaaaaaaaaaaaaaaaaaaaacaaacaaaacagtgtggcggcggcacgcctcgggccccggaagaaaacgtcttgcgaacaccattgcggtggtgggcggccggggcccccataatgatagcaaagaacacacgacgctggccacaagagagcgtgtgtatccaacgagagagaaaacgcgcgcgccaccagaaaacgcggcgcggggggagtattctcccacccacttataaaaaaaacgccccggggggcgccacccgcacgtcgttgtcgtcgacacaaaaacacacgagaggaggggcgctcccgcagggcgaacccaacgggggcgaaatcgacacac

SEQ ID NO: 365413 - DNA, 2425 bp, Homo sapiens
  misc_feature (7)..(7): n is a, c, g, or t
  misc_feature (35)..(35): n is a, c, g, or t
  misc_feature (46)..(46): n is a, c, g, or t
  misc_feature (78)..(79): n is a, c, g, or t
ggaaaanagcttatgaacatgaattacgaaatttnaatacgactcnactaatagggaaatttgccctcgaggcccaannaattcggcacgagggtctgcgagcggcccctgcccggctcccaggtccctgcgcgaccccgcccttcccgagaccccagccgggctgccgcccgcgtcccggaaggtgagtgggggaggggagatggagcctggggctgccgagaagcagggagagaggggaaagctccagcctgaaccatgtttttcacttgtggcccaaatgaggccatggtggtctccgggttctgccgaagccccccagtcatggtggctggagggcgtgtctttgtcctgccctgcatccaacagatccagaggatctctctcaacacactgaccctcaatgtcaagagtgaaaaggtttacactcgccatggggtccccatctcagtcactggcattgcccaggtgaagctttcagagccttttccccacagtccacttccccatcaccctctctcccagacattaagacatcttctggccacagtcttctcaacccttgcctgcagagaagttcctctgctagtctcatcttttccaggcaccccaaggcacttgcctcctcctcctttctttccctgaaatggaagaagcatttcttagagggctctcccttctctctctgctttttctctgacttcatgagacccccaccacacctttcctacccctactctggctacaggtaaaaatccaggggcagaacaaggagatgttggcggccgcctgtcagatgttcctggggaagacggaggctgagattgcccacattgccctggagacgttagagggccaccagagggccatcatggcccacatgactgtggaggagatctataaggacaggcagaaattctcagaacaggttttcaaagtggcctcctcagacctggtcaacatgggcatcagtgtggttagctacactctgaaggacattcacgatgaccaggactatttgcactctttggggaaggctcgaacagctcaagtccaaaaagatgcacggattggagaagcagaggccaagagagatgctgggatccgggaagctaaagccaagcaggaaaaggtgtctgctcagtacctgagtgagatcgagatggccaaggcacagagagattacgaactgaagaaggccgcctatgacatcgaggtcaacacccgccgagcacaggctgacctggcctatcagcttcaggtggccaagactaagcagcagattgaggagcagcgggtgcaggtgcaggtggtggagcgggcccagcaggtggcagtgcaggagcaggagatcgcccggcgggagaaggagctggaggcccgggtgcggaagccagcggaagcggagcgctacaagctggagcgcctagccgaggcagagaagtaaatgtcccctccctgaccctgcctagctcacttgccacctaggcaccccaagatggagtgctgaagccttcaccacctggactcctatggatttcaggtttcaggagcgtctgcctctgcagcactgggcctttctcctgggagtaagggctgctgggctccaccctccacttcccttctgtccacaggtcccaactaattatgcaggcggaggcagaagccgcgtctgtgcggatgcgtggggaagctgaggcctttgccataggggcccgagcccgagccgaggctgagcagatggccaagaaggcagaagccttccagctgtaccaagaggctgctcagctggacatgctgctagagaagctgccccaggtggcagaggagatcagtggtcccttgacttcagccaataagatcacactggtgtccagcggcagtgggaccatgggggcagccaaagtgactggggaagtactggacattctaactcgcctgccagagagtgtggaaagactcacaggcgtgagcatctcccaggtgaatcacaagcctttgagaacagcctgagccttcagccctcacagatgcccagcctcatagctgaagttgcctgaatgatcctcctgttgcatgtaacccactggcctccctgagcatgtccattgacagtgaggtcccacccctcatctctccttgccaaatagtttgtgccttgtcttgaagggggttgctccccttgccaacctcacactgctatgattgccaactccagcggtcccatgtcagccttctgatgatcccactccaccccacctcaacttatttaacttcctaattaaatcagactgtttgagcctgttgtctagaatattttcctgaccaagactgagggatgggctggaggttttcaactttgctacccaaataaattgctgtaagtaagtactaataaaacagaagcaactggaaattaaaaaaa

SEQ ID NO: 365414 - DNA, 2053 bp, Homo sapiens
  misc_feature (7)..(7): n is a, c, g, or t
  misc_feature (35)..(35): n is a, c, g, or t
  misc_feature (46)..(46): n is a, c, g, or t
  misc_feature (78)..(79): n is a, c, g, or t
ggaaaanagcttatgaacatgaattacgaaatttnaatacgactcnactaatagggaaatttgccctcgaggcccaannaattcggcacgagggtctgcgagcggcccctgcccggctcccaggtccctgcgcgaccccgcccttcccgagaccccagccgggctgccgcccgcgtcccggaaggtgagtgggggaggggagatggagcctggggctgccgagaagcagggagagaggggaaagctccagcctgaaccatgtttttcacttgtggcccaaatgaggccatggtggtctccgggttctgccgaagccccccagtcatggtggctggagggcgtgtctttgtcctgccctgcatccaacagatccagaggatctctctcaacacactgaccctcaatgtcaagagtgaaaaggtttacactcgccatggggtccccatctcagtcactggcattgcccaggtgaagctttcagagccttttccccacagtccacttccccatcaccctctctcccagacattaagacatcttctggccacagtcttctcaacccttgcctgcagagaagttcctctgctagtctcatcttttccaggcaccccaaggcacttgcctcctcctcctttctttccctgaaatggaagaagcatttcttagagggctctcccttctctctctgctttttctctgacttcatgagacccccaccacacctttcctacccctactctggctacaggtaaaaatccaggggcagaacaaggagatgttggcggccgcctgtcagatgttcctggggaagacggaggctgagattgcccacattgccctggagacgttagagggccaccagagggccatcatggcccacatgactgtggaggagatctataaggacaggcagaaattctcagaacaggttttcaaagtggcctcctcagacctggtcaacatgggcatcagtgtggttagctacactctgaaggacattcacgatgaccaggactatttgcactctttggggaaggctcgaacagctcaagtccaaaaagatgcacggattggagaagcagaggccaagagagatgctgggatccgggaagctaaagccaagcaggaaaaggtgtctgctcagtacctgagtgagatcgagatggccaaggcacagagagattacgaactgaagaaggccgcctatgacatcgaggtcaacacccgccgagcacaggctgacctggcctatcagcttcaggtggccaagactaagcagcagattgaggagcagcgggtgcaggtgcaggtggtggagcgggcccagcaggtggcagtgcaggagcaggagatcgcccggcgggagaaggagctggaggcccgggtgcggaagccagcggaagcggagcgctacaagctggagcgcctagccgaggcagagaagtcccaactaattatgcaggcggaggcagaagccgcgtctgtgcggatgcgtggggaagctgaggcctttgccataggggcccgagcccgagccgaggctgagcagatggccaagaaggcagaagccttccagctgtaccaagaggctgctcagctggacatgctgctagagaagctgccccaggtggcagaggagatcagtggtcccttgacttcagccaataagatcacactggtgtccagcggcagtgggaccatgggggcagccaaagtgactggggaagtactggacattctaactcgcctgccagagagtgtggaaagactcacaggcgtgagcatctcccaggtgaatcacaagcctttgagaacagcctgagccttcagccctcacagatgcccagcctcatagctgaagttgcctgaatgatcctcctgttgcatgtaacccactggcctccctgagcatgtccattgacagtgaggtcccacccctcatctctccttgccaaatagtttgtgccttgtcttgaagggggttgctccccttgccaacctcacactgctatgattgccattgggccagcgggggtacagagctcgagttcta

SEQ ID NO: 365415 - DNA, 2216 bp, Homo sapiens
  misc_feature (7)..(7): n is a, c, g, or t
  misc_feature (35)..(35): n is a, c, g, or t
  misc_feature (46)..(46): n is a, c, g, or t
  misc_feature (78)..(79): n is a, c, g, or t
ggaaaanagcttatgaacatgaattacgaaatttnaatacgactcnactaatagggaaatttgccctcgaggcccaannaattcggcacgagggtctgcgagcggcccctgcccggctcccaggtccctgcgcgaccccgcccttcccgagaccccagccgggctgccgcccgcgtcccggaaggtgagtgggggaggggagatggagcctggggctgccgagaagcagggagagaggggaaagctccagcctgaaccatgtttttcacttgtggcccaaatgaggccatggtggtctccgggttctgccgaagccccccagtcatggtggctggagggcgtgtctttgtcctgccctgcatccaacagatccagaggatctctctcaacacactgaccctcaatgtcaagagtgaaaaggtttacactcgccatggggtccccatctcagtcactggcattgcccaggtgaagctttcagagccttttccccacagtccacttccccatcaccctctctcccagacattaagacatcttctggccacagtcttctcaacccttgcctgcagagaagttcctctgctagtctcatcttttccaggcaccccaaggcacttgcctcctcctcctttctttccctgaaatggaagaagcatttcttagagggctctcccttctctctctgctttttctctgacttcatgagacccccaccacacctttcctacccctactctggctacaggtaaaaatccaggggcagaacaaggagatgttggcggccgcctgtcagatgttcctggggaagacggaggctgagattgcccacattgccctggagacgttagagggccaccagagggccatcatggcccacatgactgtggaggagatctataaggacaggcagaaattctcagaacaggttttcaaagtggcctcctcagacctggtcaacatgggcatcagtgtggttagctacactctgaaggacattcacgatgaccaggactatttgcactctttggggaaggctcgaacagctcaagtccaaaaagatgcacggattggagaagcagaggccaagagagatgctgggatccgggaagctaaagccaagcaggaaaaggtgtctgctcagtacctgagtgagatcgagatggccaaggcacagagagattacgaactgaagaaggccgcctatgacatcgaggtcaacacccgccgagcacaggctgacctggcctatcagcttcagcagattgaggagcagcgggtgcaggtgcaggtggtggagcgggcccagcaggtggcagtgcaggagcaggagatcgcccggcgggagaaggagctggaggcccgggtgcggaagccagcggaagcggagcgctacaagctggagcgcctagccgaggcagagaagtcccaactaattatgcaggcggaggcagaagccgcgtctgtgcggatgcgtggggaagctgaggcctttgccataggggcccgagcccgagccgaggctgagcagatggccaagaaggcagaagccttccagctgtaccaagaggctgctcagctggacatgctgctagagaagctgccccaggtggcagaggagatcagtggtcccttgacttcagccaataagatcacactggtgtccagcggcagtgggaccatgggggcagccaaagtgactggggaagtactggacattctaactcgcctgccagagagtgtggaaagactcacaggcgtgagcatctcccaggtgaatcacaagcctttgagaacagcctgagccttcagccctcacagatgcccagcctcatagctgaagttgcctgaatgatcctcctgttgcatgtaacccactggcctccctgagcatgtccattgacagtgaggtcccacccctcatctctccttgccaaatagtttgtgccttgtcttgaagggggttgctccccttgccaacctcacactgctatgattgccaactccagcggtcccatgtcagccttctgatgatcccactccaccccacctcaacttatttaacttcctaattaaatcagactgtttgagcctgttgtctagaatattttcctgaccaagactgagggatgggctggaggttttcaactttgctacccaaataaattgctgtaagtaagtactaataaaacagaagcaactggaaattaaaaaaa

SEQ ID NO: 365416 - DNA, 2321 bp, Homo sapiens
  misc_feature (7)..(7): n is a, c, g, or t
  misc_feature (35)..(35): n is a, c, g, or t
  misc_feature (46)..(46): n is a, c, g, or t
  misc_feature (78)..(79): n is a, c, g, or t
ggaaaanagcttatgaacatgaattacgaaatttnaatacgactcnactaatagggaaatttgccctcgaggcccaannaattcggcacgagggtctgcgagcggcccctgcccggctcccaggtccctgcgcgaccccgcccttcccgagaccccagccgggctgccgcccgcgtcccggaaggtgagtgggggaggggagatggagcctggggctgccgagaagcagggagagaggggaaagctccagcctgaaccatgtttttcacttgtggcccaaatgaggccatggtggtctccgggttctgccgaagccccccagtcatggtggctggagggcgtgtctttgtcctgccctgcatccaacagatccagaggatctctctcaacacactgaccctcaatgtcaagagtgaaaaggtttacactcgccatggggtccccatctcagtcactggcattgcccaggtgaagctttcagagccttttccccacagtccacttccccatcaccctctctcccagacattaagacatcttctggccacagtcttctcaacccttgcctgcagagaagttcctctgctagtctcatcttttccaggcaccccaaggcacttgcctcctcctcctttctttccctgaaatggaagaagcatttcttagagggctctcccttctctctctgctttttctctgacttcatgagacccccaccacacctttcctacccctactctggctacaggtaaaaatccaggggcagaacaaggagatgttggcggccgcctgtcagatgttcctggggaagacggaggctgagattgcccacattgccctggagacgttagagggccaccagagggccatcatggcccacatgactgtggaggagatctataaggacaggcagaaattctcagaacaggttttcaaagtggcctcctcagacctggtcaacatgggcatcagtgtggttagctacactctgaaggacattcacgatgaccaggtaaaactaggcaattgatccttccccacttccttgctcccatctcttaagccctccaaaggactaatttctacatctctcccacaggactatttgcactctttggggaaggctcgaacagctcaagtccaaaaagatgcacggattggagaagcagaggccaagagagatgctgggatccgggaagctaaagccaagcaggaaaaggtgtctgctcagtacctgagtgagatcgagatggccaaggcacagagagattacgaactgaagaaggccgcctatgacatcgaggtcaacacccgccgagcacaggctgacctggcctatcagcttcaggtggccaagactaagcagcagattgaggagcagcgggtgcaggtgcaggtggtggagcgggcccagcaggtggcagtgcaggagcaggagatcgcccggcgggagaaggagctggaggcccgggtgcggaagccagcggaagcggagcgctacaagctggagcgcctagccgaggcagagaagtcccaactaattatgcaggcggaggcagaagccgcgtctgtgcggatgcgtggggaagctgaggcctttgccataggggcccgagcccgagccgaggctgagcagatggccaagaaggcagaagccttccagctgtaccaagaggctgctcagctggacatgctgctagagaagctgccccaggtggcagaggagatcagtggtcccttgacttcagccaataagatcacactggtgtccagcggcagtgggaccatgggggcagccaaagtgactggggaagtactggacattctaactcgcctgccagagagtgtggaaagactcacaggcgtgagcatctcccaggtgaatcacaagcctttgagaacagcctgagccttcagccctcacagatgcccagcctcatagctgaagttgcctgaatgatcctcctgttgcatgtaacccactggcctccctgagcatgtccattgacagtgaggtcccacccctcatctctccttgccaaatagtttgtgccttgtcttgaagggggttgctccccttgccaacctcacactgctatgattgccaactccagcggtcccatgtcagccttctgatgatcccactccaccccacctcaacttatttaacttcctaattaaatcagactgtttgagcctgttgtctagaatattttcctgaccaagactgagggatgggctggaggttttcaactttgctacccaaataaattgctgtaagtaagtactaataaaacagaagcaactggaaattaaaaaaa

SEQ ID NO: 365417 - DNA, 2271 bp, Homo sapiens
  misc_feature (7)..(7): n is a, c, g, or t
  misc_feature (35)..(35): n is a, c, g, or t
  misc_feature (46)..(46): n is a, c, g, or t
  misc_feature (78)..(79): n is a, c, g, or t
  misc_feature (1154)..(1154): n is a, c, g, or t
  misc_feature (1166)..(1166): n is a, c, g, or t
ggaaaanagcttatgaacatgaattacgaaatttnaatacgactcnactaatagggaaatttgccctcgaggcccaannaattcggcacgagggtctgcgagcggcccctgcccggctcccaggtccctgcgcgaccccgcccttcccgagaccccagccgggctgccgcccgcgtcccggaaggtgagtgggggaggggagatggagcctggggctgccgagaagcagggagagaggggaaagctccagcctgaaccatgtttttcacttgtggcccaaatgaggccatggtggtctccgggttctgccgaagccccccagtcatggtggctggagggcgtgtctttgtcctgccctgcatccaacagatccagaggatctctctcaacacactgaccctcaatgtcaagagtgaaaaggtttacactcgccatggggtccccatctcagtcactggcattgcccaggtgaagctttcagagccttttccccacagtccacttccccatcaccctctctcccagacattaagacatcttctggccacagtcttctcaacccttgcctgcagagaagttcctctgctagtctcatcttttccaggcaccccaaggcacttgcctcctcctcctttctttccctgaaatggaagaagcatttcttagagggctctcccttctctctctgctttttctctgacttcatgagacccccaccacacctttcctacccctactctggctacaggtaaaaatccaggggcagaacaaggagatgttggcggccgcctgtcagatgttcctggggaagacggaggctgagattgcccacattgccctggagacgttagagggccaccagagggccatcatggcccacatgactgtggaggagatctataaggacaggcagaaattctcagaacaggttttcaaagtggcctcctcagacctggtcaacatgggcatcagtgtggttagctacactctgaaggacattcacgatgaccaggactatttgcactctttggggaaggctcgaacagctcaagtccaaaaagatgcacggattggagaagcagaggccaagagagatgctgggatccggaagctaaagccaacgcatggggggaacacacaggggtgtctgctcnatgtacctgagntttggaaagggcaaatttcccggaacggcaatgggcccaagggcacagagagattacgaactgaagaaggccgcctatgacatcgaggtcaacacccgccgagcacaggctgacctggcctatcagcttcaggtggccaagactaagcagcagattgaggagcagcgggtgcaggtgcaggtggtggagcgggcccagcaggtggcagtgcaggagcaggagatcgcccggcgggagaaggagctggaggcccgggtgcggaagccagcggaagcggagcgctacaagctggagcgcctagccgaggcagagaagtcccaactaattatgcaggcggaggcagaagccgcgtctgtgcggatgcgtggggaagctgaggcctttgccataggggcccgagcccgagccgaggctgagcagatggccaagaaggcagaagccttccagctgtaccaagaggctgctcagctggacatgctgctagagaagctgccccaggtggcagaggagatcagtggtcccttgacttcagccaataagatcacactggtgtccagcggcagtgggaccatgggggcagccaaagtgactggggaagtactggacattctaactcgcctgccagagagtgtggaaagactcacaggcgtgagcatctcccaggtgaatcacaagcctttgagaacagcctgagccttcagccctcacagatgcccagcctcatagctgaagttgcctgaatgatcctcctgttgcatgtaacccactggcctccctgagcatgtccattgacagtgaggtcccacccctcatctctccttgccaaatagtttgtgccttgtcttgaagggggttgctccccttgccaacctcacactgctatgattgccaactccagcggtcccatgtcagccttctgatgatcccactccaccccacctcaacttatttaacttcctaattaaatcagactgtttgagcctgttgtctagaatattttcctgaccaagactgagggatgggctggaggttttcaactttgctacccaaataaattgctgtaagtaagtactaataaaacagaagcaactggaaattaaaaaaa

SEQ ID NO: 365418 - DNA, 2722 bp, Homo sapiens
  misc_feature (7)..(7): n is a, c, g, or t
  misc_feature (35)..(35): n is a, c, g, or t
  misc_feature (46)..(46): n is a, c, g, or t
  misc_feature (78)..(79): n is a, c, g, or t
ggaaaanagcttatgaacatgaattacgaaatttnaatacgactcnactaatagggaaatttgccctcgaggcccaannaattcggcacgagggtctgcgagcggcccctgcccggctcccaggtccctgcgcgaccccgcccttcccgagaccccagccgggctgccgcccgcgtcccggaaggtgagtgggggaggggagatggagcctggggctgccgagaagcagggagagaggggaaagctccagcctgaaccatgtttttcacttgtggcccaaatgaggccatggtggtctccgggttctgccgaagccccccagtcatggtggctggagggcgtgtctttgtcctgccctgcatccaacagatccagaggatctctctcaacacactgaccctcaatgtcaagagtgaaaaggtttacactcgccatggggtccccatctcagtcactggcattgcccaggtgaagctttcagagccttttccccacagtccacttccccatcaccctctctcccagacattaagacatcttctggccacagtcttctcaacccttgcctgcagagaagttcctctgctagtctcatcttttccaggcaccccaaggcacttgcctcctcctcctttctttccctgaaatggaagaagcatttcttagagggctctcccttctctctctgctttttctctgacttcatgagacccccaccacacctttcctacccctactctggctacaggtaaaaatccaggggcagaacaaggagatgttggcggccgcctgtcagatgttcctggggaagacggaggctgagattgcccacattgccctggagacgttagagggccaccagagggccatcatggcccacatgactgtggaggagatctataaggacaggcagaaattctcagaacaggttttcaaagtggcctcctcagacctggtcaacatgggcatcagtgtggttagctacactctgaaggacattcacgatgaccaggactatttgcactctttggggaaggctcgaacagctcaagtccaaaaagatgcacggattggagaagcagaggccaagagagatgctgggatccgggaagctaaagccaagcaggaaaaggtgtctgctcagtacctgagtgagatcgagatggccaaggcacagagagattacgaactgaagaaggccgcctatgacatcgaggtcaacacccgccgagcacaggctgacctggcctatcagcttcaggtggccaagactaagcagcagattgaggagcagcgggtgcaggtgcaggtggtggagcgggcccagcaggtggcagtgcaggagcaggagatcgcccggcgggagaaggagctggaggcccgggtgcggaagccagcggaagcggagcgctacaagctggagcgcctagccgaggcagagaagtcccaactaattatgcaggcggaggcagaagccgcgtctgtgcggatgcgtggggaagctgaggcctttgccataggggcccgagcccgagccgaggctgagcagatggccaagaaggcagaagccttccagctgtaccaagaggctgctcagctggacatgctgctagagaagctgccccaggtggcagaggagatcagtggtcccttgacttcagccaataagatcacactggtgtccagcggcagtgggaccatgggggcagccaaagtgactggggaagtactggacattctaactcgcctgccagagagtgtggaaagactcacaggcgtgagcatctcccaggtgaggtctcaggttggagctgaggagaattgctaggttcctgtgttgtgtgacacagtatgcctagcatttaaccagcatccaggcctgggagtcattgatgtttattaatcactttctgtgtgccagacacagtgctaagcttctacataaatgagttgttttaaatcaaactaccattagggtatataggattttacaaagtccagaaactcaacatccagcatgttcctactcattctgctagtgcagctggagtgaaatccaggtcgactgtctctgcaacctgtgcttgtggtcaccccactagtatagggaactagttgcagcctattgacagttaattaattctagggcatatcactgcttttctcagcgccccagttaattcacctgtagatcatggtagaagtcagcaaacaggctctggaaccactgttttgttgcgaatcctagctacaatgcctgctagctgtaatcttggacaagtaatcaacctctctatacctgtttcctcatcttaaaattgggttaataattagaaactaccctgttgaattgttgaggggctcgagcaaatatttgcagtgtttagaatagtgcctggtatatagtaagcattatgtgtatgttaaagaaatggggccaggtgcagtggcttacgcctgtaatcccagcactttgggaggctgaggcaggcagatcacctgaggttaggagttggagaccagcctggccaacatggtgaaacaccatctttactaaaaatacaaaaaaaaattagccaggcttggtggtgcatgcctgtaatctcagctactcgggaagctgaggcaggagaattgctggaacccaggagccgaaggttgcagtgagctgagatcacaccactgcactccagcctgggtgacagaataagactctatctca

SEQ ID NO: 365419 - DNA, 1868 bp, Homo sapiens
  misc_feature (7)..(7): n is a, c, g, or t
  misc_feature (35)..(35): n is a, c, g, or t
  misc_feature (46)..(46): n is a, c, g, or t
  misc_feature (78)..(79): n is a, c, g, or t
ggaaaanagcttatgaacatgaattacgaaatttnaatacgactcnactaatagggaaatttgccctcgaggcccaannaattcggcacgagggtctgcgagcggcccctgcccggctcccaggtccctgcgcgaccccgcccttcccgagaccccagccgggctgccgcccgcgtcccggaaggtgagtgggggaggggagatggagcctggggctgccgagaagcagggagagaggggaaagctccagcctgaaccatgtttttcacttgtggcccaaatgaggccatggtggtctccgggttctgccgaagccccccagtcatggtggctggagggcgtgtctttgtcctgccctgcatccaacagatccagaggatctctctcaacacactgaccctcaatgtcaagagtgaaaaggtttacactcgccatggggtccccatctcagtcactggcattgcccaggtgaagctttcagagccttttccccacagtccacttccccatcaccctctctcccagacattaagacatcttctggccacagtcttctcaacccttgcctgcagagaagttcctctgctagtctcatcttttccaggcaccccaaggcacttgcctcctcctcctttctttccctgaaatggaagaagcatttcttagagggctctcccttctctctctgctttttctctgacttcatgagacccccaccacacctttcctacccctactctggctacaggtaaaaatccaggggcagaacaaggagatgttggcggccgcctgtcagatgttcctggggaagacggaggctgagattgcccacattgccctggagacgttagagggccaccagagggccatcatggcccacatgactgtggaggagatctataaggacaggcagaaattctcagaacaggttttcaaagtggcctcctcagacctggtcaacatgggcatcagtgtggttagctacactctgaaggacattcacgatgaccaggactatttgcactctttggggaaggctcgaacagctcaagtccaaaaagatgcacggattggagaagcagaggccaagagagatgctgggatccgggaagctaaagccaagcaggaaaaggtgtctgctcagtacctgagtgagatcgagatggccaaggcacagagagattacgaactgaagaaggccgcctatgacatcgaggtcaacacccgccgagcacaggctgacctggcctatcagcttcaggtggcagaggagatcagtggtcccttgacttcagccaataagatcacactggtgtccagcggcagtgggaccatgggggcagccaaagtgactggggaagtactggacattctaactcgcctgccagagagtgtggaaagactcacaggcgtgagcatctcccaggtgaatcacaagcctttgagaacagcctgagccttcagccctcacagatgcccagcctcatagctgaagttgcctgaatgatcctcctgttgcatgtaacccactggcctccctgagcatgtccattgacagtgaggtcccacccctcatctctccttgccaaatagtttgtgccttgtcttgaagggggttgctccccttgccaacctcacactgctatgattgccaactccagcggtcccatgtcagccttctgatgatcccactccaccccacctcaacttatttaacttcctaattaaatcagactgtttgagcctgttgtctagaatattttcctgaccaagactgagggatgggctggaggttttcaactttgctacccaaataaattgctgtaagtaagtactaataaaacagaagcaactggaaattaaaaaaa

SEQ ID NO: 365420 - DNA, 1739 bp, Homo sapiens
  misc_feature (7)..(7): n is a, c, g, or t
  misc_feature (35)..(35): n is a, c, g, or t
  misc_feature (46)..(46): n is a, c, g, or t
  misc_feature (78)..(79): n is a, c, g, or t
ggaaaanagcttatgaacatgaattacgaaatttnaatacgactcnactaatagggaaatttgccctcgaggcccaannaattcggcacgagggtctgcgagcggcccctgcccggctcccaggtccctgcgcgaccccgcccttcccgagaccccagccgggctgccgcccgcgtcccggaaggtgagtgggggaggggagatggagcctggggctgccgagaagcagggagagaggggaaagctccagcctgaaccatgtttttcacttgtggcccaaatgaggccatggtggtctccgggttctgccgaagccccccagtcatggtggctggagggcgtgtctttgtcctgccctgcatccaacagatccagaggatctctctcaacacactgaccctcaatgtcaagagtgaaaaggtttacactcgccatggggtccccatctcagtcactggcattgcccaggtgaagctttcagagccttttccccacagtccacttccccatcaccctctctcccagacattaagacatcttctggccacagtcttctcaacccttgcctgcagagaagttcctctgctagtctcatcttttccaggcaccccaaggcacttgcctcctcctcctttctttccctgaaatggaagaagcatttcttagagggctctcccttctctctctgctttttctctgacttcatgagacccccaccacacctttcctacccctactctggctacaggtaaaaatccaggggcagaacaaggagatgttggcggccgcctgtcagatgttcctggggaagacggaggctgagattgcccacattgccctggagacgttagagggccaccagagggccatcatggcccacatgactgtggaggagatctataaggacaggcagaaattctcagaacaggttttcaaagtggcctcctcagacctggtcaacatgggcatcagtgtggttagctacactctgaaggacattcacgatgaccaggactatttgcactctttggggaaggctcgaacagctcaagtccaaaaagatgcacggattggagaagcagaggccaagagagatgctgggatccgggaagctaaagccaagcaggaaaaggtgtctgctcagtacctgagtgagatcgagatggccaaggcacagagagattacgaactgaagaaggccgcctatgacatcgaggtcaacacccgccgagcacaggctgacctggcctatcagcttcaggtggcagaggagatcagtggtcccttgacttcagccaataagatcacactggtgtccagcggcagtgggaccatgggggcagccaaagtgactggggaagtactggacattctaactcgcctgccagagagtgtggaaagactcacaggcgtgagcatctcccaggtgaatcacaagcctttgagaacagcctgagccttcagccctcacagatgcccagcctcatagctgaagttgcctgaatgatcctcctgttgcatgtaacccactggcctccctgagcatgtccattgacagtgaggtcccacccctcatctctccttgccaaatagtttgtgccttgtcttgaagggggttgctccccttgccaacctcacactgctatgattgccaactccagcggtcccatgtcagccttctgatgatcccactccaccccacctcaacttatttaacttcctaattaaatcagactgtt

SEQ ID NO: 365421 - DNA, 1467 bp, Homo sapiens
  misc_feature (7)..(7): n is a, c, g, or t
  misc_feature (35)..(35): n is a, c, g, or t
  misc_feature (46)..(46): n is a, c, g, or t
  misc_feature (78)..(79): n is a, c, g, or t
ggaaaanagcttatgaacatgaattacgaaatttnaatacgactcnactaatagggaaatttgccctcgaggcccaannaattcggcacgagggtctgcgagcggcccctgcccggctcccaggtccctgcgcgaccccgcccttcccgagaccccagccgggctgccgcccgcgtcccggaaggtgagtgggggaggggagatggagcctggggctgccgagaagcagggagagaggggaaagctccagcctgaaccatgtttttcacttgtggcccaaatgaggccatggtggtctccgggttctgccgaagccccccagtcatggtggctggagggcgtgtctttgtcctgccctgcatccaacagatccagaggatctctctcaacacactgaccctcaatgtcaagagtgaaaaggtttacactcgccatggggtccccatctcagtcactggcattgcccaggtgaagctttcagagccttttccccacagtccacttccccatcaccctctctcccagacattaagacatcttctggccacagtcttctcaacccttgcctgcagagaagttcctctgctagtctcatcttttccaggcaccccaaggcacttgcctcctcctcctttctttccctgaaatggaagaagcatttcttagagggctctcccttctctctctgctttttctctgacttcatgagacccccaccacacctttcctacccctactctggctacaggtaaaaatccaggggcagaacaaggagatgttggcggccgcctgtcagatgttcctggggaagacggaggctgagattgcccacattgccctggagacgttagagggccaccagagggccatcatggcccacatgactgtggaggagatctataaggacaggcagaaattctcagaacaggttttcaaagtggcctcctcagacctggtcaacatgggcatcagtgtggttagctacactctgaaggacattcacgatgaccaggactatttgcactctttggggaaggctcgaacagctcaagtccaaaaagatgcacggattggagaagcagaggccaagagagatgctgggatccgggaagctaaagccaagcaggaaaaggtgtctgctcagtacctgagtgagatcgagatggccaaggcacagagagattacgaactgaagaaggccgcctatgacatcgaggtcaacacccgccgagcacaggctgacctggcctatcagcttcaggtggccaagactaagcagcagattgaggagcagcgggtgcaggtgcaggtggtggagcgggcccagcaggtggcagtgcaggagcaggacccttgccaacctcacactgctatgattgccaactccagcggtcccatgtcagccttctgatgatcccactccaccccacctcaacttatttaacttcctaattaaatcagactgtt

SEQ ID NO: 365422 - DNA, 1319 bp, Homo sapiens
  misc_feature (7)..(7): n is a, c, g, or t
  misc_feature (35)..(35): n is a, c, g, or t
  misc_feature (46)..(46): n is a, c, g, or t
  misc_feature (78)..(79): n is a, c, g, or t
  misc_feature (1262)..(1262): n is a, c, g, or t
ggaaaanagcttatgaacatgaattacgaaatttnaatacgactcnactaatagggaaatttgccctcgaggcccaannaattcggcacgagggtctgcgagcggcccctgcccggctcccaggtccctgcgcgaccccgcccttcccgagaccccagccgggctgccgcccgcgtcccggaaggtgagtgggggaggggagatggagcctggggctgccgagaagcagggagagaggggaaagctccagcctgaaccatgtttttcacttgtggcccaaatgaggccatggtggtctccgggttctgccgaagccccccagtcatggtggctggagggcgtgtctttgtcctgccctgcatccaacagatccagaggatctctctcaacacactgaccctcaatgtcaagagtgaaaaggtttacactcgccatggggtccccatctcagtcactggcattgcccaggtgaagctttcagagccttttccccacagtccacttccccatcaccctctctcccagacattaagacatcttctggccacagtcttctcaacccttgcctgcagagaagttcctctgctagtctcatcttttccaggcaccccaaggcacttgcctcctcctcctttctttccctgaaatggaagaagcatttcttagagggctctcccttctctctctgctttttctctgacttcatgagacccccaccacacctttcctacccctactctggctacaggtaaaaatccaggggcagaacaaggagatgttggcggccgcctgtcagatgttcctggggaagacggaggctgagattgcccacattgccctggagacgttagagggccaccagagggccatcatggcccacatgactgtggaggagatctataaggacaggcagaaattctcagaacaggttttcaaagtggcctcctcagacctggtcaacatgggcatcagtgtggttagctacactctgaaggacattcacgatgaccaggactatttgcactctttggggaaggctcgaacagctcaagtccaaaaagatgcacggattggagaagcagaggccaagagagatgctgggatccgggaagctaaagccaagcaggaaaaggtgtctgctcagtacctgagtgagatcgagatggccaaggcacagagagattacgaactgaagaaggccgcctatgacatcgaggtcaacacccgccgagcacaggctgacctggcctatcagcttcagncaagactacacagatgaggacacggtcagtcagggatgacaccatggatcctctaat

SEQ ID NO: 365423 - DNA, 1659 bp, Homo sapiens
  misc_feature (7)..(7): n is a, c, g, or t
  misc_feature (35)..(35): n is a, c, g, or t
  misc_feature (46)..(46): n is a, c, g, or t
  misc_feature (78)..(79): n is a, c, g, or t
ggaaaanagcttatgaacatgaattacgaaatttnaatacgactcnactaatagggaaatttgccctcgaggcccaannaattcggcacgagggtctgcgagcggcccctgcccggctcccaggtccctgcgcgaccccgcccttcccgagaccccagccgggctgccgcccgcgtcccggaaggtgagtgggggaggggagatggagcctggggctgccgagaagcagggagagaggggaaagctccagcctgaaccatgtttttcacttgtggcccaaatgaggccatggtggtctccgggttctgccgaagccccccagtcatggtggctggagggcgtgtctttgtcctgccctgcatccaacagatccagaggatctctctcaacacactgaccctcaatgtcaagagtgaaaaggtttacactcgccatggggtccccatctcagtcactggcattgcccaggtgaagctttcagagccttttccccacagtccacttccccatcaccctctctcccagacattaagacatcttctggccacagtcttctcaacccttgcctgcagagaagttcctctgctagtctcatcttttccaggcaccccaaggcacttgcctcctcctcctttctttccctgaaatggaagaagcatttcttagagggctctcccttctctctctgctttttctctgacttcatgagacccccaccacacctttcctacccctactctggctacaggtaaaaatccaggggcagaacaaggagatgttggcggccgcctgtcagatgttcctggggaagacggaggctgagattgcccacattgccctggagacgttagagggccaccagagggccatcatggcccacatgactgtggaggagatctataaggacaggcagaaattctcagaacaggttttcaaagtggcctcctcagacctggtcaacatgggcatcagtgtggttagctacactctgaaggacattcacgatgaccaggactatttgcactctttggggaaggctcgaacagctcaagtccaaaaagatgcacggattggagaagcagaggccaagagagatgctgggatccgggaagctaaagccaagcaggaaaaggtgtctgctcagtacggaagtactggacattctaactcgcctgccagagagtgtggaaagactcacaggcgtgagcatctcccaggtgaatcacaagcctttgagaacagcctgagccttcagccctcacagatgcccagcctcatagctgaagttgcctgaatgatcctcctgttgcatgtaacccactggcctccctgagcatgtccattgacagtgaggtcccacccctcatctctccttgccaaatagtttgtgccttgtcttgaagggggttgctccccttgccaacctcacactgctatgattgccaactccagcggtcccatgtcagccttctgatgatcccactccaccccacctcaacttatttaacttcctaattaaatcagactgtttgagcctgttgtctagaatattttcctgaccaagactgagggatgggctggaggttttcaactttgctacccaaataaattgctgtaagtaagtactaataaaacagaagcaactggaaattaaaaaaa

SEQ ID NO: 365424 - DNA, 1229 bp, Homo sapiens
  misc_feature (7)..(7): n is a, c, g, or t
  misc_feature (35)..(35): n is a, c, g, or t
  misc_feature (46)..(46): n is a, c, g, or t
  misc_feature (78)..(79): n is a, c, g, or t
ggaaaanagcttatgaacatgaattacgaaatttnaatacgactcnactaatagggaaatttgccctcgaggcccaannaattcggcacgagggtctgcgagcggcccctgcccggctcccaggtccctgcgcgaccccgcccttcccgagaccccagccgggctgccgcccgcgtcccggaaggtgagtgggggaggggagatggagcctggggctgccgagaagcagggagagaggggaaagctccagcctgaaccatgtttttcacttgtggcccaaatgaggccatggtggtctccgggttctgccgaagccccccagtcatggtggctggagggcgtgtctttgtcctgccctgcatccaacagatccagaggatctctctcaacacactgaccctcaatgtcaagagtgaaaaggtttacactcgccatggggtccccatctcagtcactggcattgcccaggtgaagctttcagagccttttccccacagtccacttccccatcaccctctctcccagacattaagacatcttctggccacagtcttctcaacccttgcctgcagagaagttcctctgctagtctcatcttttccaggcaccccaaggcacttgcctcctcctcctttctttccctgaaatggaagaagcatttcttagagggctctcccttctctctctgctttttctctgacttcatgagacccccaccacacctttcctacccctactctggctacaggtaaaaatccaggggcagaacaaggagatgttggcggccgcctgtcagatgttcctggggaagacggaggctgagattgcccacattgccctggagacgttagagggccaccagagggccatcatggcccacatgactgtggaggttggcctaggggcagggaaccatctggaaggatgtcaaaatgaggggggcccaaggcccacactagtctgtgagagacagtggatccaagagcatacatcccggccgggcagggtggttcatgcctgtaatcccagcactttgggatgccaaggtgggcagatcacttgaggtcaggagttcgagaccagcctagccaacctggtgaaaccccttctctactacaaatacaaaaattagctgggtatggtgatgggtgtcggtaatcccagctacttgggaggctgaggcaggagaatcacttgaacccaggaggcagaggttgcagtgagcaaaa

SEQ ID NO: 365425 - DNA, 867 bp, Homo sapiens
  misc_feature (7)..(7): n is a, c, g, or t
  misc_feature (35)..(35): n is a, c, g, or t
  misc_feature (46)..(46): n is a, c, g, or t
  misc_feature (78)..(79): n is a, c, g, or t
ggaaaanagcttatgaacatgaattacgaaatttnaatacgactcnactaatagggaaatttgccctcgaggcccaannaattcggcacgagggtctgcgagcggcccctgcccggctcccaggtccctgcgcgaccccgcccttcccgagaccccagccgggctgccgcccgcgtcccggaaggtgagtgggggaggggagatggagcctggggctgccgagaagcagggagagaggggaaagctccagcctgaaccatgtttttcacttgtggcccaaatgaggccatggtggtctccgggttctgccgaagccccccagtcatggtggctggagggcgtgtctttgtcctgccctgcatccaacagatccagaggatctctctcaacacactgaccctcaatgtcaagagtgaaaaggtttacactcgccatggggtccccatctcagtcactggcattgcccaggtgaagctttcagagccttttccccacagtccacttccccatcaccctctctcccagacattaagacatcttctggccacaaccatctggaaggatgtcaaaatgaggggggcccaaggcccacactagtctgtgagagacagtggatccaagagcatacatcccggccgggcagggtggttcatgcctgtaatcccagcactttgggatgccaaggtgggcagatcacttgaggtcaggagttcgagaccagcctagccaacctggtgaaaccccttctctactacaaatacaaaaattagctgggtatggtgatgggtgtcggtaatcccagctacttgggaggctgaggcaggagaatcacttgaacccaggaggcagaggttgcagtgagcaaaa

SEQ ID NO: 365426 - DNA, 435 bp, Homo sapiens
gatctataaggacaggcagaaattctcagaacaggttttcaaagtggcctcctcagacctggtcaacatgggcatcagtgtggttagctacactctgaaggacattcacgatgaccaggtaaaactaggcaattgatccttccccacttccttgctcccatctcttaagccctccaaaggactaatttctacatctctcccacaggactatttgcactctttggggaaggctcgaacagctcaagtccaaaaagatgcacggattggagaagcagaggccaagagagatgctgggatccgggtgagagagatgggggttgcttagtgggaaaggggatagaagtggcacaactgagaagaagcaggggtgctgggtgagcagggaaaatacatgaggcagaaagagaaccttggtgggaagcaggctgtcaccgt

SEQ ID NO: 365427 - DNA, 460 bp, Homo sapiens
  misc_feature (11)..(11): n is a, c, g, or t
ggtgtgggtgntctagaggatcctccgctggccagtggcagaggagatcagtggtcccttgacttcagccaataagatcacactggtgtccagcggcagtgggaccatgggggcagccaaagtgactggggaagtactggacattctaactcgcctgccagagagtgtggaaagactcacaggcgtgagcatctcccaggtgaatcacaagcctttgagaacagcctgagccttcagccctcacagatgcccagcctcatagctgaagttgcctgaatgatcctcctgttgcatgtaacccactggcctccctgagcatgtccattgacagtgaggtcccacccctcatctctccttgccaaatagtttgtgccttgtcttgaagggggttgctccccttgccaacctcacactgctatgattgccattgggccagcgggggtacagagctcgagttcta

SEQ ID NO: 365428 - DNA, 2234 bp, Homo sapiens
  misc_feature (7)..(7): n is a, c, g, or t
  misc_feature (35)..(35): n is a, c, g, or t
  misc_feature (46)..(46): n is a, c, g, or t
  misc_feature (78)..(79): n is a, c, g, or t
ggaaaanagcttatgaacatgaattacgaaatttnaatacgactcnactaatagggaaatttgccctcgaggcccaannaattcggcacgagggtctgcgagcggcccctgcccggctcccaggtccctgcgcgaccccgcccttcccgagaccccagccgggctgccgcccgcgtcccggaaggtgagtgggggaggggagatggagcctggggctgccgagaagcagggagagaggggaaagctccagcctgaaccatgtttttcacttgtggcccaaatgaggccatggtggtctccgggttctgccgaagccccccagtcatggtggctggagggcgtgtctttgtcctgccctgcatccaacagatccagaggatctctctcaacacactgaccctcaatgtcaagagtgaaaaggtttacactcgccatggggtccccatctcagtcactggcattgcccaggtgaagctttcagagccttttccccacagtccacttccccatcaccctctctcccagacattaagacatcttctggccacagtcttctcaacccttgcctgcagagaagttcctctgctagtctcatcttttccaggcaccccaaggcacttgcctcctcctcctttctttccctgaaatggaagaagcatttcttagagggctctcccttctctctctgctttttctctgacttcatgagacccccaccacacctttcctacccctactctggctacaggtaaaaatccaggggcagaacaaggagatgttggcggccgcctgtcagatgttcctggggaagacggaggctgagattgcccacattgccctggagacgttagagggccaccagagggccatcatggcccacatgactgtggaggagatctataaggacaggcagaaattctcagaacaggttttcaaagtggcctcctcagacctggtcaacatgggcatcagtgtggttagctacactctgaaggacattcacgatgaccaggactatttgcactctttggggaaggctcgaacagctcaagtccaaaaagatgcacggattggagaagcagaggccaagagagatgctgggatccgggaagctaaagccaagcaggaaaaggtgtctgctcagtacctgagtgagatcgagatggccaaggcacagagagattacgaactgaagaaggccgcctatgacatcgaggtcaacacccgccgagcacaggctgacctggcctatcagcttcaggtggccaagactaagcagcagattgaggagcagcgggtgcaggtgcaggtggtggagcgggcccagcaggtggcagtgcaggagcaggagatcgcccggcgggagaaggagctggaggcccgggtgcggaagccagcggaagcggagcgctacaagctggagcgcctagccgaggcagagaagtcccaactaattatgcaggcggaggcagaagccgcgtctgtgcggatgcgtggggaagctgaggcctttgccataggggcccgagcccgagccgaggctgagcagatggccaagaaggcagaagccttccagctgtaccaagaggctgctcagctggacatgctgctagagaagctgccccaggtggcagaggagatcagtggtcccttgacttcagccaataagatcacactggtgtccagcggcagtgggaccatgggggcagccaaagtgactggggaagtactggacattctaactcgcctgccagagagtgtggaaagactcacaggcgtgagcatctcccaggtgaatcacaagcctttgagaacagcctgagccttcagccctcacagatgcccagcctcatagctgaagttgcctgaatgatcctcctgttgcatgtaacccactggcctccctgagcatgtccattgacagtgaggtcccacccctcatctctccttgccaaatagtttgtgccttgtcttgaagggggttgctccccttgccaacctcacactgctatgattgccaactccagcggtcccatgtcagccttctgatgatcccactccaccccacctcaacttatttaacttcctaattaaatcagactgtttgagcctgttgtctagaatattttcctgaccaagactgagggatgggctggaggttttcaactttgctacccaaataaattgctgtaagtaagtactaataaaacagaagcaactggaaattaaaaaaa

SEQ ID NO: 365429 - DNA, 1954 bp, Homo sapiens
  misc_feature (7)..(7): n is a, c, g, or t
  misc_feature (35)..(35): n is a, c, g, or t
  misc_feature (46)..(46): n is a, c, g, or t
  misc_feature (78)..(79): n is a, c, g, or t
ggaaaanagcttatgaacatgaattacgaaatttnaatacgactcnactaatagggaaatttgccctcgaggcccaannaattcggcacgagggtctgcgagcggcccctgcccggctcccaggtccctgcgcgaccccgcccttcccgagaccccagccgggctgccgcccgcgtcccggaaggtgagtgggggaggggagatggagcctggggctgccgagaagcagggagagaggggaaagctccagcctgaaccatgtttttcacttgtggcccaaatgaggccatggtggtctccgggttctgccgaagccccccagtcatggtggctggagggcgtgtctttgtcctgccctgcatccaacagatccagaggatctctctcaacacactgaccctcaatgtcaagagtgaaaaggtttacactcgccatggggtccccatctcagtcactggcattgcccaggtaaaaatccaggggcagaacaaggagatgttggcggccgcctgtcagatgttcctggggaagacggaggctgagattgcccacattgccctggagacgttagagggccaccagagggccatcatggcccacatgactgtggaggagatctataaggacaggcagaaattctcagaacaggttttcaaagtggcctcctcagacctggtcaacatgggcatcagtgtggttagctacactctgaaggacattcacgatgaccaggactatttgcactctttggggaaggctcgaacagctcaagtccaaaaagatgcacggattggagaagcagaggccaagagagatgctgggatccgggaagctaaagccaagcaggaaaaggtgtctgctcagtacctgagtgagatcgagatggccaaggcacagagagattacgaactgaagaaggccgcctatgacatcgaggtcaacacccgccgagcacaggctgacctggcctatcagcttcaggtggccaagactaagcagcagattgaggagcagcgggtgcaggtgcaggtggtggagcgggcccagcaggtggcagtgcaggagcaggagatcgcccggcgggagaaggagctggaggcccgggtgcggaagccagcggaagcggagcgctacaagctggagcgcctagccgaggcagagaagtcccaactaattatgcaggcggaggcagaagccgcgtctgtgcggatgcgtggggaagctgaggcctttgccataggggcccgagcccgagccgaggctgagcagatggccaagaaggcagaagccttccagctgtaccaagaggctgctcagctggacatgctgctagagaagctgccccaggtggcagaggagatcagtggtcccttgacttcagccaataagatcacactggtgtccagcggcagtgggaccatgggggcagccaaagtgactggggaagtactggacattctaactcgcctgccagagagtgtggaaagactcacaggcgtgagcatctcccaggtgaatcacaagcctttgagaacagcctgagccttcagccctcacagatgcccagcctcatagctgaagttgcctgaatgatcctcctgttgcatgtaacccactggcctccctgagcatgtccattgacagtgaggtcccacccctcatctctccttgccaaatagtttgtgccttgtcttgaagggggttgctccccttgccaacctcacactgctatgattgccaactccagcggtcccatgtcagccttctgatgatcccactccaccccacctcaacttatttaacttcctaattaaatcagactgtttgagcctgttgtctagaatattttcctgaccaagactgagggatgggctggaggttttcaactttgctacccaaataaattgctgtaagtaagtactaataaaacagaagcaactggaaattaaaaaaa

SEQ ID NO: 365430 - DNA, 2221 bp, Homo sapiens
  misc_feature (7)..(7): n is a, c, g, or t
  misc_feature (35)..(35): n is a, c, g, or t
  misc_feature (46)..(46): n is a, c, g, or t
  misc_feature (78)..(79): n is a, c, g, or t
ggaaaanagcttatgaacatgaattacgaaatttnaatacgactcnactaatagggaaatttgccctcgaggcccaannaattcggcacgagggtctgcgagcggcccctgcccggctcccaggtccctgcgcgaccccgcccttcccgagaccccagccgggctgccgcccgcgtcccggaaggtgagtgggggaggggagatggagcctggggctgccgagaagcagggagagaggggaaagctccagcctgaaccatgtttttcacttgtggcccaaatgaggccatggtggtctccgggttctgccgaagccccccagtcatggtggctggagggcgtgtctttgtcctgccctgcatccaacagatccagaggatctctctcaacacactgaccctcaatgtcaagagtgaaaaggtttacactcgccatggggtccccatctcagtcactggcattgcccaggtgaagctttcagagccttttccccacagtccacttccccatcaccctctctcccagacattaagacatcttctggccacagtcttctcaacccttgcctgcagagaagttcctctgctagtctcatcttttccaggcaccccaaggcacttgcctcctcctcctttctttccctgaaatggaagaagcatttcttagagggctctcccttctctctctgctttttctctgacttcatgagacccccaccacacctttcctacccctactctggctacaggtaaaaatccaggggcagaacaaggagatgttggcggccgcctgtcagatgttcctggggaagacggaggctgagattgcccacattgccctggagacgttagagggccaccagagggccatcatggcccacatgactgtggaggagatctataaggacaggcagaaattctcagaacaggttttcaaagtggcctcctcagacctggtcaacatgggcatcagtgtggttagctacactctgaaggacattcacgatgaccaggactatttgcactctttggggaaggctcgaacagctcaagtccaaaaagatgcacggattggagaagcagaggccaagagagatgctgggatccgggaagctaaagccaagcaggaaaaggtgtctgctcagtacctgagtgagatcgagatggccaaggcacagagagattacgaactgaagaaggccgcctatgacatcgaggtcaacacccgccgagcacaggctgacctggcctatcagcttcaggtggccaagactaagcagcagattgaggagcagcgggtgcaggtgcaggtggtggagcgggcccagcaggtggcagtgcaggagcaggagatcgcccggcgggagaaggagctggaggcccgggtgcggaagccagcggaagcggagcgctacaagctggagcgcctagccgaggcagagaagtcccaactaattatgcaggcggaggcagaagccgcgtctgtgcggatgcgtggggaagctgaggcctttgccataggggcccgagcccgagccgaggctgagcagatggccaagaaggcagaagccttccagctgtaccaagaggctgctcagctggacatgctgctagagaagctgccccaggtggcagaggagatcagtggtcccttgacttcagccaataagatcacactggtgtccagcggcagtgggaccatgggggcagccaaagtgactggggaagtactggacattctaactcgcctgccagagagtgtggaaagactcacaggcgtgagcatctcccaggtgaatcacaagcctttgagaacagcctgagccttcagccctcacagatgcccagcctcatagctgaagttgcctgaatgatcctcctgttgcatgtaacccactggcctccctgagcatgtccattgacagtgaggtcccacccctcatctctccttgccaaatagtttgtgccttgtcttgaagggggttgctccccttgccaacctcacactgctatgattgccaactccagcggtcccatgtcagccttctgatgatcccactccacccaactcattattacttctatttaaccatgtggcgacaaaaaaaaaaaatttggggccgccccgaaattaaactctgggcggcccaggaaaagcaccttcacaacgaggagggtccaaaacgggggggacaaggtgtcgtcagcggacacacgcacag

SEQ ID NO: 365431 - DNA, 2055 bp, Homo sapiens
  misc_feature (7)..(7): n is a, c, g, or t
  misc_feature (35)..(35): n is a, c, g, or t
  misc_feature (46)..(46): n is a, c, g, or t
  misc_feature (78)..(79): n is a, c, g, or t
ggaaaanagcttatgaacatgaattacgaaatttnaatacgactcnactaatagggaaatttgccctcgaggcccaannaattcggcacgagggtctgcgagcggcccctgcccggctcccaggtccctgcgcgaccccgcccttcccgagaccccagccgggctgccgcccgcgtcccggaaggtgagtgggggaggggagatggagcctggggctgccgagaagcagggagagaggggaaagctccagcctgaaccatgtttttcacttgtggcccaaatgaggccatggtggtctccgggttctgccgaagccccccagtcatggtggctggagggcgtgtctttgtcctgccctgcatccaacagatccagaggatctctctcaacacactgaccctcaatgtcaagagtgaaaaggtttacactcgccatggggtccccatctcagtcactggcattgcccaggtgaagctttcagagccttttccccacagtccacttccccatcaccctctctcccagacattaagacatcttctggccacagtcttctcaacccttgcctgcagagaagttcctctgctagtctcatcttttccaggcaccccaaggcacttgcctcctcctcctttctttccctgaaatggaagaagcatttcttagagggctctcccttctctctctgctttttctctgacttcatgagacccccaccacacctttcctacccctactctggctacaggtaaaaatccaggggcagaacaaggagatgttggcggccgcctgtcagatgttcctggggaagacggaggctgagattgcccacattgccctggagacgttagagggccaccagagggccatcatggcccacatgactgtggaggagatctataaggacaggcagaaattctcagaacaggttttcaaagtggcctcctcagacctggtcaacatgggcatcagtgtggttagctacactctgaaggacattcacgatgaccaggactatttgcactctttggggaaggctcgaacagctcaagtccaaaaagatgcacggattggagaagcagaggccaagagagatgctgggatccgggaagctaaagccaagcaggaaaaggtgtctgctcagtacctgagtgagatcgagatggccaaggcacagagagattacgaactgaagaaggccgcctatgacatcgaggtcaacacccgccgagcacaggctgacctggcctatcagcttcaggtggccaagactaagcagcagattgaggagcagcgggtgcaggtgcaggtggtggagcgggcccagcaggtggcagtgcaggagcaggacccgagccgaggctgagcagatggccaagaaggcagaagccttccagctgtaccaagaggctgctcagctggacatgctgctagagaagctgccccaggtggcagaggagatcagtggtcccttgacttcagccaataagatcacactggtgtccagcggcagtgggaccatgggggcagccaaagtgactggggaagtactggacattctaactcgcctgccagagagtgtggaaagactcacaggcgtgagcatctcccaggtgaatcacaagcctttgagaacagcctgagccttcagccctcacagatgcccagcctcatagctgaagttgcctgaatgatcctcctgttgcatgtaacccactggcctccctgagcatgtccattgacagtgaggtcccacccctcatctctccttgccaaatagtttgtgccttgtcttgaagggggttgctccccttgccaacctcacactgctatgattgccaactccagcggtcccatgtcagccttctgatgatcccactccaccccacctcaacttatttaacttcctaattaaatcagactgtttgagcctgttgtctagaatattttcctgaccaagactgagggatgggctggaggttttcaactttgctacccaaataaattgctgtaagtaagtactaataaaacagaagcaactggaaattaaaaaaa

SEQ ID NO: 365432 - DNA, 1686 bp, Homo sapiens
  misc_feature (7)..(7): n is a, c, g, or t
  misc_feature (35)..(35): n is a, c, g, or t
  misc_feature (46)..(46): n is a, c, g, or t
  misc_feature (78)..(79): n is a, c, g, or t
ggaaaanagcttatgaacatgaattacgaaatttnaatacgactcnactaatagggaaatttgccctcgaggcccaannaattcggcacgagggtctgcgagcggcccctgcccggctcccaggtccctgcgcgaccccgcccttcccgagaccccagccgggctgccgcccgcgtcccggaaggtgagtgggggaggggagatggagcctggggctgccgagaagcagggagagaggggaaagctccagcctgaaccatgtttttcacttgtggcccaaatgaggccatggtggtctccgggttctgccgaagccccccagtcatggtggctggagggcgtgtctttgtcctgccctgcatccaacagatccagaggatctctctcaacacactgaccctcaatgtcaagagtgaaaaggtttacactcgccatggggtccccatctcagtcactggcattgcccaggtaaaaatccaggggcagaacaaggagatgttggcggccgcctgtcagatgttcctggggaagacggaggctgagattgcccacattgccctggagacgttagagggccaccagagggccatcatggcccacatgactgtggaggagatctataaggacaggcagaaattctcagaacaggttttcaaagtggcctcctcagacctggtcaacatgggcatcagtgtggttagctacactctgaaggacattcacgatgaccaggactatttgcactctttggggaaggctcgaacagctcaagtccaaaaagatgcacggattggagaagcagaggccaagagagatgctgggatccgggaagctaaagccaagcaggaaaaggtgtctgctcagtacctgagtgagatcgagatggccaaggcacagagagattacgaactgaagaaggccgcctatgacatcgaggtcaacacccgccgagcacaggctgacctggcctatcagcttcagcccgagccgaggctgagcagatggccaagaaggcagaagccttccagctgtaccaagaggctgctcagctggacatgctgctagagaagctgccccaggtggcagaggagatcagtggtcccttgacttcagccaataagatcacactggtgtccagcggcagtgggaccatgggggcagccaaagtgactggggaagtactggacattctaactcgcctgccagagagtgtggaaagactcacaggcgtgagcatctcccaggtgaatcacaagcctttgagaacagcctgagccttcagccctcacagatgcccagcctcatagctgaagttgcctgaatgatcctcctgttgcatgtaacccactggcctccctgagcatgtccattgacagtgaggtcccacccctcatctctccttgccaaatagtttgtgccttgtcttgaagggggttgctccccttgccaacctcacactgctatgattgccaactccagcggtcccatgtcagccttctgatgatcccactccaccccacctcaacttatttaacttcctaattaaatcagactgtttgagcctgttgtctagaatattttcctgaccaagactgagggatgggctggaggttttcaactttgctacccaaataaattgctgtaagtaagtactaataaaacagaagcaactggaaattaaaaaaa

SEQ ID NO: 365433 - DNA, 1588 bp, Homo sapiens
  misc_feature (7)..(7): n is a, c, g, or t
  misc_feature (35)..(35): n is a, c, g, or t
  misc_feature (46)..(46): n is a, c, g, or t
  misc_feature (78)..(79): n is a, c, g, or t
ggaaaanagcttatgaacatgaattacgaaatttnaatacgactcnactaatagggaaatttgccctcgaggcccaannaattcggcacgagggtctgcgagcggcccctgcccggctcccaggtccctgcgcgaccccgcccttcccgagaccccagccgggctgccgcccgcgtcccggaaggtgagtgggggaggggagatggagcctggggctgccgagaagcagggagagaggggaaagctccagcctgaaccatgtttttcacttgtggcccaaatgaggccatggtggtctccgggttctgccgaagccccccagtcatggtggctggagggcgtgtctttgtcctgccctgcatccaacagatccagaggatctctctcaacacactgaccctcaatgtcaagagtgaaaaggtttacactcgccatggggtccccatctcagtcactggcattgcccaggtaaaaatccaggggcagaacaaggagatgttggcggccgcctgtcagatgttcctggggaagacggaggctgagattgcccacattgccctggagacgttagagggccaccagagggccatcatggcccacatgactgtggaggagatctataaggacaggcagaaattctcagaacaggttttcaaagtggcctcctcagacctggtcaacatgggcatcagtgtggttagctacactctgaaggacattcacgatgaccaggactatttgcactctttggggaaggctcgaacagctcaagtccaaaaagatgcacggattggagaagcagaggccaagagagatgctgggatccgggaagctaaagccaagcaggaaaaggtgtctgctcagtacctgagtgagatcgagatggccaaggcacagagagattacgaactgaagaaggccgcctatgacatcgaggtcaacacccgccgagcacaggctgacctggcctatcagcttcaggtggcagaggagatcagtggtcccttgacttcagccaataagatcacactggtgtccagcggcagtgggaccatgggggcagccaaagtgactggggaagtactggacattctaactcgcctgccagagagtgtggaaagactcacaggcgtgagcatctcccaggtgaatcacaagcctttgagaacagcctgagccttcagccctcacagatgcccagcctcatagctgaagttgcctgaatgatcctcctgttgcatgtaacccactggcctccctgagcatgtccattgacagtgaggtcccacccctcatctctccttgccaaatagtttgtgccttgtcttgaagggggttgctccccttgccaacctcacactgctatgattgccaactccagcggtcccatgtcagccttctgatgatcccactccaccccacctcaacttatttaacttcctaattaaatcagactgtttgagcctgttgtctagaatattttcctgaccaagactgagggatgggctggaggttttcaactttgctacccaaataaattgctgtaagtaagtactaataaaacagaagcaactggaaattaaaaaaa

SEQ ID NO: 365434 - DNA, 1733 bp, Homo sapiens
  misc_feature (7)..(7): n is a, c, g, or t
  misc_feature (35)..(35): n is a, c, g, or t
  misc_feature (46)..(46): n is a, c, g, or t
  misc_feature (78)..(79): n is a, c, g, or t
ggaaaanagcttatgaacatgaattacgaaatttnaatacgactcnactaatagggaaatttgccctcgaggcccaannaattcggcacgagggtctgcgagcggcccctgcccggctcccaggtccctgcgcgaccccgcccttcccgagaccccagccgggctgccgcccgcgtcccggaaggtgagtgggggaggggagatggagcctggggctgccgagaagcagggagagaggggaaagctccagcctgaaccatgtttttcacttgtggcccaaatgaggccatggtggtctccgggttctgccgaagccccccagtcatggtggctggagggcgtgtctttgtcctgccctgcatccaacagatccagaggatctctctcaacacactgaccctcaatgtcaagagtgaaaaggtttacactcgccatggggtccccatctcagtcactggcattgcccaggtgaagctttcagagccttttccccacagtccacttccccatcaccctctctcccagacattaagacatcttctggccacagtcttctcaacccttgcctgcagagaagttcctctgctagtctcatcttttccaggcaccccaaggcacttgcctcctcctcctttctttccctgaaatggaagaagcatttcttagagggctctcccttctctctctgctttttctctgacttcatgagacccccaccacacctttcctacccctactctggctacaggtaaaaatccaggggcagaacaaggagatgttggcggccgcctgtcagatgttcctggggaagacggaggctgagattgcccacattgccctggagacgttagagggccaccagagggccatcatggcccacatgactgtggaggagatctataaggacaggcagaaattctcagaacaggttttcaaagtggcctcctcagacctggtcaacatgggcatcagtgtggttagctacactctgaaggacattcacgatgaccaggactatttgcactctttggggaaggctcgaacagctcaagtccaaaaagatgcacggattggagaagcagaggccaagagagatgctgggatccgggaagctaaagccaagcaggaaaaggtgtctgctcagtacctgagtgagatcgagatggccaaggcacagagagattacgaactgaagaaggccgcctatgacatcgaggtcaacacccgccgagcacaggctgacctggcctatcagcttcaggtggccaagactaagcagcagattgaggagcagcgggtgcaggtgcaggtggtggagcgggcccagcaggtggcagtgcaggagcaggaggaagtactggacattctaactcgcctgccagagagtgtggaaagactcacaggcgtgagcatctcccaggtgaatcacaagcctttgagaacagcctgagccttcagccctcacagatgcccagcctcatagctgaagttgcctgaatgatcctcctgttgcatgtaacccactggcctccctgagcatgtccattgacagtgaggtcccacccctcatctctccttgccaaatagtttgtgccttgtcttgaagggggttgctccccttgccaacctcacactgctatgattgccaactccagcggtcccatgtcagccttctgatgatcccactccaccccacctcaacttatttaacttcctaattaaatcagactgtt

SEQ ID NO: 365435 - DNA, 641 bp, Homo sapiens
  misc_feature (11)..(11): n is a, c, g, or t
ggtgtgggtgntctagaggatcctccgctggccagtggcagaggagatcagtggtcccttgacttcagccaataagatcacactggtgtccagcggcagtgggaccatgggggcagccaaagtgactggggaagtactggacattctaactcgcctgccagagagtgtggaaagactcacaggcgtgagcatctcccaggtgaatcacaagcctttgagaacagcctgagccttcagccctcacagatgcccagcctcatagctgaagttgcctgaatgatcctcctgttgcatgtaacccactggcctccctgagcatgtccattgacagtgaggtcccacccctcatctctccttgccaaatagtttgtgccttgtcttgaagggggttgctccccttgccaacctcacactgctatgattgccaactccagcggtcccatgtcagccttctgatgatcccactccaccccacctcaacttatttaacttcctaattaaatcagactgtttgagcctgttgtctagaatattttcctgaccaagactgagggatgggctggaggttttcaactttgctacccaaataaattgctgtaagtaagtactaataaaacagaagcaactggaaattaaaaaaa

SEQ ID NO: 365436 - DNA, 1937 bp, Homo sapiens
  misc_feature (7)..(7): n is a, c, g, or t
  misc_feature (35)..(35): n is a, c, g, or t
  misc_feature (46)..(46): n is a, c, g, or t
  misc_feature (78)..(79): n is a, c, g, or t
  misc_feature (1154)..(1154): n is a, c, g, or t
  misc_feature (1166)..(1166): n is a, c, g, or t
  misc_feature (1334)..(1334): n is a, c, g, or t
  misc_feature (1336)..(1336): n is a, c, g, or t
ggaaaanagcttatgaacatgaattacgaaatttnaatacgactcnactaatagggaaatttgccctcgaggcccaannaattcggcacgagggtctgcgagcggcccctgcccggctcccaggtccctgcgcgaccccgcccttcccgagaccccagccgggctgccgcccgcgtcccggaaggtgagtgggggaggggagatggagcctggggctgccgagaagcagggagagaggggaaagctccagcctgaaccatgtttttcacttgtggcccaaatgaggccatggtggtctccgggttctgccgaagccccccagtcatggtggctggagggcgtgtctttgtcctgccctgcatccaacagatccagaggatctctctcaacacactgaccctcaatgtcaagagtgaaaaggtttacactcgccatggggtccccatctcagtcactggcattgcccaggtgaagctttcagagccttttccccacagtccacttccccatcaccctctctcccagacattaagacatcttctggccacagtcttctcaacccttgcctgcagagaagttcctctgctagtctcatcttttccaggcaccccaaggcacttgcctcctcctcctttctttccctgaaatggaagaagcatttcttagagggctctcccttctctctctgctttttctctgacttcatgagacccccaccacacctttcctacccctactctggctacaggtaaaaatccaggggcagaacaaggagatgttggcggccgcctgtcagatgttcctggggaagacggaggctgagattgcccacattgccctggagacgttagagggccaccagagggccatcatggcccacatgactgtggaggagatctataaggacaggcagaaattctcagaacaggttttcaaagtggcctcctcagacctggtcaacatgggcatcagtgtggttagctacactctgaaggacattcacgatgaccaggactatttgcactctttggggaaggctcgaacagctcaagtccaaaaagatgcacggattggagaagcagaggccaagagagatgctgggatccggaagctaaagccaacgcatggggggaacacacaggggtgtctgctcnatgtacctgagntttggaaagggcaaatttcccggaacggcaatgggcccaagggcacagagagattacgaactgaagaaggccgcctatgacatcgaggtcaacacccgccgagcacaggctgacctggcctatcagcttcagccttttgggggcccccctattccaaacgccttcagngngtggccaagactaagcagcagattgaggagcagcgggtgcaggtgcaggtggtggagcgggcccagcaggtggcagtgcaggagcaggaggaagtactggacattctaactcgcctgccagagagtgtggaaagactcacaggcgtgagcatctcccaggtgaatcacaagcctttgagaacagcctgagccttcagccctcacagatgcccagcctcatagctgaagttgcctgaatgatcctcctgttgcatgtaacccactggcctccctgagcatgtccattgacagtgaggtcccacccctcatctctccttgccaaatagtttgtgccttgtcttgaagggggttgctccccttgccaacctcacactgctatgattgccaactccagcggtcccatgtcagccttctgatgatcccactccaccccacctcaacttatttaacttcctaattaaatcagactgtttgagcctgttgtctagaatattttcctgaccaagactgagggatgggctggaggttttcaactttgctacccaaataaattgctgtaagtaagtactaataaaacagaagcaactggaaattaaaaaaa

SEQ ID NO: 365437 - DNA, 967 bp, Homo sapiens
  misc_feature (7)..(7): n is a, c, g, or t
  misc_feature (35)..(35): n is a, c, g, or t
  misc_feature (46)..(46): n is a, c, g, or t
  misc_feature (78)..(79): n is a, c, g, or t
ggaaaanagcttatgaacatgaattacgaaatttnaatacgactcnactaatagggaaatttgccctcgaggcccaannaattcggcacgagggtctgcgagcggcccctgcccggctcccaggtccctgcgcgaccccgcccttcccgagaccccagccgggctgccgcccgcgtcccggaaggtgagtgggggaggggagatggagcctggggctgccgagaagcagggagagaggggaaagctccagcctgaaccatgtttttcacttgtggcccaaatgaggccatggtggtctccgggttctgccgaagccccccagtcatggtggctggagggcgtgtctttgtcctgccctgcatccaacagatccagaggatctctctcaacacactgaccctcaatgtcaagagtgaaaaggtttacactcgccatggggtccccatctcagtcactggcattgcccaggtgaagctttcagagccttttccccacagtccacttccccatcaccctctctcccagacattaagacatcttctggccacagtcttctcaacccttgcctgcagagaagttcctctgctagtctcatcttttccaggcaccccaaggcacttgcctcctcctcctttctttccctgaaatggaagaagcatttcttagagggctctcccttctctctctgctttttctctgacttcatgagacccccaccacacctttcctacccctactctggctacaggtaaaaatccaggggcagaacaaggagatgttggcggccgcctgtcagatgttcctggggaagacggaggctgagaagaagacatatgagagagggctctccattctctctcagctgtatctacgacttcatagagacccaccaccacacctgttcttacccctactccggctacaggtaaaaacaggggcagaaccagagatgtggacgcgcggggga

SEQ ID NO: 365438 - DNA, 549 bp, Homo sapiens
tggtgctgtctggtggtgctgcttgatcggggatttcttgttcttaatgatttccgtcaatctcacaagcatccttaaccctcagatgcgtggggaagctgaggcctttgccataggggcccgagcccgagccgaggctgagcagatggccaagaaggcagaagccttccagctgtaccaagaggctgctcagctggacatgctgctagagaagctgccccaggtctggaggtcatgtgggcaccaagaaaggaggaaatagaaccagggactaaggggtggggtgtagtgaggggcttagggagaaacagcctagggggactctaaattaggggtgggaattattagtgaccaaagtgaggaaggatgatcagtggaacgaggaccttaaaacccagagtaagttgttttatgaggaatgtggtcagatcatgggcactgagtgggtgtctctctcctgccagggtggcagaggagatcagtggtcccttgacttcagccaataagatcacactggtgtccagcggcagtgggaccatgggggcagcc

SEQ ID NO: 365439 - DNA, 577 bp, Homo sapiens
caaaagtgagtccatgggcctgtgggaatgtgaggggagtgggtccgctccaccagatgccagcaccggggccagtgcagctcagagccctgtgtcggactacagggcctgcacagacggtcactcaaagaaagatgtccctgtgccctactccttggcgatggcaaagggcttctccacctcgatcttgccgcagtctgcgatgatcacatccttcaggggtttatcccggctgtctgtcttggtgctctccaccttctcaggaccggcacgagggaaaggagcccagaggtgctgtcaggtggcgaggatggagctgttcgactttgggacctgcgcacagccaaggaggtccagacgatcgaggtctataagcacgaggagtgctcgaggccccacaatgggcgctggattggatgtttggcaactgattccgactggatggtctgtggagggggcccagccctcaccctctggcacctccgatcctccacacccaccaccatcttccccatccgggcgccacagaagcacgtcaccttctaccaggacctggtgaggccctgtgtctcacttc

SEQ ID NO: 365440 - DNA, 266 bp, Homo sapiens
ctgctccgcccctctctgcccttcgtgtcctggaaggggccggctgggaggcaggggtgtgggcaggccagtcatgcccctctttcctccaggtcctgacagctgcaggcaacagctgccgggtggatgtcttcaccaacctgggttaccgagccttctccctgtccttctgatctctgacgacacccccagccagctcagggttttagagtgtttttcattttctttttttttttttttttacaataaagtttcaggctttttta

SEQ ID NO: 365441 - DNA, 1872 bp, Homo sapiens
gctttaggcgggcacagccgcgaggttctgcgcgggcgcggaagacgggcggcgcgtggcggaaggcaggcttgctcctcggggtgggggagggtatccggcttaagggggctgcggtggacaccacttcttaatgtcgggggtcttcgcggcgctcacctcggctcctagggttcgggacggtacgcaccagccaccttcgcgccgaaggcggtagggcgccacggagaggaaccgctctaggcacgtaaggcctcgtgaggttgcgtcgcgcgcggagcactctgggacttgtagttctggagatggagcgagctgtgccgctcgcggtgcctctgggtcagacagaggtgttccaggccttgcagcggctccatatgaccatcttctcccagagcgtctcaccatgtgggaagtttctggcggctggcaacaattacgggcagattgccatcttcagcttgtcctctgctttgagctcagaagccaaagaggaaagtaagaagccggtggtgactttccaagcccatgatgggcccgtctatagcatggtttccaccgatcgacatctgcttagtgctggggatggggaggtgaaggcctggctttgggcggagatgctcaagaagggctgtaaggagctgtggcgtcgtcagcctccatacaggaccagcctggaagtgcctgagatcaacgctttgctgctggtccccaaggagaattccctcatcctggctgggggagactgtcagttgcacactatggaccttgaaactgggactttcacgagggtcctccggggccacacagactacatccactgcctggcactgcgggaaaggagcccagaggtgctgtcaggtggcgaggatggagctgttcgactttgggacctgcgcacagccaaggaggtccagacgatcgaggtctataagcacgaggagtgctcgaggccccacaatgggcgctggattggatgtttggcaactgattccgactggatggtctgtggagggggcccagccctcaccctctggcacctccgatcctccacacccaccaccatcttccccatccgggcgccacagaagcacgtcaccttctaccaggacctgattctgtcagctggccagggccgctgcgtcaaccagtggcagctgagcggggagctgaaggcccaggtgcctggctcctccccagggctgctcagcctcagcctcaaccagcagcctgccgcgcctgagtgcaaggtcctgacagctgcaggcaacagctgccgggtggatgtcttcaccaacctgggttaccgagccttctccctgtccttctgatctctgacgacacccccagccagctcagggttttagagtgtttttcattttctttttttttttttttttacaataaagtttcaggcttttttaccatgctctttctttctatgaatgggggccaaatcggtggagtgatttatatattactctgtccgatcttgatacataaatacccagccccatccctgccctagaaaagatagacctatattaattcggaaaatagctctgttcacctgcccctgccacccacctggagctcctgccccacaaagctggcccctgctccggatgagcccctgctcccgatgagcccttgcccagcatcctggggcggggagggcatcagcttcttttggaagacaatctgggccctgtcgctccattggcctgaagaggaaagtgagcccctaagtgggcaagggcagccctctgggcccagccgtcaggtccttcggaagaggttactgagaaagccaccggcgggcccggggcccaggcgcagcgagaagcggggcgcggcacggcgcggggtcga

SEQ ID NO: 365442 - DNA, 1870 bp, Homo sapiens
tacggctaggtactgaggctggggttgaatcggccgagggaagtgggcggcgcgtggcggaaggcaggcttgctcctcggggtgggggagggtatccggcttaagggggctgcggtggacaccacttcttaatgtcgggggtcttcgcggcgctcacctcggctcctagggttcgggacggtacgcaccagccaccttcgcgccgaaggcggtagggcgccacggagaggaaccgctctaggcacgtaaggcctcgtgaggttgcgtcgcgcgcggagcactctgggacttgtagttctggagatggagcgagctgtgccgctcgcggtgcctctgggtcagacagaggtgttccaggccttgcagcggctccatatgaccatcttctcccagagcgtctcaccatgtgggaagtttctggcggctggcaacaattacgggcagattgccatcttcagcttgtcctctgctttgagctcagaagccaaagaggaaagtaagaagccggtggtgactttccaagcccatgatgggcccgtctatagcatggtttccaccgatcgacatctgcttagtgctggggatggggaggtgaaggcctggctttgggcggagatgctcaagaagggctgtaaggagctgtggcgtcgtcagcctccatacaggaccagcctggaagtgcctgagatcaacgctttgctgctggtccccaaggagaattccctcatcctggctgggggagactgtcagttgcacactatggaccttgaaactgggactttcacgagggtcctccggggccacacagactacatccactgcctggcactgcgggaaaggagcccagaggtgctgtcaggtggcgaggatggagctgttcgactttgggacctgcgcacagccaaggaggtccagacgatcgaggtctataagcacgaggagtgctcgaggccccacaatgggcgctggattggatgtttggcaactgattccgactggatggtctgtggagggggcccagccctcaccctctggcacctccgatcctccacacccaccaccatcttccccatccgggcgccacagaagcacgtcaccttctaccaggacctgattctgtcagctggccagggccgctgcgtcaaccagtggcagctgagcggggagctgaaggcccaggtgcctggctcctccccagggctgctcagcctcagcctcaaccagcagcctgccgcgcctgagtgcaaggtcctgacagctgcaggcaacagctgccgggtggatgtcttcaccaacctgggttaccgagccttctccctgtccttctgatctctgacgacacccccagccagctcagggttttagagtgtttttcattttctttttttttttttttttacaataaagtttcaggcttttttaccatgctctttctttctatgaatgggggccaaatcggtggagtgatttatatattactctgtccgatcttgatacataaatacccagccccatccctgccctagaaaagatagacctatattaattcggaaaatagctctgttcacctgcccctgccacccacctggagctcctgccccacaaagctggcccctgctccggatgagcccctgctcccgatgagcccttgcccagcatcctggggcggggagggcatcagcttcttttggaagacaatctgggccctgtcgctccattggcctgaagaggaaagtgagcccctaagtgggcaagggcagccctctgggcccagccgtcaggtccttcggaagaggttactgagaaagccaccggcgggcccggggcccaggcgcagcgagaagcggggcgcggcacggcgcggggtcga

SEQ ID NO: 365443 - DNA, 1149 bp, Homo sapiens
gctttaggcgggcacagccgcgaggttctgcgcgggcgcggaagacgggcggcgcgtggcggaaggcaggcttgctcctcggggtgggggagggtatccggcttaagggggctgcggtggacaccacttcttaatgtcgggggtcttcgcggcgctcacctcggctcctagggttcgggacggtacgcaccagccaccttcgcgccgaaggcggtagggcgccacggagaggaaccgctctaggcacgtaaggcctcgtgaggttgcgtcgcgcgcggagcactctgggacttgtagttctggagatggagcgagctgtgccgctcgcggtgcctctgggtcagacagaggtgttccaggccttgcagcggctccatatgaccatcttctcccagagcgtctcaccatgtgggaagtttctggcggctggcaacaattacgggcagattgccatcttcagcttgtcctctgctttgagctcagaagccaaagaggaaagtaagaagccggtggtgactttccaagcccatgatgggcccgtctatagcatggtttccaccgatcgacatctgcttagtgctggggatggggaggtgaaggcctggctttgggcggagatgctcaagaagggctgtaaggagctgtggcgtcgtcagcctccatacaggaccagcctggaagtgcctgagatcaacgctttgctgctggtccccaaggagaattccctcatcctggctgggggagactgtcagttgcacactatggaccttgaaactgggactttcacgagggtcctccggggccacacagactacatccactgcctggcactgcgggaaaggagcccagaggtgctgtcaggtggcgaggatggagctgttcgactttgggagcccatgatggcccgtctatagcatcggtttccaccgatcgacatctgcttagtgctggggatggggagatgaaggcctggctttgggacggagatgctcaagaagggctgtaaggagctgtggcgtcgtcagcctcacatacaggaccagcctggaagtgcctgagatcaacagctttgctgctggtccccaaggagaattccatcatcctggctgggggagactgtcagaagcacgtcaccttctcagacactgg

SEQ ID NO: 365444 - DNA, 1946 bp, Homo sapiens
gctttaggcgggcacagccgcgaggttctgcgcgggcgcggaagacgggcggcgcgtggcggaaggcaggcttgctcctcggggtgggggagggtatccggcttaagggggctgcggtggacaccacttcttaatgtcgggggtcttcgcggcgctcacctcggctcctagggttcgggacggtacgcaccagccaccttcgcgccgaaggcggtagggcgccacggagaggaaccgctctaggcacgtaaggcctcgtgaggttgcgtcgcgcgcggagcactctgggacttgtagttctggagatggagcgagctgtgccgctcgcggtgcctctgggtcagacagaggtgttccaggccttgcagcggctccatatgaccatcttctcccagagcgtctcaccatgtgggaagtttctggcggctggcaacaattacgggcagattgccatcttcagcttgtcctctgctttgagctcagaagccaaagaggaaagtaagaagccggtggtgactttccaaggtgggtatacctgtggagtctggcttcaggactttgggtgggattggctcactcagttctgcatttctctttagcccatgatgggcccgtctatagcatggtttccaccgatcgacatctgcttagtgctggggatggggaggtgaaggcctggctttgggcggagatgctcaagaagggctgtaaggagctgtggcgtcgtcagcctccatacaggaccagcctggaagtgcctgagatcaacgctttgctgctggtccccaaggagaattccctcatcctggctgggggagactgtcagttgcacactatggaccttgaaactgggactttcacgagggtcctccggggccacacagactacatccactgcctggcactgcgggaaaggagcccagaggtgctgtcaggtggcgaggatggagctgttcgactttgggacctgcgcacagccaaggaggtccagacgatcgaggtctataagcacgaggagtgctcgaggccccacaatgggcgctggattggatgtttggcaactgattccgactggatggtctgtggagggggcccagccctcaccctctggcacctccgatcctccacacccaccaccatcttccccatccgggcgccacagaagcacgtcaccttctaccaggacctgattctgtcagctggccagggccgctgcgtcaaccagtggcagctgagcggggagctgaaggcccaggtgcctggctcctccccagggctgctcagcctcagcctcaaccagcagcctgccgcgcctgagtgcaaggtcctgacagctgcaggcaacagctgccgggtggatgtcttcaccaacctgggttaccgagccttctccctgtccttctgatctctgacgacacccccagccagctcagggttttagagtgtttttcattttctttttttttttttttttacaataaagtttcaggcttttttaccatgctctttctttctatgaatgggggccaaatcggtggagtgatttatatattactctgtccgatcttgatacataaatacccagccccatccctgccctagaaaagatagacctatattaattcggaaaatagctctgttcacctgcccctgccacccacctggagctcctgccccacaaagctggcccctgctccggatgagcccctgctcccgatgagcccttgcccagcatcctggggcggggagggcatcagcttcttttggaagacaatctgggccctgtcgctccattggcctgaagaggaaagtgagcccctaagtgggcaagggcagccctctgggcccagccgtcaggtccttcggaagaggttactgagaaagccaccggcgggcccggggcccaggcgcagcgagaagcggggcgcggcacggcgcggggtcga

SEQ ID NO: 365445 - DNA, 1551 bp, Homo sapiens
taagtcttcaagagcagaaaggctcctcttaaaacctcattttatttacctatgtccaaggacagctgcaatccataaaggaaagggatacagaagtcaactaactatataaaaggacagactgccaccatgaaaaatcaagagacaggagaaaatgctcagaagccaaagaggaaagtaagaagccggtggtgactttccaagcccatgatgggcccgtctatagcatggtttccaccgatcgacatctgcttagtgctggggatggggaggtgaaggcctggctttgggcggagatgctcaagaagggctgtaaggagctgtggcgtcgtcagcctccatacaggaccagcctggaagtgcctgagatcaacgctttgctgctggtccccaaggagaattccctcatcctggctgggggagactgtcagttgcacactatggaccttgaaactgggactttcacgagggtcctccggggccacacagactacatccactgcctggcactgcgggaaaggagcccagaggtgctgtcaggtggcgaggatggagctgttcgactttgggacctgcgcacagccaaggaggtccagacgatcgaggtctataagcacgaggagtgctcgaggccccacaatgggcgctggattggatgtttggcaactgattccgactggatggtctgtggagggggcccagccctcaccctctggcacctccgatcctccacacccaccaccatcttccccatccgggcgccacagaagcacgtcaccttctaccaggacctgattctgtcagctggccagggccgctgcgtcaaccagtggcagctgagcggggagctgaaggcccaggtgcctggctcctccccagggctgctcagcctcagcctcaaccagcagcctgccgcgcctgagtgcaaggtcctgacagctgcaggcaacagctgccgggtggatgtcttcaccaacctgggttaccgagccttctccctgtccttctgatctctgacgacacccccagccagctcagggttttagagtgtttttcattttctttttttttttttttttacaataaagtttcaggcttttttaccatgctctttctttctatgaatgggggccaaatcggtggagtgatttatatattactctgtccgatcttgatacataaatacccagccccatccctgccctagaaaagatagacctatattaattcggaaaatagctctgttcacctgcccctgccacccacctggagctcctgccccacaaagctggcccctgctccggatgagcccctgctcccgatgagcccttgcccagcatcctggggcggggagggcatcagcttcttttggaagacaatctgggccctgtcgctccattggcctgaagaggaaagtgagcccctaagtgggcaagggcagccctctgggcccagccgtcaggtccttcggaagaggttactgagaaagccaccggcgggcccggggcccaggcgcagcgagaagcggggcgcggcacggcgcggggtcga

SEQ ID NO: 365446 - DNA, 1845 bp, Homo sapiens
gctttaggcgggcacagccgcgaggttctgcgcgggcgcggaagacgggcggcgcgtggcggaaggcaggcttgctcctcggggtgggggagggtatccggcttaagggggctgcggtggacaccacttcttaatgtcgggggtcttcgcggcgctcacctcggctcctagggttcgggacggtacgcaccagccaccttcgcgccgaaggcggtagggcgccacggagaggaaccgctctaggcacgtaaggcctcgtgaggttgcgtcgcgcgcggagcactctgggacttgtagttctggagatggagcgagctgtgccgctcgcggtgcctctgggtcagacagaggtgttccaggccttgcagcggctccatatgaccatcttctcccagagcgtctcaccatgtgggaagtttctggcggctggcaacaattacgggcagattgccatcttcagcttgtcctctgctttgagctcagaagccaaagaggaaacccatgatgggcccgtctatagcatggtttccaccgatcgacatctgcttagtgctggggatggggaggtgaaggcctggctttgggcggagatgctcaagaagggctgtaaggagctgtggcgtcgtcagcctccatacaggaccagcctggaagtgcctgagatcaacgctttgctgctggtccccaaggagaattccctcatcctggctgggggagactgtcagttgcacactatggaccttgaaactgggactttcacgagggtcctccggggccacacagactacatccactgcctggcactgcgggaaaggagcccagaggtgctgtcaggtggcgaggatggagctgttcgactttgggacctgcgcacagccaaggaggtccagacgatcgaggtctataagcacgaggagtgctcgaggccccacaatgggcgctggattggatgtttggcaactgattccgactggatggtctgtggagggggcccagccctcaccctctggcacctccgatcctccacacccaccaccatcttccccatccgggcgccacagaagcacgtcaccttctaccaggacctgattctgtcagctggccagggccgctgcgtcaaccagtggcagctgagcggggagctgaaggcccaggtgcctggctcctccccagggctgctcagcctcagcctcaaccagcagcctgccgcgcctgagtgcaaggtcctgacagctgcaggcaacagctgccgggtggatgtcttcaccaacctgggttaccgagccttctccctgtccttctgatctctgacgacacccccagccagctcagggttttagagtgtttttcattttctttttttttttttttttacaataaagtttcaggcttttttaccatgctctttctttctatgaatgggggccaaatcggtggagtgatttatatattactctgtccgatcttgatacataaatacccagccccatccctgccctagaaaagatagacctatattaattcggaaaatagctctgttcacctgcccctgccacccacctggagctcctgccccacaaagctggcccctgctccggatgagcccctgctcccgatgagcccttgcccagcatcctggggcggggagggcatcagcttcttttggaagacaatctgggccctgtcgctccattggcctgaagaggaaagtgagcccctaagtgggcaagggcagccctctgggcccagccgtcaggtccttcggaagaggttactgagaaagccaccggcgggcccggggcccaggcgcagcgagaagcggggcgcggcacggcgcggggtcga

SEQ ID NO: 365447 - DNA, 1955 bp, Homo sapiens
gctttaggcgggcacagccgcgaggttctgcgcgggcgcggaagacgggcggcgcgtggcggaaggcaggcttgctcctcggggtgggggagggtatccggcttaagggggctgcggtggacaccacttcttaatgtcgggggtcttcgcggcgctcacctcggctcctagggttcgggacggtacgcaccagccaccttcgcgccgaaggcggtagggcgccacggagaggaaccgctctaggcacgtaaggcctcgtgaggttgcgtcgcgcgcggagcactctgggacttgtagttctggagatggagcgagctgtgccgctcgcggtgcctctgggtcagacagaggtgttccaggccttgcagcggctccatatgaccatcttctcccagagcgtctcaccatgtgggaagtttctggcggctggcaacaattacgggcagattgccatcttcagcttgtcctctgctttgagctcagaagccaaagaggaaagtaagaagccggtggtgactttccaagcccatgatgggcccgtctatagcatggtttccaccgatcgacatctgcttagtgctggggatggggaggtgaaggcctggctttgggcggagatgctcaagaaggtaaggagtcgagcttgggaaagggctggggtgcctggacccagagagagcctttgaggtcacctggtatatctcttttgaagggctgtaaggagctgtggcgtcgtcagcctccatacaggaccagcctggaagtgcctgagatcaacgctttgctgctggtccccaaggagaattccctcatcctggctgggggagactgtcagttgcacactatggaccttgaaactgggactttcacgagggtcctccggggccacacagactacatccactgcctggcactgcgggaaaggagcccagaggtgctgtcaggtggcgaggatggagctgttcgactttgggacctgcgcacagccaaggaggtccagacgatcgaggtctataagcacgaggagtgctcgaggccccacaatgggcgctggattggatgtttggcaactgattccgactggatggtctgtggagggggcccagccctcaccctctggcacctccgatcctccacacccaccaccatcttccccatccgggcgccacagaagcacgtcaccttctaccaggacctgattctgtcagctggccagggccgctgcgtcaaccagtggcagctgagcggggagctgaaggcccaggtgcctggctcctccccagggctgctcagcctcagcctcaaccagcagcctgccgcgcctgagtgcaaggtcctgacagctgcaggcaacagctgccgggtggatgtcttcaccaacctgggttaccgagccttctccctgtccttctgatctctgacgacacccccagccagctcagggttttagagtgtttttcattttctttttttttttttttttacaataaagtttcaggcttttttaccatgctctttctttctatgaatgggggccaaatcggtggagtgatttatatattactctgtccgatcttgatacataaatacccagccccatccctgccctagaaaagatagacctatattaattcggaaaatagctctgttcacctgcccctgccacccacctggagctcctgccccacaaagctggcccctgctccggatgagcccctgctcccgatgagcccttgcccagcatcctggggcggggagggcatcagcttcttttggaagacaatctgggccctgtcgctccattggcctgaagaggaaagtgagcccctaagtgggcaagggcagccctctgggcccagccgtcaggtccttcggaagaggttactgagaaagccaccggcgggcccggggcccaggcgcagcgagaagcggggcgcggcacggcgcggggtcga

SEQ ID NO: 365448 - DNA, 1249 bp, Homo sapiens
gctttaggcgggcacagccgcgaggttctgcgcgggcgcggaagacgggcggcgcgtggcggaaggcaggcttgctcctcggggtgggggagggtatccggcttaagggggctgcggtggacaccacttcttaatgtcgggggtcttcgcggcgctcacctcggctcctagggttcgggacggtacgcaccagccaccttcgcgccgaaggcggtagggcgccacggagaggaaccgctctaggcacgtaaggcctcgtgaggttgcgtcgcgcgcggagcactctgggacttgtagttctggagatggagcgagctgtgccgctcgcggtgcctctgggtcagacagaggtgttccaggccttgcagcggctccatatgaccatcttctcccagagcgtctcaccatgtgggaagtttctggcggctggcaacaattacgggcagattgccatcttcagcttgtcctctgctttgagctcagaagccaaagaggaaagtaagaagccggtggtgactttccaagcccatgatgggcccgtctatagcatggtttccaccgatcgacatctgcttagtgctggggatggggaggtgaaggcctggctttgggcggagatgctcaagaagggctgtaaggagctgtggcgtcgtcagcctccatacaggaccagcctggaagtgcctgagatcaacgctttgctgctggtccccaaggacacccccagccagctcagggttttagagtgtttttcattttctttttttttttttttttacaataaagtttcaggcttttttaccatgctctttctttctatgaatgggggccaaatcggtggagtgatttatatattactctgtccgatcttgatacataaatacccagccccatccctgccctagaaaagatagacctatattaattcggaaaatagctctgttcacctgcccctgccacccacctggagctcctgccccacaaagctggcccctgctccggatgagcccctgctcccgatgagcccttgcccagcatcctggggcggggagggcatcagcttcttttggaagacaatctgggccctgtcgctccattggcctgaagaggaaagtgagcccctaagtgggcaagggcagccctctgggcccagccgtcaggtccttcggaagaggttactgagaaagccaccggcgggcccggggcccaggcgcagcgagaagcggggcgcggcacggcgcggggtcga

SEQ ID NO: 365449 - DNA, 1190 bp, Homo sapiens
aaatgcaggctgtacggtctgggtgttaggataggagaattccctcatcctggctgggggagactgtcagttgcacactatggaccttgaaactgggactttcacgagggtcctccggggccacacagactacatccactgcctggcactgcgggaaaggagcccagaggtgctgtcaggtggcgaggatggagctgttcgactttgggacctgcgcacagccaaggaggtccagacgatcgaggtctataagcacgaggagtgctcgaggccccacaatgggcgctggattggatgtttggcaactgattccgactggatggtctgtggagggggcccagccctcaccctctggcacctccgatcctccacacccaccaccatcttccccatccgggcgccacagaagcacgtcaccttctaccaggacctgattctgtcagctggccagggccgctgcgtcaaccagtggcagctgagcggggagctgaaggcccaggtgcctggctcctccccagggctgctcagcctcagcctcaaccagcagcctgccgcgcctgagtgcaaggtcctgacagctgcaggcaacagctgccgggtggatgtcttcaccaacctgggttaccgagccttctccctgtccttctgatctctgacgacacccccagccagctcagggttttagagtgtttttcattttctttttttttttttttttacaataaagtttcaggcttttttaccatgctctttctttctatgaatgggggccaaatcggtggagtgatttatatattactctgtccgatcttgatacataaatacccagccccatccctgccctagaaaagatagacctatattaattcggaaaatagctctgttcacctgcccctgccacccacctggagctcctgccccacaaagctggcccctgctccggatgagcccctgctcccgatgagcccttgcccagcatcctggggcggggagggcatcagcttcttttggaagacaatctgggccctgtcgctccattggcctgaagaggaaagtgagcccctaagtgggcaagggcagccctctgggcccagccgtcaggtccttcggaagaggttactgagaaagccaccggcgggcccggggcccaggcgcagcgagaagcggggcgcggcacggcgcggggtcga

SEQ ID NO: 365450 - DNA, 1045 bp, Homo sapiens
  misc_feature (23)..(23): n is a, c, g, or t
agacaggcttgtggccccgaganttaaggatcaggtggcgaggatggagctgttcgactttgggacctgcgcacagccaaggaggtccagacgatcgaggtctataagcacgaggagtgctcgaggccccacaatgggcgctggattggatgtttggcaactgattccgactggatggtctgtggagggggcccagccctcaccctctggcacctccgatcctccacacccaccaccatcttccccatccgggcgccacagaagcacgtcaccttctaccaggacctgattctgtcagctggccagggccgctgcgtcaaccagtggcagctgagcggggagctgaaggcccaggtgcctggctcctccccagggctgctcagcctcagcctcaaccagcagcctgccgcgcctgagtgcaaggtcctgacagctgcaggcaacagctgccgggtggatgtcttcaccaacctgggttaccgagccttctccctgtccttctgatctctgacgacacccccagccagctcagggttttagagtgtttttcattttctttttttttttttttttacaataaagtttcaggcttttttaccatgctctttctttctatgaatgggggccaaatcggtggagtgatttatatattactctgtccgatcttgatacataaatacccagccccatccctgccctagaaaagatagacctatattaattcggaaaatagctctgttcacctgcccctgccacccacctggagctcctgccccacaaagctggcccctgctccggatgagcccctgctcccgatgagcccttgcccagcatcctggggcggggagggcatcagcttcttttggaagacaatctgggccctgtcgctccattggcctgaagaggaaagtgagcccctaagtgggcaagggcagccctctgggcccagccgtcaggtccttcggaagaggttactgagaaagccaccggcgggcccggggcccaggcgcagcgagaagcggggcgcggcacggcgcggggtcga

SEQ ID NO: 365451 - DNA, 801 bp, Homo sapiens
gctttaggcgggcacagccgcgaggttctgcgcgggcgcggaagacgggcggcgcgtggcggaaggcaggcttgctcctcggggtgggggagggtatccggcttaagggggctgcggtggacaccacttcttaatgtcgggggtcttcgcggcgctcacctcggctcctagggttcgggacggtacgcaccagccaccttcgcgccgaaggcggtagggcgccacggagaggaaccgctctaggcacgtaaggcctcgtgaggttgcgtcgcgcgcggagcactctgggacttgtagttctggagatggagcgagctgtgccgctcgcggtgcctctgggtcagacagaggtgttccaggccttgcagcggctccatatgaccatcttctcccagagcgtctcaccatgtgggaagtttctggcggctggcaacaattacgggcagattgccatcttcagcttgtcctctgctttgagctcagaagccaaagaggaaagtaagaagccggtggtgactttccaagcccatgatgggcccgtctatagcatggtttccaccgatcgacatctgcttagtgctggggatggggaggtgaaggcctggctttgggcggagatgctcaagaagggctgtaaggagctgtggcgtcgtcagcctccatacaggaccagcctggaagtgcctgagatcaacgctttgctgctggtccccaaggacacccccagccagctcagggttttagagtgtttttcattttctttttttttttttttttacaataaagtttcaggctttttta

SEQ ID NO: 365452 - DNA, 960 bp, Homo sapiens
gctttaggcgggcacagccgcgaggttctgcgcgggcgcggaagacgggcggcgcgtggcggaaggcaggcttgctcctcggggtgggggagggtatccggcttaagggggctgcggtggacaccacttcttaatgtcgggggtcttcgcggcgctcacctcggctcctagggttcgggacggtacgcaccagccaccttcgcgccgaaggcggtagggcgccacggagaggaaccgctctaggcacgtaaggcctcgtgaggttgcgtcgcgcgcggagcactctgggacttgtagttctggagatggagcgagctgtgccgctcgcggtgcctctgggtcagacagaggtgttccaggccttgcagcggctccatatgaccatcttctcccagagcgtctcaccatgtgggaagtttctggcggctggcaacaattacgggcagattgccatcttcaggtaccctctgccgctgtccacccattagccctggcacttggccctcatgggacggatgcccccgtttctgactcctgggtcccctccgctgtccctgcagcttgtcctctgctttgagctcagaagccaaagaggaaagtaagaagccggtggtgactttccaaggtgggtatacctgtggagtctggcttcaggactttgggtgggattggctcactcagttctgcatttctctttagcccatgatgggcccgtctatagcatggtttccaccgatcgacatctgcttagtgctggggatggggaggtgaaggcctggctttgggcggagatgctcaagaaggtaaggagtcgagcttgggaaagggctggggtgcctggacccagagagagcctttgaggtcacctggtatatctcttttgaagggctgtaaggagctgtggcgtcgtcagcctccatacaggtgagcagggccacgtggatagagggtgcatcaggg

SEQ ID NO: 365453 - DNA, 1318 bp, Homo sapiens
gctttaggcgggcacagccgcgaggttctgcgcgggcgcggaagacgggcggcgcgtggcggaagggttcgggacggtacgcaccagccaccttcgcgccgaaggcggtagggcgccacggagaggaaccgctctaggcacgtaaggcctcgtgaggttgcgtcgcgcgcggagcactctgggacttgtagttctggagatggagcgagctgtgccgctcgcggtgcctctgggtcagacagaggtgttccaggccttgcagcggctccatatgaccatcttctcccagagcgtctcaccatgtgggaagtttctggcggctggcaacaattacgggcagattgccatcttcagcttgtcctctgctttgagctcagaagccaaagaggaaagtaagaagccggtggtgactttccaagcccatgatgggcccgtctatagcatggtttccaccgatcgacatctgcttagtgctggggatggggaggtgaaggcctggctttgggcggagatgctcaagaagggctgtaaggagctgtggcgtcgtcagcctccatacaggaccagcctggaagtgcctgagatcaacgctttgctgctggtccccaaggagaattccctcatcctggctgggggagactgtcagttgcacactatggaccttgaaactgggactttcacgagggtcctccggggccacacagactacatccactgcctggcactgcgggaaaggagcccagaggtgctgtcaggtggcgaggatggagctgttcgactttgggacctgcgcacagccaaggaggtccagacgatcgaggtctataagcacgaggagtgctcgaggccccacaatgggcgctggattggatgtttggcaactgattccgactggatggtctgtggagggggcccagccctcaccctctggcacctccgatcctccacacccaccaccatcttccccatccgggcgccacagaagcacgtcaccttctaccaggacctgattctgtcagctggccagggccgctgcgtcaaccagtggcagctgagcggggagctgaaggcccaggtgcctggctcctccccagggctgctcagcctcagcctcaaccagcagcctgccgcgcctgagtgcaaggtcctgacagctgcaggcaacagctgccgggtggatgtcttcaccaacctgggttaccgagccttctccctgtccttctgatctctgacgacacccccagccagctcagggttttagagtgtttttcattttctttttttttttttttttacaataaagtttcaggctttttta

SEQ ID NO: 365454 - DNA, 1424 bp, Homo sapiens
gctttaggcgggcacagccgcgaggttctgcgcgggcgcggaagacgggcggcgcgtggcggaaggcaggcttgctcctcggggtgggggagggtatccggcttaagggggctgcggtggacaccacttcttaatgtcgggggtcttcgcggcgctcacctcggctcctagggttcgggacggtacgcaccagccaccttcgcgccgaaggcggtagggcgccacggagaggaaccgctctaggcacgtaaggcctcgtgaggttgcgtcgcgcgcggagcactctgggacttgtagttctggagatggagcgagctgtgccgctcgcggtgcctctgggtcagacagaggtgttccaggccttgcagcggctccatatgaccatcttctcccagagcgtctcaccatgtgggaagtttctggcggctggcaacaattacgggcagattgccatcttcagcttgtcctctgctttgagctcagaagccaaagaggaaagtaagaagccggtggtgactttccaagcccatgatgggcccgtctatagcatggtttccaccgatcgacatctgcttagtgctggggatggggaggtgaaggcctggctttgggcggagatgctcaagaagggctgtaaggagctgtggcgtcgtcagcctccatacaggaccagcctggaagtgcctgagatcaacgctttgctgctggtccccaaggagaattccctcatcctggctgggggagactgtcagttgcacactatggaccttgaaactgggactttcacgagggtcctccggggccacacagactacatccactgcctggcactgcgggaaaggagcccagaggtgctgtcaggtggcgaggatggagctgttcgactttgggacctgcgcacagccaaggaggtccagacgatcgaggtctataagcacgaggagtgctcgaggccccacaatgggcgctggattggatgtttggcaactgattccgactggatggtctgtggagggggcccagccctcaccctctggcacctccgatcctccacacccaccaccatcttccccatccgggcgccacagaagcacgtcaccttctaccaggacctgattctgtcagctggccagggccgctgcgtcaaccagtggcagctgagcggggagctgaaggcccaggtgcctggctcctccccagggctgctcagcctcagcctcaaccagcagcctgccgcgcctgagtgcaaggtcctgacagctgcaggcaacagctgccgggtggatgtcttcaccaacctgggttaccgagccttctccctgtccttctgatctctgacgacacccccagccagctcagggttttagagtgtttttcattttctttttttttttttttttacaataaagtttcaggctttttta

SEQ ID NO: 365455 - DNA, 1987 bp, Homo sapiens
gctttaggcgggcacagccgcgaggttctgcgcgggcgcggaagacgggcggcgcgtggcggaaggcaggcttgctcctcggggtgggggagggtatccggcttaagggggctgcggtggacaccacttcttaatgtcgggggtcttcgcggcgctcacctcggctcctagggttcgggacggtacgcaccagccaccttcgcgccgaaggcggtagggcgccacggagaggaaccgctctaggcacgtaaggcctcgtgaggttgcgtcgcgcgcggagcactctgggacttgtagttctggagatggagcgagctgtgccgctcgcggtgcctctgggtcagacagaggtgttccaggccttgcagcggctccatatgaccatcttctcccagagcgtctcaccatgtgggaagtttctggcggctggcaacaattacgggcagattgccatcttcagcttgtcctctgctttgagctcagaagccaaagaggaaagtaagaagccggtggtgactttccaagcccatgatgggcccgtctatagcatggtttccaccgatcgacatctgcttagtgctggggatggggaggtgaaggcctggctttgggcggagatgctcaagaagggctgtaaggagctgtggcgtcgtcagcctccatacaggaccagcctggaagtgcctgagatcaacgctttgctgctggtccccaaggagaattccctcatcctggctgggggagactgtcagttgcacactatggaccttgaaactgggactttcacgagggtcctccggggccacacagactacatccactgcctggcactgcgggaaaggagcccagaggtgctgtcaggtggcgaggatggagctgttcgactttgggacctgcgcacagccaaggaggtccagacgatcgaggtctataagcacgaggagtgctcgaggccccacaatgggcgctggattggatgtttggcaactgattccgactggatggtctgtggagggggcccagccctcaccctctggcacctccgatcctccacacccaccaccatcttccccatccgggcgccacagaagcacgtcaccttctaccaggacctgattctgtcagctggccagggccgctgcgtcaaccagtggcagctgagcggggagctgaaggcccaggtgcctggctcctccccagggctgctcagcctcagcctcaaccagcagcctgccgcgcctgagtgcaaggtcctgacagctgcaggcaacagctgccgggtggatgtcttcaccaacctgggttaccgagccttctccctgtccttctgatctctgacgacacccccagccagctcagggttttagagtgtttttcattttctttttttttttttttttacaataaagtttcaggcttttttaaaaaaaaaaaaaaaaaacaaaacaaacaaaaaaaaaaaaagggggggcgcagcaccaaaagagaactccccagaaggggagcaccaaagaaagcagcaggcgaccgcaaagagtacaattgaacaacaaagtgggcgccacactaagaggagcgaccgtaaatatacacaacgagacgagagcgcaacagacggacgcgcagcgtattaaacaacacgatacgcgaacacaggagagacaaaaccaccagcacaacgagggcggaacacactgggagcagaagcacacacctaaaccatcccgggcggggaggcacaccacaaatggcggccacacaacagcccgcaaacgaagcgcagcactgaagagagccgccctacggggagcgacaatactcagacacaaccctgcacaagaggggagagtaaacaggaggggggcaaaacaatcagcgaggagcaagcgtgcacgcccaccgccggcgaagcaaagtaggccaccacgaagagacagcgaacgaggcaagacaaacaaatagaccccccaccgaagacgcaagaaaa

SEQ ID NO: 365456 - DNA, 1890 bp, Homo sapiens
gctttaggcgggcacagccgcgaggttctgcgcgggcgcggaagacgggcggcgcgtggcggaaggcaggcttgctcctcggggtgggggagggtatccggcttaagggggctgcggtggacaccacttcttaatgtcgggggtcttcgcggcgctcacctcggctcctagggttcgggacggtacgcaccagccaccttcgcgccgaaggcggtagggcgccacggagaggaaccgctctaggcacgtaaggcctcgtgaggttgcgtcgcgcgcggagcactctgggacttgtagttctggagatggagcgagctgtgccgctcgcggtgcctctgggtcagacagaggtgttccaggccttgcagcggctccatatgaccatcttctcccagagcgtctcaccatgtgggaagtttctggcggctggcaacaattacgggcagattgccatcttcagcttgtcctctgctttgagctcagaagccaaagaggaaagtaagaagccggtggtgactttccaagttctgcatttctctttagcccatgatgggcccgtctatagcatggtttccaccgatcgacatctgcttagtgctggggatggggaggtgaaggcctggctttgggcggagatgctcaagaagggctgtaaggagctgtggcgtcgtcagcctccatacaggaccagcctggaagtgcctgagatcaacgctttgctgctggtccccaaggagaattccctcatcctggctgggggagactgtcagttgcacactatggaccttgaaactgggactttcacgagggtcctccggggccacacagactacatccactgcctggcactgcgggaaaggagcccagaggtgctgtcaggtggcgaggatggagctgttcgactttgggacctgcgcacagccaaggaggtccagacgatcgaggtctataagcacgaggagtgctcgaggccccacaatgggcgctggattggatgtttggcaactgattccgactggatggtctgtggagggggcccagccctcaccctctggcacctccgatcctccacacccaccaccatcttccccatccgggcgccacagaagcacgtcaccttctaccaggacctgattctgtcagctggccagggccgctgcgtcaaccagtggcagctgagcggggagctgaaggcccaggtgcctggctcctccccagggctgctcagcctcagcctcaaccagcagcctgccgcgcctgagtgcaaggtcctgacagctgcaggcaacagctgccgggtggatgtcttcaccaacctgggttaccgagccttctccctgtccttctgatctctgacgacacccccagccagctcagggttttagagtgtttttcattttctttttttttttttttttacaataaagtttcaggcttttttaccatgctctttctttctatgaatgggggccaaatcggtggagtgatttatatattactctgtccgatcttgatacataaatacccagccccatccctgccctagaaaagatagacctatattaattcggaaaatagctctgttcacctgcccctgccacccacctggagctcctgccccacaaagctggcccctgctccggatgagcccctgctcccgatgagcccttgcccagcatcctggggcggggagggcatcagcttcttttggaagacaatctgggccctgtcgctccattggcctgaagaggaaagtgagcccctaagtgggcaagggcagccctctgggcccagccgtcaggtccttcggaagaggttactgagaaagccaccggcgggcccggggcccaggcgcagcgagaagcggggcgcggcacggcgcggggtcga

SEQ ID NO: 365457 - DNA, 1821 bp, Homo sapiens
  misc_feature (28)..(28): n is a, c, g, or t
ttaccggggtcttaaggtagcgaggccncctggggggtgtgtgtaaattttcgggccaccgagggagtcgggggtcttcgcggcgctcacctcggctcctagggttcgggacggtacgcaccagccaccttcgcgccgaaggcggtagggcgccacggagaggaaccgctctaggcacgtaaggcctcgtgaggttgcgtcgcgcgcggagcactctgggacttgtagttctggagatggagcgagctgtgccgctcgcggtgcctctgggtcagacagaggtgttccaggccttgcagcggctccatatgaccatcttctcccagagcgtctcaccatgtgggaagtttctggcggctggcaacaattacgggcagattgccatcttcagcttgtcctctgctttgagctcagaagccaaagaggaaagtaagaagccggtggtgactttccaagttctgcatttctctttagcccatgatgggcccgtctatagcatggtttccaccgatcgacatctgcttagtgctggggatggggaggtgaaggcctggctttgggcggagatgctcaagaagggctgtaaggagctgtggcgtcgtcagcctccatacaggaccagcctggaagtgcctgagatcaacgctttgctgctggtccccaaggagaattccctcatcctggctgggggagactgtcagttgcacactatggaccttgaaactgggactttcacgagggtcctccggggccacacagactacatccactgcctggcactgcgggaaaggagcccagaggtgctgtcaggtggcgaggatggagctgttcgactttgggacctgcgcacagccaaggaggtccagacgatcgaggtctataagcacgaggagtgctcgaggccccacaatgggcgctggattggatgtttggcaactgattccgactggatggtctgtggagggggcccagccctcaccctctggcacctccgatcctccacacccaccaccatcttccccatccgggcgccacagaagcacgtcaccttctaccaggacctgattctgtcagctggccagggccgctgcgtcaaccagtggcagctgagcggggagctgaaggcccaggtgcctggctcctccccagggctgctcagcctcagcctcaaccagcagcctgccgcgcctgagtgcaaggtcctgacagctgcaggcaacagctgccgggtggatgtcttcaccaacctgggttaccgagccttctccctgtccttctgatctctgacgacacccccagccagctcagggttttagagtgtttttcattttctttttttttttttttttacaataaagtttcaggcttttttaccatgctctttctttctatgaatgggggccaaatcggtggagtgatttatatattactctgtccgatcttgatacataaatacccagccccatccctgccctagaaaagatagacctatattaattcggaaaatagctctgttcacctgcccctgccacccacctggagctcctgccccacaaagctggcccctgctccggatgagcccctgctcccgatgagcccttgcccagcatcctggggcggggagggcatcagcttcttttggaagacaatctgggccctgtcgctccattggcctgaagaggaaagtgagcccctaagtgggcaagggcagccctctgggcccagccgtcaggtccttcggaagaggttactgagaaagccaccggcgggcccggggcccaggcgcagcgagaagcggggcgcggcacggcgcggggtcga

SEQ ID NO: 365458 - DNA, 2029 bp, Homo sapiens
gctttaggcgggcacagccgcgaggttctgcgcgggcgcggaagacgggcggcgcgtggcggaaggcaggcttgctcctcggggtgggggagggtatccggcttaagggggctgcggtggacaccacttcttaatgtcgggggtcttcgcggcgctcacctcggctcctagggttcgggacggtacgcaccagccaccttcgcgccgaaggcggtagggcgccacggagaggaaccgctctaggcacgtaaggcctcgtgaggttgcgtcgcgcgcggagcactctgggacttgtagttctggagatggagcgagctgtgccgctcgcggtgcctctgggtcagacagaggtgttccaggccttgcagcggctccatatgaccatcttctcccagagcgtctcaccatgtgggaagtttctggcggctggcaacaattacgggcagattgccatcttcagcttgtcctctgctttgagctcagaagccaaagaggaaagtaagaagccggtggtgactttccaaggtgggtatacctgtggagtctggcttcaggactttgggtgggattggctcactcagttctgcatttctctttagcccatgatgggcccgtctatagcatggtttccaccgatcgacatctgcttagtgctggggatggggaggtgaaggcctggctttgggcggagatgctcaagaaggtaaggagtcgagcttgggaaagggctggggtgcctggacccagagagagcctttgaggtcacctggtatatctcttttgaagggctgtaaggagctgtggcgtcgtcagcctccatacaggaccagcctggaagtgcctgagatcaacgctttgctgctggtccccaaggagaattccctcatcctggctgggggagactgtcagttgcacactatggaccttgaaactgggactttcacgagggtcctccggggccacacagactacatccactgcctggcactgcgggaaaggagcccagaggtgctgtcaggtggcgaggatggagctgttcgactttgggacctgcgcacagccaaggaggtccagacgatcgaggtctataagcacgaggagtgctcgaggccccacaatgggcgctggattggatgtttggcaactgattccgactggatggtctgtggagggggcccagccctcaccctctggcacctccgatcctccacacccaccaccatcttccccatccgggcgccacagaagcacgtcaccttctaccaggacctgattctgtcagctggccagggccgctgcgtcaaccagtggcagctgagcggggagctgaaggcccaggtgcctggctcctccccagggctgctcagcctcagcctcaaccagcagcctgccgcgcctgagtgcaaggtcctgacagctgcaggcaacagctgccgggtggatgtcttcaccaacctgggttaccgagccttctccctgtccttctgatctctgacgacacccccagccagctcagggttttagagtgtttttcattttctttttttttttttttttacaataaagtttcaggcttttttaccatgctctttctttctatgaatgggggccaaatcggtggagtgatttatatattactctgtccgatcttgatacataaatacccagccccatccctgccctagaaaagatagacctatattaattcggaaaatagctctgttcacctgcccctgccacccacctggagctcctgccccacaaagctggcccctgctccggatgagcccctgctcccgatgagcccttgcccagcatcctggggcggggagggcatcagcttcttttggaagacaatctgggccctgtcgctccattggcctgaagaggaaagtgagcccctaagtgggcaagggcagccctctgggcccagccgtcaggtccttcggaagaggttactgagaaagccaccggcgggcccggggcccaggcgcagcgagaagcggggcgcggcacggcgcggggtcga

SEQ ID NO: 365459 - DNA, 1177 bp, Homo sapiens
cctcatcctgctcctccacaggagaattccctcatcctggctgggggagactgtcagttgcacactatggaccttgaaactgggactttcacgagggtcctccggggccacacagactacatccactgcctggcactgcgggaaaggagcccagaggtgctgtcaggtggcgaggatggagctgttcgactttgggacctgcgcacagccaaggaggtccagacgatcgaggtctataagcacgaggagtgctcgaggccccacaatgggcgctggattggatgtttggcaactgattccgactggatggtctgtggagggggcccagccctcaccctctggcacctccgatcctccacacccaccaccatcttccccatccgggcgccacagaagcacgtcaccttctaccaggacctgattctgtcagctggccagggccgctgcgtcaaccagtggcagctgagcggggagctgaaggcccaggtgcctggctcctccccagggctgctcagcctcagcctcaaccagcagcctgccgcgcctgagtgcaaggtcctgacagctgcaggcaacagctgccgggtggatgtcttcaccaacctgggttaccgagccttctccctgtccttctgatctctgacgacacccccagccagctcagggttttagagtgtttttcattttctttttttttttttttttacaataaagtttcaggcttttttaccatgctctttctttctatgaatgggggccaaatcggtggagtgatttatatattactctgtccgatcttgatacataaatacccagccccatccctgccctagaaaagatagacctatattaattcggaaaatagctctgttcacctgcccctgccacccacctggagctcctgccccacaaagctggcccctgctccggatgagcccctgctcccgatgagcccttgcccagcatcctggggcggggagggcatcagcttcttttggaagacaatctgggccctgtcgctccattggcctgaagaggaaagtgagcccctaagtgggcaagggcagccctctgggcccagccgtcaggtccttcggaagaggttactgagaaagccaccggcgggcccggggcccaggcgcagcgagaagcggggcgcggcacggcgcggggtcga

SEQ ID NO: 365460 - DNA, 336 bp, Homo sapiens
  misc_feature (1)..(1): n is a, c, g, or t
ncagcgaacaaaagagcagttgctcttgggtccgacttcttcacttgacctaactgattatgcgaaatacccaagattcatgctactgtaccacagatttgttttcacagcaataaatcttcagttctttgtttatgattccacttaacaaaaggcctgcagaagtgatttattatttgggtatttggagataatacatttgatggttttttggaaaacctttttcactccatactcagatatgcttcattgtcaaatgcatatttagattagattattgaattgtaatgtttatctgctgctttttttaaataaaatttgactgaaaatgtttaa

SEQ ID NO: 365461 - DNA, 5260 bp, Homo sapiens
tatatttttaaattttgcatttgacttaaagtgccatgagaaaatttgcatactgcaaggtggtcctagccacctccttgatttgggtactcttggatatgttcctgctgctttacttcagtgaatgcaacaaatgtgatgaaaaaaaggagagaggacttcctgctggagatgttctagagccagtacaaaagcctcatgaaggtcctggagaaatggggaaaccagtcgtcattcctaaagaggatcaagaaaagatgaaagagatgtttaaaatcaatcagttcaatttaatggcaagtgagatgattgcactcaacagatctttaccagatgttaggttagaagggtgtaaaacaaaggtgtatccagataatcttcctacaacaagtgtggtgattgttttccacaatgaggcttggagcacacttctgcgaactgtccatagtgtcattaatcgctcaccaagacacatgatagaagaaattgttctagtagatgatgccagtgaaagagactttttgaaaaggcctttagagagttatgtgaaaaaactaaaagtaccagttcatgtaattcgaatggaacaacgttctggattgatcagagctagattaaaaggagctgctgtgtctaaaggccaagtgatcaccttcctggatgcccattgtgagtgtacagtgggatggctggagcctctcttggccaggatcaaacatgacaggagaacagtggtgtgtcccatcatcgatgtgatcagtgatgatacttttgagtacatggcaggctctgatatgacctatggtgggttcaactggaagctcaattttcgctggtatcctgttccccaaagagaaatggacagaaggaaaggtgatcggactcttcctgtcaggacacctaccatggcaggaggccttttttcaatagacagagattactttcaggaaattggaacatatgatgctggaatggatatttggggaggagaaaacctagaaatttcctttaggatttggcagtgtggaggaactttggaaattgttacatgctcacatgttggacatgtgtttcggaaagctacaccttacacgtttccaggaggcacagggcagattatcaataaaaataacagacgacttgcagaagtgtggatggatgaattcaagaatttcttctatataatttctccaggtgttacaaaggtagattatggagatatatcgtcaagagttggtctaagacacaaactacaatgcaaacctttttcctggtacctagagaatatatatcctgattctcaaattccacgtcactatttctcattgggagagatacgaaatgtggaaacgaatcagtgtctagataacatggctagaaaagagaatgaaaaagttggaatttttaattgccatggtatggggggtaatcaggttttctcttatactgccaacaaagaaattagaacagatgacctttgcttggatgtttccaaacttaatggcccagttacaatgctcaaatgccaccacctaaaaggcaaccaactctgggagtatgacccagtgaaattaaccctgcagcatgtgaacagtaatcagtgcctggataaagccacagaagaggatagccaggtgcccagcattagagactgcaatggaagtcggtcccagcagtggcttcttcgaaacgtcaccctgccagaaatattctgagaccaaatttacaaaaaaacgaaaaaaataaggattgactgggctacctcagcatacatttctgccacattcttaagtagcaaaaaaggaaaagtgctttcctcctctgcaggatgtaaggtttatcagccattaaaacttagacttctctagcttttcactagctgtgaaccagccttcctgtccatggacgtgaaactgcatagtaatgagactgtgcacactgatgtttacaagattgaaagagtctttctccgaaaatcatggtaaagaatactgagacaatgaaaaaaaatcaacaaaatatgctttctggagaactgtaccttttatggtttgcttgcacatcagtagtttctgctgaacgtgctgtcataatgaagagatttccaagattttttttcctgattagaactggtagccagtatattaaatattgatataaaaataaaagaactggaaccagattcagaatcatgaaaacaacatttttacaacaacaaaaaaactatattaaacagggtttaaaggaaattaaaacagaactatgagaagtacaatttgttatagtatagtatcaaatttctatatagattttatacctcagtggggaaaaataactgattccaatgacattcattttgttttcatctgtgatagtcatggatgcttttattttccttggggtgctgaaattgagctgaaaaaaaaaggctctttgaatatagttttaatttctctctacagttttttttgtttggtttgtgggctgttggaattgtaatttttaattgccttctaaaaaatggaaatttaacaatgtctgatctcagctgaacaaattagatgtttcagttgctcttgggtcaactggcttacagatttacatgtgcacacacacacaaatttcttatcacattttcgacttcttcacttgacctaactgattatgcgaaatacccaagattcatgctactgtaccacagatttgttttcacagcaataaatcttcagttctttgtttatgattccacttaacaaaaggcctgcagaagtgatttattatttgggtatttggagataatacatttgatggttttttggaaaacctttttcactccatactcagatatgcttcattgtcaaatgcatatttagattagattattgaattgtaatgtttatctgctgctttttttaaataaaatttgactgaaaatgtttaattggcattttttaatgacttagccaaagaagtgcagctattattccatattaataggcttgcatttcttttcctaaatcttatttaggctaaatcagttttatttttctctgattttttttaataccacagaatcacctgagtgtcaattgaaagttgtcaattaaaaggtaaccttttaatctcgtaggaggaatctcattaagacatttttcctgatatgtagagcagtctgttggcaaaaatgcatatattttctttcatatttgtaaaattatatttaatggaattcttttctttgattatcaaggactttcactgcaggcagtgctatttcttgtgcctaagaatgtttccaaaagtcgcatcgctaatgatatttgccaagttgagtgtacacaaagtttctcatatcctgttcaagttaatcaacatcaagcacatggggatgctttagggtgagtctatagtacaaaatgcataaaccatgtccccaggaaatttgaaaggaagcaggtgctgaatggaatttttttccttttccatgagctgtgttaattctatctccagtaggcctaatgcttgaataagcaagatgtctaatcaataaattattttcatgctcagaatttcaggtttttgtactccagcatagcttggtcttatttcttactgtatgaaagcttaacagcaatgtgatttaaggttttgttttaaatgggagatgtaagtgatttaattcatgggtacttttagaacctgatagataatcccattgcctttatttttctaattaaagaattcctaaatactttgaaaatacaaaatattcctgaatagttgtgccttacattggttttatttgaagttagagtggatccctgtttatcataattacttgtaattaggcagatgcttatcactctattataactcaaattgggaagaaaagaatgaaaaagaaaacaatggctgggtactggctcatacctgtaattttagcattttgggaaggtgagacgataggaccacttgagggcaggagtttgaggttgcagtgagctatgatggtgccactgcactccagcctgggcaacagagaagaaaccatgtatcttaaaaaaaaagaaaaaatgaaggatgaaaaagtgggattattatttaaccagtgaagaattcataaatgtgacaattaaggataatttgaatctcacaaatctattcaccccaccccagtcaaggtctattttaatatatctatcttcattggcattcttgagaaatagtgctgccattgaacattgggaatattcatccattctgcagatggaggacatcgtgcaggccatgtcctcattgctcccattctacatttagctgagaaacagaggttcctctttgtaaggatttgatgctcttctcatcttccaagaagtataccaagagcaaatttaactctatagttacctgttcttcaaagaaaaaagaaacttagaaggtagtgtttctgaggtcataactgtgaggggttgtatacaaagaatgagtcactttttaagccatttggaaaattagatctgtttctaattagatgacattttctccattctctgatttcctgaagattgccaagcatttgcttgataatctaccaggactgataattttgcagaatatgaggcaaatatatgaaattcagttgtgtatctatatcctagcaacaaacacttgaaaatataacgttaaaatatgccatttgtaatagcatcaaataagtcaaacttctaagtaggaagaaagttaacaacaagacctctactctgaaaactacaaaacagtgctgggaagaattatagagcaccaaaataaatggctattctatgctcatggattgaaagactgcataatggtaagatgtcagttccccacaaattgttatctagattcaatgagatcaaaatcccacaaggccatcttgtagaaattggcaaatacatatatgaaaatgcaacagattctaagtagccaagataattttgaagaagaaaaatattaagagagtatggtactagagttaggataaacaacaaatagaaatagacatgtccagaaatagacccacatgtatatggttattggcttttcaacaaaaacaagctattcaatagaaaaagggaagatttttcagttggagttgaagtaactggatgtctgggaaaaagcaatgttaataatgccttcttcataccatgcacagtttattcaaaatggattatagaactaaatgtgaatggcaaaacaataaatcttgtaaaaggaa

SEQ ID NO: 365462 - DNA, 3568 bp, Homo sapiens
tatatttttaaattttgcatttgacttaaagtgccatgagaaaatttgcatactgcaaggtggtcctagccacctccttgatttgggtactcttggatatgttcctgctgctttacttcagtgaatgcaacaaatgtgatgaaaaaaaggagagaggacttcctgctggagatgttctagagccagtacaaaagcctcatgaaggtcctggagaaatggggaaaccagtcgtcattcctaaagaggatcaagaaaagatgaaagagatgtttaaaatcaatcagttcaatttaatggcaagtgagatgattgcactcaacagatctttaccagatgttaggttagaagggtgtaaaacaaaggtgtatccagataatcttcctacaacaagtgtggtgattgttttccacaatgaggcttggagcacacttctgcgaactgtccatagtgtcattaatcgctcaccaagacacatgatagaagaaattgttctagtagatgatgccagtgaaagagactttttgaaaaggcctttagagagttatgtgaaaaaactaaaagtaccagttcatgtaattcgaatggaacaacgttctggattgatcagagctagattaaaaggagctgctgtgtctaaaggccaagtgatcaccttcctggatgcccattgtgagtgtacagtgggatggctggagcctctcttggccaggatcaaacatgacaggagaacagtggtgtgtcccatcatcgatgtgatcagtgatgatacttttgagtacatggcaggctctgatatgacctatggtgggttcaactggaagctcaattttcgctggtatcctgttccccaaagagaaatggacagaaggaaaggtgatcggactcttcctgtcaggacacctaccatggcaggaggccttttttcaatagacagagattactttcaggaaattggaacatatgatgctggaatggatatttggggaggagaaaacctagaaatttcctttaggatttggcagtgtggaggaactttggaaattgttacatgctcacatgttggacatgtgtttcggaaagctacaccttacacgtttccaggaggcacagggcagattatcaataaaaataacagacgacttgcagaagtgtggatggatgaattcaagaatttcttctatataatttctccaggtgttacaaaggtagattatggagatatatcgtcaagagttggtctaagacacaaactacaatgcaaacctttttcctggtacctagagaatatatatcctgattctcaaattccacgtcactatttctcattgggagagatacgaaatgtggaaacgaatcagtgtctagataacatggctagaaaagagaatgaaaaagttggaatttttaattgccatggtatggggggtaatcaggttttctcttatactgccaacaaagaaattagaacagatgacctttgcttggatgtttccaaacttaatggcccagttacaatgctcaaatgccaccacctaaaaggcaaccaactctgggagtatgacccagtgaaattaaccctgcagcatgtgaacagtaatcagtgcctggataaagccacagaagaggatagccaggtgcccagcattagagactgcaatggaagtcggtcccagcagtggcttcttcgaaacgtcaccctgccagaaatattctgagaccaaatttacaaaaaaacgaaaaaaataaggattgactgggctacctcagcatacatttctgccacattcttaagtagcaaaaaaggaaaagtgctttcctcctctgcaggatgtaaggtttatcagccattaaaacttagacttctctagcttttcactagctgtgaaccagccttcctgtccatggacgtgaaactgcatagtaatgagactgtgcacactgatgtttacaagattgaaagagtctttctccgaaaatcatggtaaagaatactgagacaatgaaaaaaaatcaacaaaatatgctttctggagaactgtaccttttatggtttgcttgcacatcagtagtttctgctgaacgtgctgtcataatgaagagatttccaagattttttttcctgattagaactggtagccagtatattaaatattgatataaaaataaaagaactggaaccagattcagaatcatgaaaacaacatttttacaacaacaaaaaaactatattaaacagggtttaaaggaaattaaaacagaactatgagaagtacaatttgttatagtatagtatcaaatttctatatagattttatacctcagtggggaaaaataactgattccaatgacattcattttgttttcatctgtgatagtcatggatgcttttattttccttggggtgctgaaattgagctgaaaaaaaaaggctctttgaatatagttttaatttctctctacagttttttttgtttggtttgtgggctgttggaattgtaatttttaattgccttctaaaaaatggaaatttaacaatgtctgatctcagctgaacaaattagatgtttcagttgctcttgggtcaactggcttacagatttacatgtgcacacacacacaaatttcttatcacattttcgacttcttcacttgacctaactgattatgcgaaatacccaagattcatgctactgtaccacagatttgttttcacagcaataaatcttcagttctttgtttatgattccacttaacaaaaggcctgcagaagtgatttattatttgggtatttggagataatacatttgatggttttttggaaaacctttttcactccatactcagatatgcttcattgtcaaatgcatatttagattagattattgaattgtaatgtttatctgctgctttttttaaataaaatttgactgaaaatgtttaattggcattttttaatgacttagccaaagaagtgcagctattattccatattaataggcttgcatttcttttcctaaatcttatttaggctaaatcagttttatttttctctgattttttttaataccacagaatcacctgagtgtcaattgaaagttgtcaattaaaaggtaaccttttaatctcgtaggaggaatctcattaagacatttttcctgatatgtagagcagtctgttggcaaaaatgcatatattttctttcatatttgtaaaattatatttaatggaattcttttctttgattatcaaggactttcactgcaggcagtgctatttcttgtgcctaagaatgtttccaaaagtcgcatcgctaatgatatttgccaagttgagtgtacacaaagtttctcatatcctgttcaagttaatcaacatcaagcacatggggatgctttagggtgagtctatagtacaaaatgcataaaccatgtccccaggaaatttgaaaggaagcaggtgctgaatggaatttttttccttttccatgagctgtgttaattctatctccagtaggcctaatgcttgaataagcaagatgtctaatcaataaattattttcatgctcaga

SEQ ID NO: 365463 - DNA, 3054 bp, Homo sapiens
cgagcggcctgcggggcgcccctgcggccgggcccgccgcggcggagcttgccgccgcgcgcctagcgaggtgccatgagaaaatttgcatactgcaaggtggtcctagccacctccttgatttgggtactcttggatatgttcctgctgctttacttcagtgaatgcaacaaatgtgatgaaaaaaaggagagaggacttcctgctggagatgcgcaggtaaattgaacatgaaattggaaattgacaaggatgttgaagtagcagaaagttaccagtgagttaagttctagagccagtacaaaagcctcatgaaggtcctggagaaatggggaaaccagtcgtcattcctaaagaggatcaagaaaagatgaaagagatgtttaaaatcaatcagttcaatttaatggcaagtgagatgattgcactcaacagatctttaccagatgttaggttagaagggtgtaaaacaaaggtgtatccagataatcttcctacaacaagtgtggtgattgttttccacaatgaggcttggagcacacttctgcgaactgtccatagtgtcattaatcgctcaccaagacacatgatagaagaaattgttctagtagatgatgccagtgaaagagactttttgaaaaggcctttagagagttatgtgaaaaaactaaaagtaccagttcatgtaattcgaatggaacaacgttctggattgatcagagctagattaaaaggagctgctgtgtctaaaggccaagtgatcaccttcctggatgcccattgtgagtgtacagtgggatggctggagcctctcttggccaggatcaaacatgacaggagaacagtggtgtgtcccatcatcgatgtgatcagtgatgatacttttgagtacatggcaggctctgatatgacctatggtgggttcaactggaagctcaattttcgctggtatcctgttccccaaagagaaatggacagaaggaaaggtgatcggactcttcctgtcaggacacctaccatggcaggaggccttttttcaatagacagagattactttcaggaaattggaacatatgatgctggaatggatatttggggaggagaaaacctagaaatttcctttaggatttggcagtgtggaggaactttggaaattgttacatgctcacatgttggacatgtgtttcggaaagctacaccttacacgtttccaggaggcacagggcagattatcaataaaaataacagacgacttgcagaagtgtggatggatgaattcaagaatttcttctatataatttctccaggtgttacaaaggtagattatggagatatatcgtcaagagttggtctaagacacaaactacaatgcaaacctttttcctggtacctagagaatatatatcctgattctcaaattccacgtcactatttctcattgggagagatacgaaatgtggaaacgaatcagtgtctagataacatggctagaaaagagaatgaaaaagttggaatttttaattgccatggtatggggggtaatcaggttttctcttatactgccaacaaagaaattagaacagatgacctttgcttggatgtttccaaacttaatggcccagttacaatgctcaaatgccaccacctaaaaggcaaccaactctgggagtatgacccagtgaaattaaccctgcagcatgtgaacagtaatcagtgcctggataaagccacagaagaggatagccaggtgcccagcattagagactgcaatggaagtcggtcccagcagtggcttcttcgaaacgtcaccctgccagaaatattctgagaccaaatttacaaaaaaacgaaaaaaataaggattgactgggctacctcagcatacatttctgccacattcttaagtagcaaaaaaggaaaagtgctttcctcctctgcaggatgtaaggtttatcagccattaaaacttagacttctctagcttttcactagctgtgaaccagccttcctgtccatggacgtgaaactgcatagtaatgagactgtgcacactgatgtttacaagattgaaagagtctttctccgaaaatcatggtaaagaatactgagacaatgaaaaaaaatcaacaaaatatgctttctggagaactgtaccttttatggtttgcttgcacatcagtagtttctgctgaacgtgctgtcataatgaagagatttccaagattttttttcctgattagaactggtagccagtatattaaatattgatataaaaataaaagaactggaaccagattcagaatcatgaaaacaacatttttacaacaacaaaaaaactatattaaacagggtttaaaggaaattaaaacagaactatgagaagtacaatttgttatagtatagtatcaaatttctatatagattttatacctcagtggggaaaaataactgattccaatgacattcattttgttttcatctgtgatagtcatggatgcttttattttccttggggtgctgaaattgagctgaaaaaaaaaggctctttgaatatagttttaatttctctctacagttttttttgtttggtttgtgggctgttggaattgtaatttttaattgccttctaaaaaatggaaatttaacaatgtctgatctcagctgaacaaattagatgtttcagttgctcttgggtcaactggcttacagatttacatgtgcacacacacacaaatttcttatcacattttcgacttcttcacttgacctaactgattatgcgaaatacccaagattcatgctactgtaccacagatttgttttcacagcaataaatcttcagttctttgtttatgattccacttaacaaaaggcctgcagaagtgatttattatttgggtatttggagataatacatttgatggttttttggaaaacctttttcactccatactcagatatgcttcattgtcaaatgcatatttagattagattattgaattgtaatgtttatctgctgctttttttaaataaaatttgactgaaaatgtttaa

SEQ ID NO: 365464 - DNA, 3290 bp, Homo sapiens
  misc_feature (3290)..(3290): n is a, c, g, or t
tatatttttaaattttgcatttgacttaaagtgccatgagaaaatttgcatactgcaaggtggtcctagccacctccttgatttgggtactcttggatatgttcctgctgctttacttcagtgaatgcaacaaatgtgatgaaaaaaaggagagaggacttcctgctggagatgttctagagccagtacaaaagcctcatgaaggtcctggagaaatggggaaaccagtcgtcattcctaaagaggatcaagaaaagatgaaagagatgtttaaaatcaatcagttcaatttaatggcaagtgagatgattgcactcaacagatctttaccagatgttaggttagaagggtgtaaaacaaaggtgtatccagataatcttcctacaacaagtgtggtgattgttttccacaatgaggcttggagcacacttctgcgaactgtccatagtgtcattaatcgctcaccaagacacatgatagaagaaattgttctagtagatgatgccagtgaaagagactttttgaaaaggcctttagagagttatgtgaaaaaactaaaagtaccagttcatgtaattcgaatggaacaacgttctggattgatcagagctagattaaaaggagctgctgtgtctaaaggccaagtgatcaccttcctggatgcccattgtgagtgtacagtgggatggctggagcctctcttggccaggatcaaacatgacaggagaacagtggtgtgtcccatcatcgatgtgatcagtgatgatacttttgagtacatggcaggctctgatatgacctatggtgggttcaactggaagctcaattttcgctggtatcctgttccccaaagagaaatggacagaaggaaaggtgatcggactcttcctgtcaggacacctaccatggcaggaggccttttttcaatagacagagattactttcaggaaattggaacatatgatgctggaatggatatttggggaggagaaaacctagaaatttcctttaggatttggcagtgtggaggaactttggaaattgttacatgctcacatgttggacatgtgtttcggaaagctacaccttacacgtttccaggaggcacagggcagattatcaataaaaataacagacgacttgcagaagtgtggatggatgaattcaagaatttcttctatataatttctccaggtgttacaaaggtagattatggagatatatcgtcaagagttggtctaagacacaaactacaatgcaaacctttttcctggtacctagagaatatatatcctgattctcaaattccacgtcactatttctcattgggagagatacgaaatgtggaaacgaatcagtgtctagataacatggctagaaaagagaatgaaaaagttggaatttttaattgccatggtatggggggtaatcaggttttctcttatactgccaacaaagaaattagaacagatgacctttgcttggatgtttccaaacttaatggcccagttacaatgctcaaatgccaccacctaaaaggcaaccaactctgggagtatgacccagtgaaattaaccctgcagcatgtgaacagtaatcagtgcctggataaagccacagaagaggatagccaggtgcccagcattagagactgcaatggaagtcggtcccagcagtggcttcttcgaaacgtcaccctgccagaaatattctgagaccaaatttacaaaaaaacgaaaaaaataaggattgactgggctacctcagcatacatttctgccacattcttaagtagcaaaaaaggaaaagtgctttcctcctctgcaggatgtaaggtttatcagccattaaaacttagacttctctagcttttcactagctgtgaaccagccttcctgtccatggacgtgaaactgcatagtaatgagactgtgcacactgatgtttacaagattgaaagagtctttctccgaaaatcatggtaaagaatactgagacaatgaaaaaaaatcaacaaaatatgctttctggagaactgtaccttttatggtttgcttgcacatcagtagtttctgctgaacgtgctgtcataatgaagagatttccaagattttttttcctgattagaactggtagccagtatattaaatattgatataaaaataaaagaactggaaccagattcagaatcatgaaaacaacatttttacaacaacaaaaaaactatattaaacagggtttaaaggaaattaaaacagaactatgagaagtacaatttgttatagtatagtatcaaatttctatatagattttatacctcagtggggaaaaataactgattccaatgacattcattttgttttcatctgtgatagtcatggatgcttttattttccttggggtgctgaaattgagctgaaaaaaaaaggctctttgaatatagttttaatttctctctacagttttttttgtttggtttgtgggctgttggaattgtaatttttaattgccttctaaaaaatggaaatttaacaatgtctgatctcagctgaacaaattagatgtttcagttgctcttgggtcaactggcttacagatttacatgtgcacacacacacaaatttcttatcacattttcgacttcttcacttgacctaactgattatgcgaaatacccaagattcatgctactgtaccacagatttgttttcacagcaataaatcttcagttctttgtttatgattccacttaacaaaaggcctgcagaagtgatttattatttgggtatttggagataatacatttgatggttttttggaaaacctttttcactccatactcagatatgcttcattgtcaaatgcatatttagattagattattgaattgtaatgtttatctgctgctttttttaaataaaatttgactgaaaatgtttaagaagagaaaaaaaaaaagaaaaaaaaaaaaaaaaagatttggggggcgccttgggccctggaaaaagtttttaaagaacacatacgtttgggggcgcggggggccccacataggttaacgtagaaccggtgtgccaaagaggtgggtcacccaaagagaagaacccggggcgcaaacagacatgagggcgtggggatctcccccaccagatgaaaaaaaacgccccggcgggggaacaccgccgagggttctgtaaaaaaaatccaggagggagaagccggaaaggaccaaaaggggggcattcactcaccaacgaggaggcacaaggggacgccgatatataaatacn

SEQ ID NO: 365465 - DNA, 2887 bp, Homo sapiens
tatatttttaaattttgcatttgacttaaagtgccatgagaaaatttgcatactgcaaggtggtcctagccacctccttgatttgggtactcttggatatgttcctgctgctttacttcagtgaatgcaacaaatgtgatgaaaaaaaggagagaggacttcctgctggagatgttctagagccagtacaaaagcctcatgaaggtcctggagaaatggggaaaccagtcgtcattcctaaagaggatcaagaaaagatgaaagagatgtttaaaatcaatcagttcaatttaatggcaagtgagatgattgcactcaacagatctttaccagatgttaggttagaagggtgtaaaacaaaggtgtatccagataatcttcctacaacaagtgtggtgattgttttccacaatgaggcttggagcacacttctgcgaactgtccatagtgtcattaatcgctcaccaagacacatgatagaagaaattgttctagtagatgatgccagtgaaagagactttttgaaaaggcctttagagagttatgtgaaaaaactaaaagtaccagttcatgtaattcgaatggaacaacgttctggattgatcagagctagatttgagtgtacagtgggatggctggagcctctcttggccaggatcaaacatgacaggagaacagtggtgtgtcccatcatcgatgtgatcagtgatgatacttttgagtacatggcaggctctgatatgacctatggtgggttcaactggaagctcaattttcgctggtatcctgttccccaaagagaaatggacagaaggaaaggtgatcggactcttcctgtcaggacacctaccatggcaggaggccttttttcaatagacagagattactttcaggaaattggaacatatgatgctggaatggatatttggggaggagaaaacctagaaatttcctttaggatttggcagtgtggaggaactttggaaattgttacatgctcacatgttggacatgtgtttcggaaagctacaccttacacgtttccaggaggcacagggcagattatcaataaaaataacagacgacttgcagaagtgtggatggatgaattcaagaatttcttctatataatttctccaggtgttacaaaggtagattatggagatatatcgtcaagagttggtctaagacacaaactacaatgcaaacctttttcctggtacctagagaatatatatcctgattctcaaattccacgtcactatttctcattgggagagatacgaaatgtggaaacgaatcagtgtctagataacatggctagaaaagagaatgaaaaagttggaatttttaattgccatggtatggggggtaatcaggttttctcttatactgccaacaaagaaattagaacagatgacctttgcttggatgtttccaaacttaatggcccagttacaatgctcaaatgccaccacctaaaaggcaaccaactctgggagtatgacccagtgaaattaaccctgcagcatgtgaacagtaatcagtgcctggataaagccacagaagaggatagccaggtgcccagcattagagactgcaatggaagtcggtcccagcagtggcttcttcgaaacgtcaccctgccagaaatattctgagaccaaatttacaaaaaaacgaaaaaaataaggattgactgggctacctcagcatacatttctgccacattcttaagtagcaaaaaaggaaaagtgctttcctcctctgcaggatgtaaggtttatcagccattaaaacttagacttctctagcttttcactagctgtgaaccagccttcctgtccatggacgtgaaactgcatagtaatgagactgtgcacactgatgtttacaagattgaaagagtctttctccgaaaatcatggtaaagaatactgagacaatgaaaaaaaatcaacaaaatatgctttctggagaactgtaccttttatggtttgcttgcacatcagtagtttctgctgaacgtgctgtcataatgaagagatttccaagattttttttcctgattagaactggtagccagtatattaaatattgatataaaaataaaagaactggaaccagattcagaatcatgaaaacaacatttttacaacaacaaaaaaactatattaaacagggtttaaaggaaattaaaacagaactatgagaagtacaatttgttatagtatagtatcaaatttctatatagattttatacctcagtggggaaaaataactgattccaatgacattcattttgttttcatctgtgatagtcatggatgcttttattttccttggggtgctgaaattgagctgaaaaaaaaaggctctttgaatatagttttaatttctctctacagttttttttgtttggtttgtgggctgttggaattgtaatttttaattgccttctaaaaaatggaaatttaacaatgtctgatctcagctgaacaaattagatgtttcagttgctcttgggtcaactggcttacagatttacatgtgcacacacacacaaatttcttatcacattttcgacttcttcacttgacctaactgattatgcgaaatacccaagattcatgctactgtaccacagatttgttttcacagcaataaatcttcagttctttgtttatgattccacttaacaaaaggcctgcagaagtgatttattatttgggtatttggagataatacatttgatggttttttggaaaacctttttcactccatactcagatatgcttcattgtcaaatgcatatttagattagattattgaattgtaatgtttatctgctgctttttttaaataaaatttgactgaaaatgtttaa

SEQ ID NO: 365466 - DNA, 2879 bp, Homo sapiens
tatatttttaaattttgcatttgacttaaagtgccatgagaaaatttgcatactgcaaggtggtcctagccacctccttgatttgggtactcttggatatgttcctgctgctttacttcagtgaatgcaacaaatgtgatgaaaaaaaggagagaggacttcctgctggagatgttctagagccagtacaaaagcctcatgaaggtcctggagaaatggggaaaccagtcgtcattcctaaagaggatcaagaaaagatgaaagagatgtttaaaatcaatcagttcaatttaatggcaagtgagatgattgcactcaacagatctttaccagatgttaggttagaagggtgtaaaacaaaggtgtatccagataatcttcctacaacaagtgtggtgattgttttccacaatgaggcttggagcacacttctgcgaactgtccatagtgtcattaatcgctcaccaagacacatgatagaagaaattgttctagtagatgatgccagtgaaagagactttttgaaaaggcctttagagagttatgtgaaaaaactaaaagtaccagttcatgtaattcgaatggaacaacgttctggattgatcagagctagattaaaaggagctgctgtgtctaaaggccaagtgatcaccttcctggatgcccattgtgagtgtacagtgggatggctggagcctctcttggccaggatcaaacatgacaggagaacagtggtgtgtcccatcatcgatgtgatcagtgatgatacttttgagtacatggcaggctctgatatgacctatggtgggttcaactggaagctcaattttcgctggtatcctgttccccaaagagaaatggacagaaggaaaggtgatcggactcttcctgtcaggacacctaccatggcaggaggccttttttcaatagacagagattactttcaggaaattggaacatatgatgctggaatggatatttggggaggagaaaacctagaaatttcctttaggatttggcagtgtggaggaactttggaaattgttacatgctcacatgttggacatgtgtttcggaaagctacaccttacacgtttccaggaggcacagggcagattatcaataaaaataagtgttacaaaggtagattatggagatatatcgtcaagagttggtctaagacacaaactacaatgcaaacctttttcctggtacctagagaatatatatcctgattctcaaattccacgtcactatttctcattgggagagatacgaaatgtggaaacgaatcagtgtctagataacatggctagaaaagagaatgaaaaagttggaatttttaattgccatggtatggggggtaatcaggttttctcttatactgccaacaaagaaattagaacagatgacctttgcttggatgtttccaaacttaatggcccagttacaatgctcaaatgccaccacctaaaaggcaaccaactctgggagtatgacccagtgaaattaaccctgcagcatgtgaacagtaatcagtgcctggataaagccacagaagaggatagccaggtgcccagcattagagactgcaatggaagtcggtcccagcagtggcttcttcgaaacgtcaccctgccagaaatattctgagaccaaatttacaaaaaaacgaaaaaaataaggattgactgggctacctcagcatacatttctgccacattcttaagtagcaaaaaaggaaaagtgctttcctcctctgcaggatgtaaggtttatcagccattaaaacttagacttctctagcttttcactagctgtgaaccagccttcctgtccatggacgtgaaactgcatagtaatgagactgtgcacactgatgtttacaagattgaaagagtctttctccgaaaatcatggtaaagaatactgagacaatgaaaaaaaatcaacaaaatatgctttctggagaactgtaccttttatggtttgcttgcacatcagtagtttctgctgaacgtgctgtcataatgaagagatttccaagattttttttcctgattagaactggtagccagtatattaaatattgatataaaaataaaagaactggaaccagattcagaatcatgaaaacaacatttttacaacaacaaaaaaactatattaaacagggtttaaaggaaattaaaacagaactatgagaagtacaatttgttatagtatagtatcaaatttctatatagattttatacctcagtggggaaaaataactgattccaatgacattcattttgttttcatctgtgatagtcatggatgcttttattttccttggggtgctgaaattgagctgaaaaaaaaaggctctttgaatatagttttaatttctctctacagttttttttgtttggtttgtgggctgttggaattgtaatttttaattgccttctaaaaaatggaaatttaacaatgtctgatctcagctgaacaaattagatgtttcagttgctcttgggtcaactggcttacagatttacatgtgcacacacacacaaatttcttatcacattttcgacttcttcacttgacctaactgattatgcgaaatacccaagattcatgctactgtaccacagatttgttttcacagcaataaatcttcagttctttgtttatgattccacttaacaaaaggcctgcagaagtgatttattatttgggtatttggagataatacatttgatggttttttggaaaacctttttcactccatactcagatatgcttcattgtcaaatgcatatttagattagattattgaattgtaatgtttatctgctgctttttttaaataaaatttgactgaaaatgtttaa

SEQ ID NO: 365467 - DNA, 1784 bp, Homo sapiens
ttgtaagacctttctagaccaatgaattttagatactcagacagcgataggccaataggccatttcagagtagggccagggaaagtttaggttgatatttagtgtatatgtgtgtgtatctgtctgtctaattaacttctccaactcctgatattttcattatttattgtcccatagatacgaaatgtggaaacgaatcagtgtctagataacatggctagaaaagagaatgaaaaagttggaatttttaattgccatggtatggggggtaatcaggttttctcttatactgccaacaaagaaattagaacagatgacctttgcttggatgtttccaaacttaatggcccagttacaatgctcaaatgccaccacctaaaaggcaaccaactctgggagtatgacccagtgaaattaaccctgcagcatgtgaacagtaatcagtgcctggataaagccacagaagaggatagccaggtgcccagcattagagactgcaatggaagtcggtcccagcagtggcttcttcgaaacgtcaccctgccagaaatattctgagaccaaatttacaaaaaaacgaaaaaaataaggattgactgggctacctcagcatacatttctgccacattcttaagtagcaaaaaaggaaaagtgctttcctcctctgcaggatgtaaggtttatcagccattaaaacttagacttctctagcttttcactagctgtgaaccagccttcctgtccatggacgtgaaactgcatagtaatgagactgtgcacactgatgtttacaagattgaaagagtctttctccgaaaatcatggtaaagaatactgagacaatgaaaaaaaatcaacaaaatatgctttctggagaactgtaccttttatggtttgcttgcacatcagtagtttctgctgaacgtgctgtcataatgaagagatttccaagattttttttcctgattagaactggtagccagtatattaaatattgatataaaaataaaagaactggaaccagattcagaatcatgaaaacaacatttttacaacaacaaaaaaactatattaaacagggtttaaaggaaattaaaacagaactatgagaagtacaatttgttatagtatagtatcaaatttctatatagattttatacctcagtggggaaaaataactgattccaatgacattcattttgttttcatctgtgatagtcatggatgcttttattttccttggggtgctgaaattgagctgaaaaaaaaaggctctttgaatatagttttaatttctctctacagttttttttgtttggtttgtgggctgttggaattgtaatttttaattgccttctaaaaaatggaaatttaacaatgtctgatctcagctgaacaaattagatgtttcagttgctcttgggtcaactggcttacagatttacatgtgcacacacacacaaatttcttatcacattttcgacttcttcacttgacctaactgattatgcgaaatacccaagattcatgctactgtaccacagatttgttttcacagcaataaatcttcagttctttgtttatgattccacttaacaaaaggcctgcagaagtgatttattatttgggtatttggagataatacatttgatggttttttggaaaacctttttcactccatactcagatatgcttcattgtcaaatgcatatttagattagattattgaattgtaatgtttatctgctgctttttttaaataaaatttgactgaaaatgtttaa

SEQ ID NO: 365468 - DNA, 1700 bp, Homo sapiens
  misc_feature (163)..(163): n is a, c, g, or t
gaaattatatagaagaaattcttgaattcatccatccacacttctgcaagtcgtctgttatttttattgataatctgccctgcctcctggaaacgtgtaaggtgtagctttccgaaacacatgtccaacatgtgagcatgtaacaatttccaaagttcctccncactgccaaatcctaaaggaaatttccaggttttctcttatactgccaacaaagaaattagaacagatgacctttgcttggatgtttccaaacttaatggcccagttacaatgctcaaatgccaccacctaaaaggcaaccaactctgggagtatgacccagtgaaattaaccctgcagcatgtgaacagtaatcagtgcctggataaagccacagaagaggatagccaggtgcccagcattagagactgcaatggaagtcggtcccagcagtggcttcttcgaaacgtcaccctgccagaaatattctgagaccaaatttacaaaaaaacgaaaaaaataaggattgactgggctacctcagcatacatttctgccacattcttaagtagcaaaaaaggaaaagtgctttcctcctctgcaggatgtaaggtttatcagccattaaaacttagacttctctagcttttcactagctgtgaaccagccttcctgtccatggacgtgaaactgcatagtaatgagactgtgcacactgatgtttacaagattgaaagagtctttctccgaaaatcatggtaaagaatactgagacaatgaaaaaaaatcaacaaaatatgctttctggagaactgtaccttttatggtttgcttgcacatcagtagtttctgctgaacgtgctgtcataatgaagagatttccaagattttttttcctgattagaactggtagccagtatattaaatattgatataaaaataaaagaactggaaccagattcagaatcatgaaaacaacatttttacaacaacaaaaaaactatattaaacagggtttaaaggaaattaaaacagaactatgagaagtacaatttgttatagtatagtatcaaatttctatatagattttatacctcagtggggaaaaataactgattccaatgacattcattttgttttcatctgtgatagtcatggatgcttttattttccttggggtgctgaaattgagctgaaaaaaaaaggctctttgaatatagttttaatttctctctacagttttttttgtttggtttgtgggctgttggaattgtaatttttaattgccttctaaaaaatggaaatttaacaatgtctgatctcagctgaacaaattagatgtttcagttgctcttgggtcaactggcttacagatttacatgtgcacacacacacaaatttcttatcacattttcgacttcttcacttgacctaactgattatgcgaaatacccaagattcatgctactgtaccacagatttgttttcacagcaataaatcttcagttctttgtttatgattccacttaacaaaaggcctgcagaagtgatttattatttgggtatttggagataatacatttgatggttttttggaaaacctttttcactccatactcagatatgcttcattgtcaaatgcatatttagattagattattgaattgtaatgtttatctgctgctttttttaaataaaatttgactgaaaatgtttaa

SEQ ID NO: 365469 - DNA, 825 bp, Homo sapiens
gatcaagaaaagatgaaagagatgtttaaaatcaatcagttcaatttaatggcaagtgagatgattgcactcaacagatctttaccagatgttaggttagaagggtaagtacttactgtggtcctgatagtatgtgaatgaaaagtatattctgaattttcagtaaattgcacttgagtgctgattgttcttaaggcaaatgttatatcactatgttactacttaccccacttagaaaataattaaatgctgatagaaataatatctcaagcttctactgattattagcactatgtatttcaggcattggaagataattatttatcttaatggattagaaggggattttaaactttattattaccaaaatactcacatactcaactttttacaaaaagatttaagttgtatgtaacttgaaacagtgaaatacacagtcgtaagtatacagctcactgaattttttgctatgtatacacctgtgtaaccatcagccaaatcaagacatagaatgatcccatcacccctgaaagtctccttatgttttttgtagtcattacttacatccccagaggcagccgttatattgacctctctaaacatagattagttttgtctctttttgaactttttatgatggatccacaccattttttgtgcctttaagattcatattgttgcatgtatcagaattttattcttttctactgcaaatagtgatttgtaatatgaatatgccattgtttatttatacattgatagacctttggattatttctactttttgacccctataaataaagctattgtgacattcttgttcat

SEQ ID NO: 365470 - DNA, 5314 bp, Homo sapiens
tatatttttaaattttgcatttgacttaaagtgccatgagaaaatttgcatactgcaaggtggtcctagccacctccttgatttgggtactcttggatatgttcctgctgctttacttcagtgaatgcaacaaatgtgatgaaaaaaaggagagaggacttcctgctggagatgttctagagccagtacaaaagcctcatgaaggtcctggagaaatggggaaaccagtcgtcattcctaaagaggatcaagaaaagatgaaagagatgtttaaaatcaatcagttcaatttaatggcaagtgagatgattgcactcaacagatctttaccagatgttaggttagaagggtgtaaaacaaaggtgtatccagataatcttcctacaacaagtgtggtgattgttttccacaatgaggcttggagcacacttctgcgaactgtccatagtgtcattaatcgctcaccaagacacatgatagaagaaattgttctagtagatgatgccagtgaaagagactttttgaaaaggcctttagagagttatgtgaaaaaactaaaagtaccagttcatgtaattcgaatggaacaacgttctggattgatcagagctagattaaaaggagctgctgtgtctaaaggccaagtgatcaccttcctggatgcccattgtgagtgtacagtgggatggctggagcctctcttggccaggatcaaacatgacaggagaacagtggtgtgtcccatcatcgatgtgatcagtgatgatacttttgagtacatggcaggctctgatatgacctatggtgggttcaactggaagctcaattttcgctggtatcctgttccccaaagagaaatggacagaaggaaaggtgatcggactcttcctgtcaggacacctaccatggcaggaggccttttttcaatagacagagattactttcaggaaattggaacatatgatgctggaatggatatttggggaggagaaaacctagaaatttcctttaggatttggcagtgtggaggaactttggaaattgttacatgctcacatgttggacatgtgtttcggaaagctacaccttacacgtttccaggaggcacagggcagattatcaataaaaataacagacgacttgcagaagtgtggatggatgaattcaagaatttcttctatataatttctccaggtgttacaaaggtagattatggagatatatcgtcaagagttggtctaagacacaaactacaatgcaaacctttttcctggtacctagagaatatatatcctgattctcaaattccacgtcactatttctcattgggagagatacgaaatgtggaaacgaatcagtgtctagataacatggctagaaaagagaatgaaaaagttggaatttttaattgccatggtatggggggtaatcaggttttctcttatactgccaacaaagaaattagaacagatgacctttgcttggatgtttccaaacttaatggcccagttacaatgctcaaatgccaccacctaaaaggcaaccaactctgggagtatgacccagtgaaattaaccctgcagcatgtgaacagtaatcagtgcctggataaagccacagaagaggatagccaggtgcccagcattagagactgcaatggaagtcggtcccagcagtggcttcttcgaaacgtcaccctgccagaaatattctgagaccaaatttacaaaaaaacgaaaaaaataaggattgactgggctacctcagcatacatttctgccacattcttaagtagcaaaaaaggaaaagtgctttcctcctctgcaggatgtaaggtttatcagccattaaaacttagacttctctagcttttcactagctgtgaaccagccttcctgtccatggacgtgaaactgcatagtaatgagactgtgcacactgatgtttacaagattgaaagagtctttctccgaaaatcatggtaaagaatactgagacaatgaaaaaaaatcaacaaaatatgctttctggagaactgtaccttttatggtttgcttgcacatcagtagtttctgctgaacgtgctgtcataatgaagagatttccaagattttttttcctgattagaactggtagccagtatattaaatattgatataaaaataaaagaactggaaccagattcagaatcatgaaaacaacatttttacaacaacaaaaaaactatattaaacagggtttaaaggaaattaaaacagaactatgagaagtacaatttgttatagtatagtatcaaatttctatatagattttatacctcagtggggaaaaataactgattccaatgacattcattttgttttcatctgtgatagtcatggatgcttttattttccttggggtgctgaaattgagctgaaaaaaaaaggctctttgaatatagttttaatttctctctacagttttttttgtttggtttgtgggctgttggaattgtaatttttaattgccttctaaaaaatggaaatttaacaatgtctgatctcagctgaacaaattagatgtttcagttgctcttgggtcaactggcttacagatttacatgtgcacacacacacaaatttcttatcacattttcgacttcttcacttgacctaactgattatgcgaaatacccaagattcatgctactgtaccacagatttgttttcacagcaataaatcttcagttctttgtttatgattccacttaacaaaaggcctgcagaagtgatttattatttgggtatttggagataatacatttgatggttttttggaaaacctttttcactccatactcagatatgcttcattgtcaaatgcatatttagattagattattgaattgtaatgtttatctgctgctttttttaaataaaatttgactgaaaatgtttaattggcattttttaatgacttagccaaagaagtgcagctattattccatattaataggcttgcatttcttttcctaaatcttatttaggctaaatcagttttatttttctctgattttttttaataccacagaatcacctgagtgtcaattgaaagttgtcaattaaaaggtaaccttttaatctcgtaggaggaatctcattaagacatttttcctgatatgtagagcagtctgttggcaaaaatgcatatattttctttcatatttgtaaaattatatttaatggaattcttttctttgattatcaaggactttcactgcaggcagtgctatttcttgtgcctaagaatgtttccaaaagtcgcatcgctaatgatatttgccaagttgagtgtacacaaagtttctcatatcctgttcaagttaatcaacatcaagcacatggggatgctttagggtgagtctatagtacaaaatgcataaaccatgtccccaggaaatttgaaaggaagcaggtgctgaatggaatttttttccttttccatgagctgtgttaattctatctccagtaggcctaatgcttgaataagcaagatgtctaatcaataaattattttcatgctcagaatttcaggtttttgtactccagcatagcttggtcttatttcttactgtatgaaagcttaacagcaatgtgatttaaggttttgttttaaatgggagatgtaagtgatttaattcatgggtacttttagaacctgatagataatcccattgcctttatttttctaattaaagaattcctaaatactttgaaaatacaaaatattcctgaatagttgtgccttacattggttttatttgaagttagagtggatccctgtttatcataattacttgtaattaggcagatgcttatcactctattataactcaaattgggaagaaaagaatgaaaaagaaaacaatggctgggtactggctcatacctgtaattttagcattttgggaaggtgagacgataggaccacttgagggcaggagtttgaggttgcagtgagctatgatggtgccactgcactccagcctgggcaacagagaagaaaccatgtatcttaaaaaaaaagaaaaaatgaaggatgaaaaagtgggattattatttaaccagtgaagaattcataaatgtgacaattaaggataatttgaatctcacaaatctattcaccccaccccagtcaaggtctattttaatatatctatcttcattggcattcttgagaaatagtgctgccattgaacattgggaatattcatccattctgcagatggaggacatcgtgcaggccatgtcctcattgctcccattctacatttagctgagaaacagaggttcctctttgtaaggatttgatgctcttctcatcttccaagaagtataccaagagcaaatttaactctatagttacctgttcttcaaagaaaaaagaaacttagaaggtagtgtttctgaggtcataactgtgaggggttgtatacaaagaatgagtcactttttaagccatttggaaaattagatctgtttctaattagatgacattttctccattctctgatttcctgaagattgccaagcatttgcttgataatctaccaggactgataattttgcagaatatgaggcaaatatatgaaattcagttgtgtatctatatcctagcaacaaacacttgaaaatataacgttaaaatatgccatttgtaatagcatcaaataagtcaaacttctaagtaggaagaaagttaacaacaagacctctactctgaaaactacaaaacagtgctgggaagaattatagagcaccaaaataaatggctattctatgctcatggattgaaagactgcataatggtaagatgtcagttccccacaaattgttatctagattcaatgagatcaaaatcccacaaggccatcttgtagaaattggcaaatacatatatgaaaatgcaacagattctaagtagccaagataattttgaagaagaaaaataaaattggagcacttgtactacccaatgtcaagacttgctctaaagctacaacagttaagagagtatggtactagagttaggataaacaacaaatagaaatagacatgtccagaaatagacccacatgtatatggttattggcttttcaacaaaaacaagctattcaatagaaaaagggaagatttttcagttggagttgaagtaactggatgtctgggaaaaagcaatgttaataatgccttcttcataccatgcacagtttattcaaaatggattatagaactaaatgtgaatggcaaaacaataaatcttgtaaaaggaa

SEQ ID NO: 365471 - DNA, 2941 bp, Homo sapiens
tatatttttaaattttgcatttgacttaaagtgccatgagaaaatttgcatactgcaaggtggtcctagccacctccttgatttgggtactcttggatatgttcctgctgctttacttcagtgaatgcaacaaatgtgatgaaaaaaaggagagaggacttcctgctggagatgttctagagccagtacaaaagcctcatgaaggtcctggagaaatggggaaaccagtcgtcattcctaaagaggatcaagaaaagatgaaagagatgtttaaaatcaatcagttcaatttaatggcaagtgagatgattgcactcaacagatctttaccagatgttaggttagaagggtgtaaaacaaaggtgtatccagataatcttcctacaacaagtgtggtgattgttttccacaatgaggcttggagcacacttctgcgaactgtccatagtgtcattaatcgctcaccaagacacatgatagaagaaattgttctagtagatgatgccagtgaaagagactttttgaaaaggcctttagagagttatgtgaaaaaactaaaagtaccagttcatgtaattcgaatggaacaacgttctggattgatcagagctagattaaaaggagctgctgtgtctaaaggccaagtgatcaccttcctggatgcccattgtgagtgtacagtgggatggctggagcctctcttggccaggatcaaacatgacaggagaacagtggtgtgtcccatcatcgatgtgatcagtgatgatacttttgagtacatggcaggctctgatatgacctatggtgggttcaactggaagctcaattttcgctggtatcctgttccccaaagagaaatggacagaaggaaaggtgatcggactcttcctgtcaggacacctaccatggcaggaggccttttttcaatagacagagattactttcaggaaattggaacatatgatgctggaatggatatttggggaggagaaaacctagaaatttcctttaggatttggcagtgtggaggaactttggaaattgttacatgctcacatgttggacatgtgtttcggaaagctacaccttacacgtttccaggaggcacagggcagattatcaataaaaataacagacgacttgcagaagtgtggatggatgaattcaagaatttcttctatataatttctccaggtgttacaaaggtagattatggagatatatcgtcaagagttggtctaagacacaaactacaatgcaaacctttttcctggtacctagagaatatatatcctgattctcaaattccacgtcactatttctcattgggagagatacgaaatgtggaaacgaatcagtgtctagataacatggctagaaaagagaatgaaaaagttggaatttttaattgccatggtatggggggtaatcaggttttctcttatactgccaacaaagaaattagaacagatgacctttgcttggatgtttccaaacttaatggcccagttacaatgctcaaatgccaccacctaaaaggcaaccaactctgggagtatgacccagtgaaattaaccctgcagcatgtgaacagtaatcagtgcctggataaagccacagaagaggatagccaggtgcccagcattagagactgcaatggaagtcggtcccagcagtggcttcttcgaaacgtcaccctgccagaaatattctgagaccaaatttacaaaaaaacgaaaaaaataaggattgactgggctacctcagcatacatttctgccacattcttaagtagcaaaaaaggaaaagtgctttcctcctctgcaggatgtaaggtttatcagccattaaaacttagacttctctagcttttcactagctgtgaaccagccttcctgtccatggacgtgaaactgcatagtaatgagactgtgcacactgatgtttacaagattgaaagagtctttctccgaaaatcatggtaaagaatactgagacaatgaaaaaaaatcaacaaaatatgctttctggagaactgtaccttttatggtttgcttgcacatcagtagtttctgctgaacgtgctgtcataatgaagagatttccaagattttttttcctgattagaactggtagccagtatattaaatattgatataaaaataaaagaactggaaccagattcagaatcatgaaaacaacatttttacaacaacaaaaaaactatattaaacagggtttaaaggaaattaaaacagaactatgagaagtacaatttgttatagtatagtatcaaatttctatatagattttatacctcagtggggaaaaataactgattccaatgacattcattttgttttcatctgtgatagtcatggatgcttttattttccttggggtgctgaaattgagctgaaaaaaaaaggctctttgaatatagttttaatttctctctacagttttttttgtttggtttgtgggctgttggaattgtaatttttaattgccttctaaaaaatggaaatttaacaatgtctgatctcagctgaacaaattagatgtttcagttgctcttgggtcaactggcttacagatttacatgtgcacacacacacaaatttcttatcacattttcgacttcttcacttgacctaactgattatgcgaaatacccaagattcatgctactgtaccacagatttgttttcacagcaataaatcttcagttctttgtttatgattccacttaacaaaaggcctgcagaagtgatttattatttgggtatttggagataatacatttgatggttttttggaaaacctttttcactccatactcagatatgcttcattgtcaaatgcatatttagattagattattgaattgtaatgtttatctgctgctttttttaaataaaatttgactgaaaatgtttaa

SEQ ID NO: 365472 - DNA, 2887 bp, Homo sapiens
tatatttttaaattttgcatttgacttaaagtgccatgagaaaatttgcatactgcaaggtggtcctagccacctccttgatttgggtactcttggatatgttcctgctgctttacttcagtgaatgcaacaaatgtgatgaaaaaaaggagagaggacttcctgctggagatgttctagagccagtacaaaagcctcatgaaggtcctggagaaatggggaaaccagtcgtcattcctaaagaggatcaagaaaagatgaaagagatgtttaaaatcaatcagttcaatttaatggcaagtgagatgattgcactcaacagatctttaccagatgttaggttagaagggtgtaaaacaaaggtgtatccagataatcttcctacaacaagtgtggtgattgttttccacaatgaggcttggagcacacttctgcgaactgtccatagtgtcattaatcgctcaccaagacacatgatagaagaaattgttctagtagatgatgccagtgaaagagactttttgaaaaggcctttagagagttatgtgaaaaaactaaaagtaccagttcatgtaattcgaatggaacaacgttctggattgatcagagctagattaaaaggagctgctgtgtctaaaggccaagtgatcaccttcctggatgcccattgtgagtgtacagtgggatggctggagcctctcttggccaggatcaaacatgacaggagaacagtggtgtgtcccatcatcgatgtgatcagtgatgatacttttgagtacatggcaggctctgatatgacctatggtgggttcaactggaagctcaattttcgctggtatcctgttccccaaagagaaatggacagaaggaaaggtgatcggactcttcctgtcaggacacctaccatggcaggaggccttttttcaatagacagagattactttcaggaaattggaacatatgatgctggaatggatatttggggaggagaaaacctagaaatttcctttaggatttggcagtgtggaggaactttggaaattgttacatgctcacatgttggacatgtgtttcggaaagctacaccttacacgtttccaggaggcacagggcagattatcaataaaaataacagacgacttgcagaagtgtggatggatgaattcaagaatttcttctatataatttctccaggtgttacaaaggtagattatggagatatatcgtcaagagttggtctaagacacaaactacaatgcaaacctttttcctggtacctagagaatatatatcctgattctcaaattccacgtcactatttctcattgggagagatacgaaatgtggaaacgaatcagtgtctagataacatggctagaaaagagaatgaaaaagttggaatttttaattgccatggtatggggggtaatcaggttttctcttatactgccaacaaagaaattagaacagatgacctttgcttggatgtttccaaacttaatggcccagttacaatgctcaaatgccaccacctaaaaggcaaccaactctgggagtatgacccagtgaaattaaccctgcagcatgtgaacagtaatcagtgcctggataaagccacagaagaggatagccaggtgcccagcattagagactgcaatggaagtcggtcccagcagtggcttcttcgaaacgtcaccctgccagaaatattctgagaccaaatttacaaaaaaacgaaaaaaataaggattgactgggctacctcagcatacatttctgccacattcttaagtagcaaaaaaggaaaagtgctttcctcctctgcaggatgtaaggtttatcagccattggacgtgaaactgcatagtaatgagactgtgcacactgatgtttacaagattgaaagagtctttctccgaaaatcatggtaaagaatactgagacaatgaaaaaaaatcaacaaaatatgctttctggagaactgtaccttttatggtttgcttgcacatcagtagtttctgctgaacgtgctgtcataatgaagagatttccaagattttttttcctgattagaactggtagccagtatattaaatattgatataaaaataaaagaactggaaccagattcagaatcatgaaaacaacatttttacaacaacaaaaaaactatattaaacagggtttaaaggaaattaaaacagaactatgagaagtacaatttgttatagtatagtatcaaatttctatatagattttatacctcagtggggaaaaataactgattccaatgacattcattttgttttcatctgtgatagtcatggatgcttttattttccttggggtgctgaaattgagctgaaaaaaaaaggctctttgaatatagttttaatttctctctacagttttttttgtttggtttgtgggctgttggaattgtaatttttaattgccttctaaaaaatggaaatttaacaatgtctgatctcagctgaacaaattagatgtttcagttgctcttgggtcaactggcttacagatttacatgtgcacacacacacaaatttcttatcacattttcgacttcttcacttgacctaactgattatgcgaaatacccaagattcatgctactgtaccacagatttgttttcacagcaataaatcttcagttctttgtttatgattccacttaacaaaaggcctgcagaagtgatttattatttgggtatttggagataatacatttgatggttttttggaaaacctttttcactccatactcagatatgcttcattgtcaaatgcatatttagattagattattgaattgtaatgtttatctgctgctttttttaaataaaatttgactgaaaatgtttaa

SEQ ID NO: 365473 - DNA, 2069 bp, Homo sapiens
gtccatttctcttatggggaacaggacagaaggaaaggtgatcacttggcctttagacacagcagctcctttcaggaaattggaacatatgatgctggaatggatatttggggaggagaaaacctagaaatttcctttaggatttggcagtgtggaggaactttggaaattgttacatgctcacatgttggacatgtgtttcggaaagctacaccttacacgtttccaggaggcacagggcagattatcaataaaaataacagacgacttgcagaagtgtggatggatgaattcaagaatttcttctatataatttctccaggtgttacaaaggtagattatggagatatatcgtcaagagttggtctaagacacaaactacaatgcaaacctttttcctggtacctagagaatatatatcctgattctcaaattccacgtcactatttctcattgggagagatacgaaatgtggaaacgaatcagtgtctagataacatggctagaaaagagaatgaaaaagttggaatttttaattgccatggtatggggggtaatcaggttttctcttatactgccaacaaagaaattagaacagatgacctttgcttggatgtttccaaacttaatggcccagttacaatgctcaaatgccaccacctaaaaggcaaccaactctgggagtatgacccagtgaaattaaccctgcagcatgtgaacagtaatcagtgcctggataaagccacagaagaggatagccaggtgcccagcattagagactgcaatggaagtcggtcccagcagtggcttcttcgaaacgtcaccctgccagaaatattctgagaccaaatttacaaaaaaacgaaaaaaataaggattgactgggctacctcagcatacatttctgccacattcttaagtagcaaaaaaggaaaagtgctttcctcctctgcaggatgtaaggtttatcagccattaaaacttagacttctctagcttttcactagctgtgaaccagccttcctgtccatggacgtgaaactgcatagtaatgagactgtgcacactgatgtttacaagattgaaagagtctttctccgaaaatcatggtaaagaatactgagacaatgaaaaaaaatcaacaaaatatgctttctggagaactgtaccttttatggtttgcttgcacatcagtagtttctgctgaacgtgctgtcataatgaagagatttccaagattttttttcctgattagaactggtagccagtatattaaatattgatataaaaataaaagaactggaaccagattcagaatcatgaaaacaacatttttacaacaacaaaaaaactatattaaacagggtttaaaggaaattaaaacagaactatgagaagtacaatttgttatagtatagtatcaaatttctatatagattttatacctcagtggggaaaaataactgattccaatgacattcattttgttttcatctgtgatagtcatggatgcttttattttccttggggtgctgaaattgagctgaaaaaaaaaggctctttgaatatagttttaatttctctctacagttttttttgtttggtttgtgggctgttggaattgtaatttttaattgccttctaaaaaatggaaatttaacaatgtctgatctcagctgaacaaattagatgtttcagttgctcttgggtcaactggcttacagatttacatgtgcacacacacacaaatttcttatcacattttcgacttcttcacttgacctaactgattatgcgaaatacccaagattcatgctactgtaccacagatttgttttcacagcaataaatcttcagttctttgtttatgattccacttaacaaaaggcctgcagaagtgatttattatttgggtatttggagataatacatttgatggttttttggaaaacctttttcactccatactcagatatgcttcattgtcaaatgcatatttagattagattattgaattgtaatgtttatctgctgctttttttaaataaaatttgactgaaaatgtttaa

SEQ ID NO: 365474 - DNA, 1176 bp, Homo sapiens
tatatttttaaattttgcatttgacttaaagtgccatgagaaaatttgcatactgcaaggtggtcctagccacctccttgatttgggtactcttggatatgttcctgctgctttacttcagtgaatgcaacaaatgtgatgaaaaaaaggagagaggacttcctgctggagatgttctagagccagtacaaaagcctcatgaaggtcctggagaaatggggaaaccagtcgtcattcctaaagaggatcaagaaaagatgaaagagatgtttaaaatcaatcagttcaatttaatggcaagtgagatgattgcactcaacagatctttaccagatgttaggttagaagggtgtaaaacaaaggtgtatccagataatcttcctacaacaagtgtggtgattgttttccacaatgaggcttggagcacacttctgcgaactgtccatagtgtcattaatcgctcaccaagacacatgatagaagaaattgttctagtagatgatgccagtgaaagagactttttgaaaaggcctttagagagttatgtgaaaaaactaaaagtaccagttcatgtaattcgaatggaacaacgttctggattgatcagagctagattaaaaggagctgctgtgtctaaaggccaagtgatcaccttcctggatgcccattgtgagtgtacagtgggatggctggagcctctcttggccaggatcaaacatgacaggagaacagtggtgtgtcccatcatcgatgtgatcagtgatgatacttttgagtacatggcaggctctgatatgacctatggtgggttcaactggaagctcaattttcgctggtatcctgttccccaaagagaaatggacagaaggaaaggtgatcggactcttcctgtcaggacacctaccatggcaggaggccttttttcaatagacagagattactttcaggaaattggaacatatgatgctggaatggatatttggggaggagaaaacctagaaatttcctttaggatttggcagtgtggaggaactttggaaattgttacatgctcacatgttggacatgtgtttcggaaagctacaccttacacgtttccaggaggctggaggttgcagtgagccaagatcacgccactgcactccagcctgggcaacaaagtgagaccctgtctca

SEQ ID NO: 365475 - DNA, 504 bp, Homo sapiens
agagggaggggcacagggggctgaggagtgctgggtcgggcttccagctccctacaacgcagaccagtactggagttcgtggtgctggaagaccgccgcccgactctgggccccgggtaggaaacgtaagtgccaggaagttagcagagtggttctttggctggcgcctgaacctcgccagtcttcgtcgcccctcccctgccaacgcctaccccgcttcgaccggagggtgcgctgtccctctggtcactgtgatcaccgtccatggccgcctgcggatacccacgccgtgctcagaagagggctctgaggccacgcccgcctgtggggtcggtggccgggcttccgggaccccagagggagtcgtcgcgcgctaggtggaggggacccctctggaatccggcgatccccgggcgcagatgcaggagcgggtggggagagccgcgttcctggcatgtttgcctcaaaggggctcacaggaagggaacccgcgcctcgaaggac

SEQ ID NO: 365476 - DNA, 1418 bp, Homo sapiens
agagggaggggcacagggggctgaggagtgctgggtcgggcttccagctccctacaacgcagaccagtactggagttcgtggtgctggaagaccgccgcccgactctgggccccgggtaggaaacaacaatttcggacctcctggggtctatgctaggtatgaggtgtatctttgccctccatcaagtagcaaagatggacatgtaaacaaatttcgacactgtgatgactgccacaaaaagcagcattatgaggttgaatgtaaaaggataaccttagcggcggcgggggccggaggatgaaggaaggcttcctgaggtaggcgctggttgaaactgaagttggagagagcaagtggcatttgctgaagtgcatttccggtagaaaactccagtggtccctcacctgactgagtggcgcagtcagagataaatggaacagagtctacaaataaacattttataaagatgatccttcaatacatattctacagcccagttaaaatgtgagaggccatgatctacagacagccatttataaaggtggatcagggccggacacggtggctcaacgtctgtaatcccggcactgtgggaggccaaagcgggaggatcgcttgagcccaggagttcgagaccaacctggccaacatggtgagaccccatctttacaaaaaaatatatatatccaggcatagtggtgtgcacctgtggtcctgtggtcccagctactcaggaagctgaggcagttgaggctgcagtgagccacgttctggccactacactccagcctgggcatcaaagtgacaagaccaaaaaaaaaaaaaaatgtggattggaaggaggcaagaaagaagtcaggaaaagggtggaatgtaagtccctaaggacacaatcttactcacaattgtatctccaacatttggcataatgcctaatacgtaagtattttatgaattaattaaacgagaacacaagcctaaattaaggcaatggcaatggagaagaagaaaccaacttgagaaatatttaaaggtcattgtcaatggaacttagtgactttaatggttaattttatctatcaacttggctaggcgatgctacccatgttactcagtttttggtcaaacactagtctagttgttgctatgaattgtatttgttagatgtgattaacatttaaatcagcagactttgattaaagtacattaccctctataatgagggtgggccgcatccggtcagttcaaattaaaacgagacccttaagaagaagcaattcagcctccagactgcagcgtcaaatctccctgggtctccaggctgtttgtctgccctgcagatttcagacttgccagctcccagaataatgtgagccaattccttaaaataaatctctttctgcatatacacatccta

SEQ ID NO: 365477 - DNA, 1860 bp, Homo sapiens
agagggaggggcacagggggctgaggagtgctgggtcgggcttccagctccctacaacgcagaccagtactggagttcgtggtgctggaagaccgccgcccgactctgggccccgggtaggaaacgtaagtgccaggaagttagcagagtggttctttggctggcgcctgaacctcgccagtcttcgtcgcccctcccctgccaacgcctaccccgcttcgaccggagggtgcgctgtccctctggtcactgtgatcaccgtccatggccgcctgcggatacccacgccgtgctcagaagagggctctgaggccacgcccgcctgtggggtcggtggccgggcttccgggaccccagagggagtcgtcgcgcgctaggtggaggggacccctctggaatccggcgatccccgggcgcagatgcaggagcgggtggggagagccgcgttcctggcatgtttgcctcgagttagtcacgaaggaatcgaagagagccttagtcttcgaggcttttcccttcctgtgagcccctttgaggccagcacattgatttttttttctttcgcagaacaatttcggacctcctggggtctatgctaggtatgaggtgtatctttgccctccatcaagtagcaaagatggacatgtaaacaaatttcgacactgtgatgactgccacaaaaagcagcattatgaggttgaatgtaaaaggataaccttagcggcggcgggggccggaggatgaaggaaggcttcctgaggtaggcgctggttgaaactgaagttggagagagcaagtggcatttgctgaagtgcatttccggtagaaaactccagtggtccctcacctgactgagtggcgcagtcagagataaatggaacagagtctacaaataaacattttataaagatgatccttcaatacatattctacagcccagttaaaatgtgagaggccatgatctacagacagccatttataaaggtggatcagggccggacacggtggctcaacgtctgtaatcccggcactgtgggaggccaaagcgggaggatcgcttgagcccaggagttcgagaccaacctggccaacatggtgagaccccatctttacaaaaaaatatatatatccaggcatagtggtgtgcacctgtggtcctgtggtcccagctactcaggaagctgaggcagttgaggctgcagtgagccacgttctggccactacactccagcctgggcatcaaagtgacaagaccaaaaaaaaaaaaaaatgtggattggaaggaggcaagaaagaagtcaggaaaagggtggaatgtaagtccctaaggacacaatcttactcacaattgtatctccaacatttggcataatgcctaatacgtaagtattttatgaattaattaaacgagaacacaagcctaaattaaggcaatggcaatggagaagaagaaaccaacttgagaaatatttaaaggtcattgtcaatggaacttagtgactttaatggttaattttatctatcaacttggctaggcgatgctacccatgttactcagtttttggtcaaacactagtctagttgttgctatgaattgtatttgttagatgtgattaacatttaaatcagcagactttgattaaagtacattaccctctataatgagggtgggccgcatccggtcagttcaaattaaaacgagacccttaagaagaagcaattcagcctccagactgcagcgtcaaatctccctgggtctccaggctgtttgtctgccctgcagatttcagacttgccagctcccagaataatgtgagccaattccttaaaataaatctctttctgcatatacacatccta

SEQ ID NO: 365478 - DNA, 1061 bp, Homo sapiens
ggaatggtactttagagttcacctacaacaatggtgttggttgggttgtgcttcacttctgcggtaaccctgtggactttccctccatagaaaggcttcgtgtggaatatcactgtcgctgagtacccagtcttggcacagttgatgctgacttttcctccgagctccacccacgggatggtgagaatggaccgggcgtaggcactaggcagggtgaatacgtactcctccccgtgttccaggagcctcaacacaccttcccctatcatagagacccccacggacatgcccatgaacttgccctcgtgccgaattcggcacgaggctgcgaaccacgtgggtcccgggcgcgtttcgggtgctggcggctgcagccggagttcaaacctaagcagctggaaggaaccatggccaactgtgagcgtaccttcattgcgatcaaaccagatggggtccagcggggtcttgtgggagagattatcaagcgttttgagcagaaaggattccgccttgttggtctgaaattcatgcaagcttccgaagatcttctcaaggaacactacgttgacctgaaggaccgtccattctttgccggcctggtgaaatacatgcactcagggccggtagttgccatggtctgggaggggctgaatgtggtgaagacgggccgagtcatgctcggggagaccaaccctgcagactccaagcctgggaccatccgtggagacttctgcatacaagttggcaggaacattatacatggcagtgattctgtggagagtgcagagaaggagatcggcttgtggtttcaccctgaggaactggtagattacacgagctgtgctcagaactggatctatgaatgacaggagggcagaccacattgcttttcacatccatttcccctccttcccatgggcagaggaccaggctgtaggaaatctagttatttacaggaacttcatcataatttggagggaagctcttggagctgtgagttctccctgtacagtgttaccatccccgaccatctgattaaaatgcttcctcccagcatagga

SEQ ID NO: 365479 - DNA, 563 bp, Homo sapiens
  misc_feature (27)..(27): n is a, c, g, or t
aatataggctagtacgaggctggtgtntgaatcggccgtgggaagatcttctcaaggaacactacgttgacctgaaggaccgtccattctttgccggcctggtgaaatacatgcactcagggccggtagttgccatggtctgggaggggctgaatgtggtgaagacgggccgagtcatgctcggggagaccaaccctgcagactccaagcctgggaccatccgtggagacttctgcatacaagttggcaggaacattatacatggcagtgattctgtggagagtgcagagaaggagatcggcttgtggtttcaccctgaggaactggtagattacacgagctgtgctcagaactggatctatgaatgacaggagggcagaccacattgcttttcacatccatttcccctccttcccatgggcagaggaccaggctgtaggaaatctagttatttacaggaacttcatcataatttggagggaagctcttggagctgtgagttctccctgtacagtgttaccatccccgaccatctgattaaaatgcttcctcccagcatagga

SEQ ID NO: 365480 - DNA, 1040 bp, Homo sapiens
  misc_feature (27)..(27): n is a, c, g, or t
  misc_feature (896)..(896): n is a, c, g, or t
aatataggctagtacgaggctggtgtntgaatcggccgtgggaaccatggccaactgtgagcgtaccttcattgcgatcaaaccagatggggtccagcggggtcttgtgggagagattatcaagcgttttgagcagaaaggattccgccttgttggtctgaaattcatgcaagcttccgaagatcttctcaaggaacactacgttgacctgaaggaccgtccattctttgccggcctggtgaaatacatgcactcagggccggtagttgccatggtctgggaggggctgaatgtggtgaagacgggccgagtcatgctcggggagaccaaccctgcagactccaagcctgggaccatccgtggagacttctgcatacaagttggcaggaacattatacatggcagtgattctgtggagagtgcagagaaggagatcggcttgtggtttcaccctgaggaactggtagattacacgagctgtgctcagaactggatctatgaatgacaggagggcagaccacattgcttttcacatccatttcccctccttcccatgggcagaggaccaggctgtaggaaatctagttatttacaggaacttcatcataatttggagggaagctcttggagctgtgagttctccctgtacagtgttaccatccccgaccatctgattaaaatgcttcctcccagcataggaaaaaaaaaaaaaaaaaaaaaaaaaaaaaagggggctttttggggggggggaaaaaagctggtacggaatgggcacatgggccatacggcggtctcctggacccagtctttttgtccaaagggggggaactgggggcccccaaaaggggccgtataattcgaaacccagggtacgtgaacaccacgaaacaaaaaangcaacaagaagggagaaagcacaacataaaacaagggcaaaaacaacgccactaccccacacacaaactacaaccgaacgacacgacacaacgaaagcgacggccaccgaggcaacgtcgcgaaaaagtcgaagcacaccaaag

SEQ ID NO: 365481 - DNA, 931 bp, Homo sapiens
ggtctaatgtccatggagcttcagcttttatgctgctgtggctgtagatttctggcaatgggcgcattttaatccttctggtcttggtcatgtgactatctctttctccaccaggaacattatacatggcagtgattctgtggagagtgcagagaaggagatcggcttgtggtttcaccctgaggaactggtagattacacgagctgtgctcagaactggatctatgaatgacaggagggcagaccacattgcttttcacatccatttcccctccttcccatgggcagaggaccaggctgtaggaaatctagttatttacaggaacttcatcataatttggagggaagctcttggagctgtgagttctccctgtacagtgttaccatccccgaccatctgattaaaatgcttcctcccagttcattgagttggttacttcatattgttgcattgcttttttttccttcttttcatgtacactgaataacctgacctaatagagagtgtaaatactataaaaatgatttattttgagatctcacatacacacaggcattctttgcctgcccttcttaacccccgcatcccttccactcttggcactgagctattcaacaggcatctatggagcatgtgctacgtggccaagactggactaggtgcagaggattcatcagaaatgaaagaaaacatgagggctgggtgtgctggcttgtgcttgtgataccagctacttgggaggctgagatgggagaccagcctgggtaacatagcaagaccctgtctcactaaaaaaaaaaaaagaaaaattaggctgggtacgatggctcatgcctttaatcccagctattcaggaggctgaggaggagaatcgctagaggccagaagttcaagtccagggtgggcaacatagcaagacgctgtctttac

SEQ ID NO: 365482 - DNA, 610 bp, Homo sapiens
tcagtgccaatagggagacaactgatataaaattggagaagtacatttagtcctgtcactgctcccttccagtgtggagaatgaattgggttataacagaatcagtgagcccaaccgctcatgttttacatagcagggtggatgaggggaaattaaatggattatatgtccttagatggtttgggggttattctcattctctgtcctgttgaataggcttccgaagatcttctcaaggaacactacgttgacctgaaggaccgtccattctttgccggcctggtgaaatacatgcactcagggccggtagttgccatggtgagtgtgcctgtgtgggatactccaagtatgcattgcttgtcatctgtgctaggctctcttctagacactggggatacagccatgaatgagaccaaatagatacctgttttcatataccagctaatggttagtgataggcttcagaaatgaaatatgcccagaaatgaataggagtagcaaatgatcactttagattgggtgatcaaagaacgcaatttttaagctgtgatctgaatgacaagaagcagcgatctgaatgacaagaagcagccagccatgtacagaatca

SEQ ID NO: 365483 - DNA, 718 bp, Homo sapiens
caaagggctgggattacaggcgtgagccactgcgccctgcccacacttggcattttaaggaggctgctctggttgctgtatggagaatacattgtagaaaggcaagcatgagggcagggagatcaggatcctcagtgctggaataagtggatatactctataaacatttgttcagtgaatgaatataatcttaaggggcctttttatttttccttttttgaattaatagttgccagattttctgctgtgattggttttcttctttgaccatatcttcttctgtccttggaggtctgggaggggctgaatgtggtgaagacgggccgagtcatgctcggggagaccaaccctgcagactccaagcctgggaccatccgtggagacttctgcatacaagttggcaggtgagattttggtatttttcccccttttccaaaatctgatttagttgccacaaggatttgggtttccgaggctggaggtagacatgataccatatgcaggttgattttatcggagtttattgttttcctccctcttaagttggcgtttggctttggttgttaacatcacttagtcgtacctctgttacacgaagtgtagaacctggtacaacacactttgctggccagtctttcctgaaggctctcactgtttgcaccagcgtggccgggagggctggatgtggggagggcatttttcagccttaagtgaatgg

SEQ ID NO: 365484 - DNA, 853 bp, Homo sapiens
  misc_feature (28)..(28): n is a, c, g, or t
gaaaaaacgacgaaggtctacgatgctntggtacaaaaaagcagcgcgttgttataaccgacggcagtactatacggtctaggtagcgagactgcattatgaatcggagaggcagtgctgcgaaccacgtgggtcccgggcgcgtttcgggtgctggcggctgcagccggagttcaaacctaagcagctggaaggaaccatggccaactgtgagcgtaccttcattgcgatcaaaccagatggggtccagcggggtcttgtgggagagattatcaagcgttttgagcagaaaggattccgccttgttggtctgaaattcatgcaagcttccgaagatcttctcaaggaacactacgttgacctgaaggaccgtccattctttgccggcctggtgaaatacatgcactcagggccggtagttgccatggtctgggaggggctgaatgtggtgaagacgggccgagtcatgctcggggagaccaaccctgcagactccaagcctgggaccatccgtggagacttctgcatacaagttggcaggaacattatacatggcagtgattctgtggagagtgcagagaaggagatcggcttgtggtttcaccctgaggaactggtagattacacgagctgtgctcagaactggatctatgaatgacaggagggcagaccacattgcttttcacatccatttcccctccttcccatgggcagaggaccaggctgtaggaaatctagttatttacaggaacttcatcataatttggagggaagctcttggagctgtgagttctccctgtacagtgttaccatccccgaccatctgattaaaatgcttcctcccagcatagga

SEQ ID NO: 365485 - DNA, 1274 bp, Homo sapiens
ggcagaagcgttccgtgcgtgcaagtgctgcgaaccacgtgggtcccgggcgcgtttcgggtgctggcggctgcagccggagttcaaacctaagcagctggaaggaaccatggccaactgtgagcgtaccttcattgcgatcaaaccagatggggtccagcggggtcttgtgggagagattatcaagcgttttgagcagaaaggattccgccttgttggtctgaaattcatgcaagcttccgaagatcttctcaaggaacactacgttgacctgaaggaccgtccattctttgccggcctggtgaaatacatgcactcagggccggtagttgccatggtctgggaggggctgaatgtggtgaagacgggccgagtcatgctcggggagaccaaccctgcagactccaagcctgggaccatccgtggagacttctgcatacaagttggcaggaacattatacatggcagtgattctgtggagagtgcagagaaggagatcggcttgtggtttcaccctgaggaactggtagattacacgagctgtgctcagaactggatctatgaatgacaggagggcagaccacattgcttttcacatccatttcccctccttcccatgggcagaggaccaggctgtaggaaatctagttatttacaggaacttcatcataatttggagggaagctcttggagctgtgagttctccctgtacagtgttaccatccccgaccatctgattaaaatgcttcctcccagcataggattcattgagttggttacttcatattgttgcattgcttttttttccttcttttcatgtacactgaataacctgacctaatagagagtgtaaatactataaaaatgatttattttgagatctcacatacacacaggcattctttgcctgcccttcttaacccccgcatcccttccactcttggcactgagctattcaacaggcatctatggagcatgtgctacgtggccaagactggactaggtgcagaggattcatcagaaatgaaagaaaacatgagggctgggtgtgctggcttgtgcttgtgataccagctacttgggaggctgagatgggagaccagcctgggtaacatagcaagaccctgtctcactaaaaaaaaaaaaagaaaaattaggctgggtacgatggctcatgcctttaatcccagctattcaggaggctgaggaggagaatcgctagaggccagaagttcaagtccagggtgggcaacatagcaagacgctgtctttac

SEQ ID NO: 365486 - DNA, 1077 bp, Homo sapiens
ggcagaagcgttccgtgcgtgcaagtgctgcgaaccacgtgggtcccgggcgcgtttcgggtgctggcggctgcagccggagttcaaacctaagcagctggaaggaaccatggccaactgtgagcgtaccttcattgcgatcaaaccagatggggtccagcggggtcttgtgggagagattatcaagcgttttgagcagaaaggattccgccttgttggtctgaaattcatgcaagcttccgaagatcttctcaaggaacactacgttgacctgaaggaccgtccattctttgccggcctggtgaaatacatgcactcagggccggtagttgccatggtctgggaggggctgaatgtggtgaagacgggccgagtcatgctcggggagaccaaccctgcagactccaagcctgggaccatccgtggagacttctgcatacaagttggcaggaacattatacatggcagtgattctgtggagagtgcagagaaggagatcggcttgtggtttcaccctgaggaactggtagattacacgagctgtgctcagaactggatctatgaatgacaggagggcagaccacattgcttttcacatccatttcccctccttcccatgggcagaggaccaggctgtaggaaatctagttatttacaggaacttcatcataatttggagggaagctcttggagctgtgagttctccctgtacagtgttaccatccccgaccatctgattaaaatgcttcctcccagcataggaaaaaaaaaaaaaaaaaaaaaaaacaaaaaaacaacaatagaaaaaaaacagggggggggggcggcaccgataaaaatcacccgcggggcgcaccccctggtgacgacgccaccccgcatctctgtcacagagggcaccacgggaggagctatcatcagcacaccagcgcgcgccttacacagccacgcgagggaaacaacgccgggggccttggggagaccccatggcggggggactatgcggacaaccccagagtaggcgaggcacaaatgagcgcatggcaccgcacatcggcaaaagccggatatgaaatc

SEQ ID NO: 365487 - DNA, 854 bp, Homo sapiens
ggcagaagcgttccgtgcgtgcaagtgctgcgaaccacgtgggtcccgggcgcgtttcgggtgctggcggctgcagccggagttcaaacctaagcagctggaaggaaccatggccaactgtgagcgtaccttcattgcgatcaaaccagatggggtccagcggggtcttgtgggagagattatcaagcgttttgagcagaaaggattccgccttgttggtctgaaattcatgcaagcttccgaagatcttctcaaggaacactacgttgacctgaaggaccgtccattctttgccggcctggtgaaatacatgcactcagggccggtagttgccatggtctgggaggggctgaatgtggtgaagacgggccgagtcatgctcggggagaccaaccctgcagactccaagcctgggaccatccgtggagacttctgcatacaagttggcaggaacattatacatggcagtgattctgtggagagtgcagagaaggagatcggcttgtggtttcaccctgaggaactggtagattacacgagctgtgctcagaactggatctatgaatgacaggagggcagaccacattgcttttcacatccatttcccctccttcccatgggcagaggaccaggctgtaggaaatctagttatttacaggaacttcatcataatttggagggaagctcttggagctgtgagttctccctgtacagtgttaccatccccgaccatctgattaaaatgcttcctcccagcatagggaaccaacaaaacaacaaccacaacaaaaaaccgcgggggacctctattcggggggcgggcacacacaggcgtactgacacggcgccacggg

SEQ ID NO: 365488 - DNA, 1119 bp, Homo sapiens
ggcagaagcgttccgtgcgtgcaagtgctgcgaaccacgtgggtcccgggcgcgtttcgggtgctggcggctgcagccggagttcaaacctaagcagctggaaggaaccatggccaactgtgagcgtaccttcattgcgatcaaaccagatggggtccagcggggtcttgtgggagagattatcaagcgttttgagcagaaaggattccgccttgttggtctgaaattcatgcaagcttccgaagatcttctcaaggaacactacgttgacctgaaggaccgtccattctttgccggcctggtgaaatacatgcactcagggccggtagttgccatggtctgggaggggctgaatgtggtgaagacgggccgagtcatgctcggggagaccaaccctgcagactccaagcctgggaccatccgtggagacttctgcatacaagttggcaggaacattatacatggcagtgattctgtggagagtgcagagaaggagatcggcttgtggtttcaccctgaggaactggtagattacacgagctgtgctcagaactggatctatgaatgacaggagggcagaccacattgcttttcacatccatttcccctccttcccatgggcagaggaccaggctgtaggaaatctagttatttacaggaacttcatcataatttggagggaagctcttggagctgtgagttctccctgtacagtgttaccatccccgaccatctgattaaaatgcttcctcccagcataggaaaaaaaaacacgaacaaacacgaaatcgagcacacagacaaacacaagacgggcagagacaacaaaaaatcccaacaggcgcaccacaaataaacaacacacagactggcaaaaagcgcccaaagcggaggaactaaaacgaccgcgaagaggcgcacaacacacggcacaggaccgagaacacgccaccacagccgaccatggagaggacgacccaaaaggggcggcggcaacaccgaggggaacaaccaccaggagaataacgcacagaggccacaaccacgcgagacaccgacaacaagcgacaacgccgacgcaaccggcgaaagaagagcgaaaatatagcagcgagacaa

SEQ ID NO: 365489 - DNA, 813 bp, Homo sapiens
  misc_feature (5)..(5): n is a, c, g, or t
  misc_feature (26)..(27): n is a, c, g, or t
catcngctaggtcgaggctgggtgtnngaagtgctgcgaaccacgtgggtcccgggcgcgtttcgggtgctggcggctgcagccggagttcaaacctaagcagctggaaggaaccatggccaactgtgagcgtaccttcattgcgatcaaaccagatggggtccagcggggtcttgtgggagagattatcaagcgttttgagcagaaaggattccgccttgttggtctgaaattcatgcaagcttccgaagatcttctcaaggaacactacgttgacctgaaggaccgtccattctttgccggcctggtgaaatacatgcactcagggccggtagttgccatggtctgggaggggctgaatgtggtgaagacgggccgagtcatgctcggggagaccaaccctgcagactccaagcctgggaccatccgtggagacttctgcatacaagttggcaggaacattatacatggcagtgattctgtggagagtgcagagaaggagatcggcttgtggtttcaccctgaggaactggtagattacacgagctgtgctcagaactggatctatgaatgacaggagggcagaccacattgcttttcacatccatttcccctccttcccatgggcagaggaccaggctgtaggaaatctagttatttacaggaacttcatcataatttggagggaagctcttggagctgtgagttctccctgtacagtgttaccatccccgacatctgattaaatgcttcctccagcaaaaaaaaaaaaaaacaaaaaaaaatggggggataaaagggggggggaaaaag

SEQ ID NO: 365490 - DNA, 911 bp, Homo sapiens
  misc_feature (5)..(5): n is a, c, g, or t
  misc_feature (26)..(27): n is a, c, g, or t
catcngctaggtcgaggctgggtgtnngaagtggccctgtggctaggtaccatagagtctctacacaggactaagtcagcctggtgtgcaggggaggcagacacacaaacagaaaattggactacagtgctaagatgctgtaagaagaggttaactaaaggacaggaagatggggccaagagatggtgctactgtctactttagggatcgtctttcaaggcgaggggcctcctatctcaagctgtgatacaggaaccatggccaactgtgagcgtaccttcattgcgatcaaaccagatggggtccagcggggtcttgtgggagagattatcaagcgttttgagcagaaaggattccgccttgttggtctgaaattcatgcaagcttccgaagatcttctcaaggaacactacgttgacctgaaggaccgtccattctttgccggcctggtgaaatacatgcactcagggccggtagttgccatggtctgggaggggctgaatgtggtgaagacgggccgagtcatgctcggggagaccaaccctgcagactccaagcctgggaccatccgtggagacttctgcatacaagttggcaggaacattatacatggcagtgattctgtggagagtgcagagaaggagatcggcttgtggtttcaccctgaggaactggtagattacacgagctgtgctcagaactggatctatgaatgacaggagggcagaccacattgcttttcacatccatttcccctccttcccatgggcagaggaccaggctgtaggaaatctagttatttacaggaacttcatcataatttggagggaagctcttggagctgtgagttctccctgtacagtgttaccatccccgaccatctgattaaaatgcttcctcccagcatagga

SEQ ID NO: 365491 - DNA, 938 bp, Homo sapiens
aagaggtgttcgggatcctgagaggaaaaagaaaggagtgtagtcgcgggagtgggttaggccctgtggctaggtaccatagagtctctacacaggactaagtcagcctggtgtgcaggggaggcagacacacaaacagaaaattggactacagtgctaagatgctgtaagaagaggttaactaaaggacaggaagatggggccaagagatggtgctactgtctactttagggatcgtctttcaaggcgaggggcctcctatctcaagctgtgatacaggaaccatggccaactgtgagcgtaccttcattgcgatcaaaccagatggggtccagcggggtcttgtgggagagattatcaagcgttttgagcagaaaggattccgccttgttggtctgaaattcatgcaagcttccgaagatcttctcaaggaacactacgttgacctgaaggaccgtccattctttgccggcctggtgaaatacatgcactcagggccggtagttgccatggtctgggaggggctgaatgtggtgaagacgggccgagtcatgctcggggagaccaaccctgcagactccaagcctgggaccatccgtggagacttctgcatacaagttggcaggaacattatacatggcagtgattctgtggagagtgcagagaaggagatcggcttgtggtttcaccctgaggaactggtagattacacgagctgtgctcagaactggatctatgaatgacaggagggcagaccacattgcttttcacatccatttcccctccttcccatgggcagaggaccaggctgtaggaaatctagttatttacaggaacttcatcataatttggagggaagctcttggagctgtgagttctccctgtacagtgttaccatccccgaccatctgattaaaatgcttcctcccagcatagga

SEQ ID NO: 365492 - DNA, 920 bp, Homo sapiens
  misc_feature (27)..(27): n is a, c, g, or t
aatataggctagtacgaggctggtgtntgaatcggccgtggggccctgtggctaggtaccatagagtctctacacaggactaagtcagcctggtgtgcaggggaggcagacacacaaacagaaaattggactacagtgctaagatgctgtaagaagaggttaactaaaggacaggaagatggggccaagagatggtgctactgtctactttagggatcgtctttcaaggcgaggggcctcctatctcaagctgtgatacaggaaccatggccaactgtgagcgtaccttcattgcgatcaaaccagatggggtccagcggggtcttgtgggagagattatcaagcgttttgagcagaaaggattccgccttgttggtctgaaattcatgcaagcttccgaagatcttctcaaggaacactacgttgacctgaaggaccgtccattctttgccggcctggtgaaatacatgcactcagggccggtagttgccatggtctgggaggggctgaatgtggtgaagacgggccgagtcatgctcggggagaccaaccctgcagactccaagcctgggaccatccgtggagacttctgcatacaagttggcaggaacattatacatggcagtgattctgtggagagtgcagagaaggagatcggcttgtggtttcaccctgaggaactggtagattacacgagctgtgctcagaactggatctatgaatgacaggagggcagaccacattgcttttcacatccatttcccctccttcccatgggcagaggaccaggctgtaggaaatctagttatttacaggaacttcatcataatttggagggaagctcttggagctgtgagttctccctgtacagtgttaccatccccgaccatctgattaaaatgcttcctcccagcatagga

SEQ ID NO: 365493 - DNA, 1371 bp, Homo sapiens
ggaatggtactttagagttcacctacaacaatggtgttggttgggttgtgcttcacttctgcggtaaccctgtggactttccctccatagaaaggcttcgtgtggaatatcactgtcgctgagtacccagtcttggcacagttgatgctgacttttcctccgagctccacccacgggatggtgagaatggaccgggcgtaggcactaggcagggtgaatacgtactcctccccgtgttccaggagcctcaacacaccttcccctatcatagagacccccacggacatgcccatgaacttgccctcgtgccgaattcggcacgaggctgcgaaccacgtgggtcccgggcgcgtttcgggtgctggcggctgcagccggagttcaaacctaagcagctggaagggccctgtggctaggtaccatagagtctctacacaggactaagtcagcctggtgtgcaggggaggcagacacacaaacagaaaattggactacagtgctaagatgctgtaagaagaggttaactaaaggacaggaagatggggccaagagatggtgctactgtctactttagggatcgtctttcaaggcgaggggcctcctatctcaagctgtgatacaggaaccatggccaactgtgagcgtaccttcattgcgatcaaaccagatggggtccagcggggtcttgtgggagagattatcaagcgttttgagcagaaaggattccgccttgttggtctgaaattcatgcaagcttccgaagatcttctcaaggaacactacgttgacctgaaggaccgtccattctttgccggcctggtgaaatacatgcactcagggccggtagttgccatggtctgggaggggctgaatgtggtgaagacgggccgagtcatgctcggggagaccaaccctgcagactccaagcctgggaccatccgtggagacttctgcatacaagttggcaggaacattatacatggcagtgattctgtggagagtgcagagaaggagatcggcttgtggtttcaccctgaggaactggtagattacacgagctgtgctcagaactggatctatgaatgacaggagggcagaccacattgcttttcacatccatttcccctccttcccatgggcagaggaccaggctgtaggaaatctagttatttacaggaacttcatcataatttggagggaagctcttggagctgtgagttctccctgtacagtgttaccatccccgacatctgattaaatgcttcctccagcaaaaaaaaaaacggggtttttcgggggggaaaaggttaaagggcggggatggtccgccacttgtaaggggaacgcggccaagggggtatgactgaggga

SEQ ID NO: 365494 - DNA, 763 bp, Homo sapiens
ggcagaagcgttccgtgcgtgcaagtgctgcgaaccacgtgggtcccgggcgcgtttcgggtgctggcggctgcagccggagttcaaacctaagcagctggaaggaaccatggccaactgtgagcgtaccttcattgcgatcaaaccagatggggtccagcggggtcttgtgggagagattatcaagcgttttgagcagaaaggattccgccttgttggtctgaaattcatgcaagcttccgaagatcttctcaaggaacactacgttgacctgaaggaccgtccattctttgccggcctggtgaaatacatgcactcagggccggtagttgccatggtctgggaggggctgaatgtggtgaagacgggccgagtcatgctcggggagaccaaccctgcagactccaagcctgggaccatccgtggagacttctgcatacaagttggcaggaacattatacatggcagtgattctgtggagagtgcagagaaggagatcggcttgtggtttcaccctgaggaactggtagattacacgagctgtgctcagaactggatctatgaatgacaggagggcagaccacattgcttttcacatccatttcccctccttcccatgggcagaggaccaggctgtaggaaatctagttatttacaggaacttcatcataatttggagggaagctcttggagctgtgagttctccctgtacagtgttaccatccccgaccatctgattaaaatgcttcctcccagcatagga

SEQ ID NO: 365495 - DNA, 786 bp, Homo sapiens
acctccagaagctgtctacaccatgcgtccggcgcgcgtgcccagtgcgtacgtgagcatgctcatatgctgtccctctacgagatcctggtcatagagtacgatgcttggattcgtcactcaaattaaagagattcgcccgcgcgatgggcggcacacgtgctgacatcagtatccaagatagttgaagtttctgagtgtcatggaactgaatctattccaccgacgtgagtccaacttgaactccataccaacttcaccgccgaagatcttctcaaggaacactacgttgacctgaaggaccgtccattctttgccggcctggtgaaatacatgcactcagggccggtagttgccatggtctgggaggggctgaatgtggtgaagacgggccgagtcatgctcggggagaccaaccctgcagactccaagcctgggaccatccgtggagacttctgcatacaagttggcaggaacattatacatggcagtgattctgtggagagtgcagagaaggagatcggcttgtggtttcaccctgaggaactggtagattacacgagctgtgctcagaactggatctatgaatgacaggagggcagaccacattgcttttcacatccatttcccctccttcccatgggcagaggaccaggctgtaggaaatctagttatttacaggaacttcatcataatttggagggaagctcttggagctgtgagttctccctgtacagtgttaccatccccgaccatctgattaaaatgcttcctcccagcatagga

SEQ ID NO: 365496 - DNA, 554 bp, Homo sapiens
  misc_feature (537)..(537): n is a, c, g, or t
gcggcttatggtgcagacatggccaagtccaagaaccacaccacacacaaccagtcccgaaaatggcacagaaatggtatcaagaaaccccgatcacaaagatacgaatctcttaagggggtggaccccaagttcctgaggaacatgcgcttgccaagaagcacaacaaaaagggcctaaagaagatgcaggccaacaatgccaaggccatgagtgcacgtgccgaggctatcaaggccctcgtaaagcccaaggaggtttcaccctgaggaactggtagattacacgagctgtgctcagaactggatctatgaatgacaggagggcagaccacattgcttttcacatccatttcccctccttcccatgggcagaggaccaggctgtaggaaatctagttatttacaggaacttcatcataatttggagggaagctcttggagctgtgagttctccctgtacagtgttaccatccccgaccatctgattaaaatgcttcctcccagaaaaaaaaaaaaaaaaaaaaacaaaaaaaanaaaaaaaaaaacacaaa

SEQ ID NO: 365497 - DNA, 769 bp, Homo sapiens
  misc_feature (5)..(5): n is a, c, g, or t
  misc_feature (26)..(27): n is a, c, g, or t
catcngctaggtcgaggctgggtgtnngaagtgctgcgaaccacgtgggtcccgggcgcgtttcgggtgctggcggctgcagccggagttcaaacctaagcagctggaaggaaccatggccaactgtgagcgtaccttcattgcgatcaaaccagatggggtccagcggggtcttgtgggagagattatcaagcgttttgagcagaaaggattccgccttgttggtctgaaattcatgcaagcttccgaagatcttctcaaggaacactacgttgacctgaaggaccgtccattctttgccggcctggtgaaatacatgcactcagggccggtagttgccatggtctgggaggggctgaatgtggtgaagacgggccgagtcatgctcggggagaccaaccctgcagactccaagcctgggaccatccgtggagacttctgcatacaagttggcaggaacattatacatggcagtgattctgtggagagtgcagagaaggagatcggcttgtggtttcaccctgaggaactggtagattacacgagctgtgctcagaactggatctatgaatgacaggagggcagaccacattgcttttcacatccatttcccctccttcccatgggcagaggaccaggctgtaggaaatctagttatttacaggaacttcatcataatttggagggaagctcttggagctgtgagttctccctgtacagtgttaccatccccgaccatctgattaaaatgcttcctcccagcatagga

SEQ ID NO: 365498 - DNA, 807 bp, Homo sapiens
ggcagaagcgttccgtgcgtgcaagtgctgcgaaccacgtgggtcccgggcgcgtttcgggtgctggcggctgcagccggagttcaaacctaagcagctggaaggaaccatggccaactgtgagcgtaccttcattgcgatcaaaccagatggggtccagcggggtcttgtgggagagattatcaagcgttttgagcagaaaggattccgccttgttggtctgaaattcatgcaagcttccgaagatcttctcaaggaacactacgttgacctgaaggaccgtccattctttgccggcctggtgaaatacatgcactcagggccggtagttgccatggtctgggaggggctgaatgtggtgaagacgggccgagtcatgctcggggagaccaaccctgcagactccaagcctgggaccatccgtggagacttctgcatacaagttggcaggaacattatacatggcagtgattctgtggagagtgcagagaaggagatcggcttgtggtttcaccctgaggaactggtagattacacgagctgtgctcagaactggatctatgaatgacaggagggcagaccacattgcttttcacatccatttcccctccttcccatgggcagaggaccaggctgtaggaaatctagttatttacaggaacttcatcataatttggagggaagctcttggagctgtgagttctccctgtacagtgttaccatccccgacatctgattaaatgcttcctccagcaaaaaaaaaaaaaaacaaaaaaaaatggggggataaaagggggggggaaaaag

SEQ ID NO: 365499 - DNA, 1103 bp, Homo sapiens
  misc_feature (959)..(959): n is a, c, g, or t
ggcagaagcgttccgtgcgtgcaagtgctgcgaaccacgtgggtcccgggcgcgtttcgggtgctggcggctgcagccggagttcaaacctaagcagctggaaggaaccatggccaactgtgagcgtaccttcattgcgatcaaaccagatggggtccagcggggtcttgtgggagagattatcaagcgttttgagcagaaaggattccgccttgttggtctgaaattcatgcaagcttccgaagatcttctcaaggaacactacgttgacctgaaggaccgtccattctttgccggcctggtgaaatacatgcactcagggccggtagttgccatggtctgggaggggctgaatgtggtgaagacgggccgagtcatgctcggggagaccaaccctgcagactccaagcctgggaccatccgtggagacttctgcatacaagttggcaggaacattatacatggcagtgattctgtggagagtgcagagaaggagatcggcttgtggtttcaccctgaggaactggtagattacacgagctgtgctcagaactggatctatgaatgacaggagggcagaccacattgcttttcacatccatttcccctccttcccatgggcagaggaccaggctgtaggaaatctagttatttacaggaacttcatcataatttggagggaagctcttggagctgtgagttctccctgtacagtgttaccatccccgaccatctgattaaaatgcttcctcccagcataggaaaaaaaaaaaaaaaaaaaaaaaaaaaaaagggggctttttggggggggggaaaaaagctggtacggaatgggcacatgggccatacggcggtctcctggacccagtctttttgtccaaagggggggaactgggggcccccaaaaggggccgtataattcgaaacccagggtacgtgaacaccacgaaacaaaaaangcaacaagaagggagaaagcacaacataaaacaagggcaaaaacaacgccactaccccacacacaaactacaaccgaacgacacgacacaacgaaagcgacggccaccgaggcaacgtcgcgaaaaagtcgaagcacaccaaag

SEQ ID NO: 365500 - DNA, 811 bp, Homo sapiens
  misc_feature (794)..(794): n is a, c, g, or t
ggcagaagcgttccgtgcgtgcaagtgctgcgaaccacgtgggtcccgggcgcgtttcgggtgctggcggctgcagccggagttcaaacctaagcagctggaaggaaccatggccaactgtgagcgtaccttcattgcgatcaaaccagatggggtccagcggggtcttgtgggagagattatcaagcgttttgagcagaaaggattccgccttgttggtctgaaattcatgcaagcttccgaagatcttctcaaggaacactacgttgacctgaaggaccgtccattctttgccggcctggtgaaatacatgcactcagggccggtagttgccatggtctgggaggggctgaatgtggtgaagacgggccgagtcatgctcggggagaccaaccctgcagactccaagcctgggaccatccgtggagacttctgcatacaagttggcaggaacattatacatggcagtgattctgtggagagtgcagagaaggagatcggcttgtggtttcaccctgaggaactggtagattacacgagctgtgctcagaactggatctatgaatgacaggagggcagaccacattgcttttcacatccatttcccctccttcccatgggcagaggaccaggctgtaggaaatctagttatttacaggaacttcatcataatttggagggaagctcttggagctgtgagttctccctgtacagtgttaccatccccgaccatctgattaaaatgcttcctcccagcataggaaaaaaaaaaaaaaaaaaaaaacaaaaaaaanaaaaaaaaaaacacaaa

SEQ ID NO: 365501 - DNA, 1281 bp, Homo sapiens
ggaatggtactttagagttcacctacaacaatggtgttggttgggttgtgcttcacttctgcggtaaccctgtggactttccctccatagaaaggcttcgtgtggaatatcactgtcgctgagtacccagtcttggcacagttgatgctgacttttcctccgagctccacccacgggatggtgagaatggaccgggcgtaggcactaggcagggtgaatacgtactcctccccgtgttccaggagcctcaacacaccttcccctatcatagagacccccacggacatgcccatgaacttgccctcgtgccgaattcggcacgaggctgcgaaccacgtgggtcccgggcgcgtttcgggtgctggcggctgcagccggagttcaaacctaagcagctggaagggccctgtggctaggtaccatagagtctctacacaggactaagtcagcctggtgtgcaggggaggcagacacacaaacagaaaattggactacagtgctaagatgctgtaagaagaggttaactaaaggacaggaagatggggccaagagatggtgctactgtctactttagggatcgtctttcaaggcgaggggcctcctatctcaagctgtgatacaggaaccatggccaactgtgagcgtaccttcattgcgatcaaaccagatggggtccagcggggtcttgtgggagagattatcaagcgttttgagcagaaaggattccgccttgttggtctgaaattcatgcaagcttccgaagatcttctcaaggaacactacgttgacctgaaggaccgtccattctttgccggcctggtgaaatacatgcactcagggccggtagttgccatggtctgggaggggctgaatgtggtgaagacgggccgagtcatgctcggggagaccaaccctgcagactccaagcctgggaccatccgtggagacttctgcatacaagttggcaggaacattatacatggcagtgattctgtggagagtgcagagaaggagatcggcttgtggtttcaccctgaggaactggtagattacacgagctgtgctcagaactggatctatgaatgacaggagggcagaccacattgcttttcacatccatttcccctccttcccatgggcagaggaccaggctgtaggaaatctagttatttacaggaacttcatcataatttggagggaagctcttggagctgtgagttctccctgtacagtgttaccatccccgaccatctgattaaaatgcttcctcccagcatagga

SEQ ID NO: 365502 - DNA, 1221 bp, Homo sapiens
gtcaggcgcgacgacagggctgtgctttatttgtgtctgtcgagagcagtgccgggccggagttggcgctctgtaagtgcttgctgaataaatgacgggtgtgtgtgtcattcattcagcaagcactgagtcttactgttgtgtcaccgggaccgatgtggagggacatttttagggtgtatttctggcgctttagtcctgttttctcctggacaatttatgcttgccccgcaccccatcgtgcgattctccgcagtctttgggctttgtctctctctctttttttttttttggaagttgcagaatggtgataaatgattttctttgctcctattgactgctggccctgtggctaggtaccatagagtctctacacaggactaagtcagcctggtgtgcaggggaggcagacacacaaacagaaaattggactacagtgctaagatgctgtaagaagaggttaactaaaggacaggaagatggggccaagagatggtgctactgtctactttagggatcgtctttcaaggcgaggggcctcctatctcaagctgtgatacaggaaccatggccaactgtgagcgtaccttcattgcgatcaaaccagatggggtccagcggggtcttgtgggagagattatcaagcgttttgagcagaaaggattccgccttgttggtctgaaattcatgcaagcttccgaagatcttctcaaggaacactacgttgacctgaaggaccgtccattctttgccggcctggtgaaatacatgcactcagggccggtagttgccatggtctgggaggggctgaatgtggtgaagacgggccgagtcatgctcggggagaccaaccctgcagactccaagcctgggaccatccgtggagacttctgcatacaagttggcaggaacattatacatggcagtgattctgtggagagtgcagagaaggagatcggcttgtggtttcaccctgaggaactggtagattacacgagctgtgctcagaactggatctatgaatgacaggagggcagaccacattgcttttcacatccatttcccctccttcccatgggcagaggaccaggctgtaggaaatctagttatttacaggaacttcatcataatttggagggaagctcttggagctgtgagttctccctgtacagtgttaccatccccgaccatctgattaaaatgcttcctcccagcatagga

SEQ ID NO: 365503 - DNA, 1331 bp, Homo sapiens
ggaatggtactttagagttcacctacaacaatggtgttggttgggttgtgcttcacttctgcggtaaccctgtggactttccctccatagaaaggcttcgtgtggaatatcactgtcgctgagtacccagtcttggcacagttgatgctgacttttcctccgagctccacccacgggatggtgagaatggaccgggcgtaggcactaggcagggtgaatacgtactcctccccgtgttccaggagcctcaacacaccttcccctatcatagagacccccacggacatgcccatgaacttgccctcgtgccgaattcggcacgaggctgcgaaccacgtgggtcccgggcgcgtttcgggtgctggcggctgcagccggagttcaaacctaagcagctggaagggccctgtggctaggtaccatagagtctctacacaggactaagtcagcctggtgtgcaggggaggcagacacacaaacagaaaattggactacagtgctaagatgctgtaagaagaggttaactaaaggacaggaagatggggccaagagatggtgctactgtctactttagggatcgtctttcaaggcgaggggcctcctatctcaagctgtgatacaggaaccatggccaactgtgagcgtaccttcattgcgatcaaaccagatggggtccagcggggtcttgtgggagagattatcaagcgttttgagcagaaaggattccgccttgttggtctgaaattcatgcaagcttccgaagatcttctcaaggaacactacgttgacctgaaggaccgtccattctttgccggcctggtgaaatacatgcactcagggccggtagttgccatggtctgggaggggctgaatgtggtgaagacgggccgagtcatgctcggggagaccaaccctgcagactccaagcctgggaccatccgtggagacttctgcatacaagttggcaggaacattatacatggcagtgattctgtggagagtgcagagaaggagatcggcttgtggtttcaccctgaggaactggtagattacacgagctgtgctcagaactggatctatgaatgacaggagggcagaccacattgcttttcacatccatttcccctccttcccatgggcagaggaccaggctgtaggaaatctagttatttacaggaacttcatcataatttggagggaagctcttggagctgtgagttctccctgtacagtgttaccatccccgaccatctgattaaaatgcttcctcccagaaagaaacagagaacaaagcaaaaaaaaagccgaggactattggggcacaaaaggga

SEQ ID NO: 365504 - DNA, 764 bp, Homo sapiens
ggcagaagcgttccgtgcgtgcaagtgctgcgaaccacgtgggtcccgggcgcgtttcgggtgctggcggctgcagccggagttcaaacctaagcagctggaaggaaccatggccaactgtgagcgtaccttcattgcgatcaaaccagatggggtccagcggggtcttgtgggagagattatcaagcgttttgagcagaaaggattccgccttgttggtctgaaattcatgcaagcttccgaagatcttctcaaggaacactacgttgacctgaaggaccgtccattctttgccggcctggtgaaatacatgcactcagggccggtagttgccatggtctgggaggggctgaatgtggtgaagacgggccgagtcatgctcggggagaccaaccctgcagactccaagcctgggaccatccgtggagacttctgcatacaagttggcaggtgagattttggtatttttcccccttttccaaaatctgatttagttgccacaaggatttgggtttccgaggctggaggtagacatgataccatatgcaggttgattttatcggagtttattgttttcctccctcttaagttggcgtttggctttggttgttaacatcacttagtcgtacctctgttacacgaagtgtagaacctggtacaacacactttgctggccagtctttcctgaaggctctcactgtttgcaccagcgtggccgggagggctggatgtggggagggcatttttcagccttaagtgaatgg

SEQ ID NO: 365505 - DNA, 2475 bp, Homo sapiens
acgtgaccctgacccaataagggtggaaggctgagtcccgcagagccaataacgagagtccgagaggcgacggaggcggactctgtgaggaaacaagaagagaggcccaagatggagacggcggcggctgtagcggcgtgacaggagccccatggcacctgcccagccccacctcagcccatcttgacaaaatctaaggctccatggagccaccacggggcccccctgccaatggggccgagccatcccgggcagtgggcaccgtcaaagtatacctgcccaacaagcaacgcacggtggtgactgtccgggatggcatgagtgtctacgactctctagacaaggccctgaaggtgcggggtctaaatcaggactgctgtgtggtctaccgactcatcaagggacgaaagacggtcactgcctgggacacagccattgctcccctggatggcgaggagctcattgtcgaggtccttgaagatgtcccgctgaccatgcacaattttgtacggaagaccttcttcagcctggcgttctgtgacttctgccttaagtttctgttccatggcttccgttgccaaacctgtggctacaagttccaccagcattgttcctccaaggtccccacagtctgtgttgacatgagtaccaaccgccaacagttctaccacagtgtccaggatttgtccggaggctccagacagcatgaggctccctcgaaccgccccctgaatgagttgctaaccccccagggtcccagcccccgcacccagcactgtgacccggagcacttccccttccctgccccagccaatgcccccctacagcgcatccgctccacgtccactcccaacgtccatatggtcagcaccacggcccccatggactccaacctcatccagctcactggccagagtttcagcactgatgctgccggtagtagaggaggtagtgatggaaccccccgggggagccccagcccagccagcgtgtcctcggggaggaagtccccacattccaagtcaccagcagagcagcgcgagcggaagtccttggccgatgacaagaagaaagtgaagaacctggggtaccgggactcaggctattactgggaggtaccacccagtgaggtgcagctgctgaagaggatcgggacgggctcgtttggcaccgtgtttcgagggcggtggcatggcgatgtggccgtgaaggtgctcaaggtgtcccagcccacagctgagcaggcccaggctttcaagaatgagatgcaggtgctcaggaagacgcgacatgtcaacatcttgctgtttatgggcttcatgacccggccgggatttgccatcatcacacagtggtgtgagggctccagcctctaccatcacctgcatgtggccgacacacgcttcgacatggtccagctcatcgacgtggcccggcagactgcccagggcatggactacctccatgccaagaacatcatccaccgagatctcaagtctaacaacatcttcctacatgaggggctcacggtgaagatcggtgactttggcttggccacagtgaagactcgatggagcggggcccagcccttggagcagccctcaggatctgtgctgtggatggcagctgaggtgatccgtatgcaggacccgaacccctacagcttccagtcagacgtctatgcctacggggttgtgctctacgagcttatgactggctcactgccttacagccacattggctgccgtgaccagattatctttatggtgggccgtggctatctgtccccggacctcagcaaaatctccagcaactgccccaaggccatgcggcgcctgctgtctgactgcctcaagttccagcgggaggagcggcccctcttcccccagatcctggccacaattgagctgctgcaacggtcactccccaagattgagcggagtgcctcggaaccctccttgcaccgcacccaggccgatgagttgcctgcctgcctactcagcgcagcccgccttgtgccttaggccccgcccaagccaccagggagccaatctcagccctccacgccaaggagccttgcccaccagccaatcaatgttcgtctctgccctgatgctgcctcaggatcccccattccccaccctgggagatgagggggtccccatgtgcttttccagttcttctggaattgggggacccccgccaaagactgagccccctgtctcctccatcatttggtttcctcttggctttggggatacttctaaattttgggagctcctccatctccaatggctgggatttgtggcagggattccactcagaacctctctggaatttgtgcctgatgtgccttccactggattttggggttcccagcaccccatgtggattttggggggtcccttttgtgtctcccccgccattcaaggactcctctctttcttcaccaagaagcacagaattctgctgggc

SEQ ID NO: 365506 - DNA, 1637 bp, Homo sapiens
acgtgaccctgacccaataagggtggaaggctgagtcccgcagagccaataacgagagtccgagaggcgacggaggcggactctgtgaggaaacaagaagagaggcccaagatggagacggcggcggctgtagcggcgtgacaggagccccatggcacctgcccagccccacctcagcccatcttgacaaaatctaaggctccatggagccaccacggggcccccctgccaatggggccgagccatcccgggcagtgggcaccgtcaaagtatacctgcccaacaagcaacgcacggtggtgactgtccgggatggcatgagtgtctacgactctctagacaaggccctgaaggtgcggggtctaaatcaggactgctgtgtggtctaccgactcatcaagggacgaaagacggtcactgcctgggacacagccattgctcccctggatggcgaggagctcattgtcgaggtccttgaagatgtcccgctgaccatgcacaattttgtacggaagaccttcttcagcctggcgttctgtgacttctgccttaagtttctgttccatggcttccgttgccaaacctgtggctacaagttccaccagcattgttcctccaaggtccccacagtctgtgttgacatgagtaccaaccgccaacagttctaccacagtgtccaggatttgtccggaggctccagacagcatgaggctccctcgaaccgccccctgaatgagttgctaaccccccagggtcccaggtagggatgccttagctgaagagctgctgggggagaaaaagatcttggggctcttgtagaccacgagccatactttattcatttgtttacttgacaaacatttattgagcacctacaagtgtgagtaagggcatgaaactgggaccttgggcaagtcacctcatttctctgggcctcagttttctcatctgtaaagaggggatgatgatactttctaccatataaaggttctggtgaggcttaaatgagttaagacatgttcagtgcctagaacaggatctggtacagtgtaaataatcaatttttttgttattaattataaatatatttataagcatctaactactttgctaattctagtataatcatactcaagcctttccattttgaaatacgtattattttatcataaattacttcccttttattgcttttttatgttaaatattatataaaactatagctatattaaaatatattattgctctaatatatattttatgatgtgcatattttatggtatatttatgttattgtatcatgttgtattacataattttatataatgtagaacatcatacatgtttatatgatacataaaataaagttagggtattattttaaattatgagtgtatgtgcattaattacctttgagtttcatttcaggatagtgaagggaacattaacatatttttgtaactttacaatatgtttagcatatatcatatgtataacatgtatgtataacaatatggtaatatgtatattttaaaacattgccatttttatatagatgatacatattatataacatttgaaaagtacatgtaattataatatataattataaaatatgatacattaccctttcccca

SEQ ID NO: 365507 - DNA, 1682 bp, Homo sapiens
  misc_feature (994)..(994): n is a, c, g, or t
acgtgaccctgacccaataagggtggaaggctgagtcccgcagagccaataacgagagtccgagaggcgacggaggcggactctgtgaggaaacaagaagagaggcccaagatggagacggcggcggctgtagcggcgtgacagtgaagctgagaccttggcactcaagagtgagacaagcaacaggagggcctgagcagagaaggaactggaaggacttcagatgtgagcaggatctcttggactgtcgtgtgaaaattaggctgcagggggcgacaggagcctggactttgaattttattttgtcccctgccactttgcttctagactatcattattggacctctgaattcttgtctgccttcttgtaggagccccatggcacctgcccagccccacctcagcccatcttgacaaaatctaaggctccatggagccaccacggggcccccctgccaatggggccgagccatcccgggcagtgggcaccgtcaaagtatacctgcccaacaagcaacgcacggtggtgactgtccgggatggcatgagtgtctacgactctctagacaaggccctgaaggtgcggggtctaaatcaggactgctgtgtggtctaccgactcatcaagggacgaaagacggtcactgcctgggacacagccattgctcccctggatggcgaggagctcattgtcgaggtccttgaagatgtcccgctgaccatgcacaattttgtacggaagaccttcttcagcctggcgttctgtgacttctgccttaagtttctgttccatggcttccgttgccaaacctgtggctacaagttccaccagcattgttcctccaaggtccccacagtctgtgttgacatgagtaccaaccgccaacagttctaccacagtgtccaggatttgtccggaggctccagacagcatgaggctccctcgaaccgccccctgaatgagttgctaaccccccagggtcccagccccganccagcatgtgaccggagcatgtcccacccatttcccctggcccagcgcaagtgctccgcgcctacaggcgcagtgccgacttccgacgtgcagctcgccaacagtccatatgtgtcagccaacaccggcccccccatggaactcacaagctcatccaagctcacatggcaccaggagttttcagcacctgatgctgcccggtaagatagagcgaggtagtgatgggaagcccccccacggggggaggcaccccaagcacacagccaaggcagctgttcctcgaggggcaaggaaaagatcccccacaatttgtcacaaaaggtccacacaaggcacaagagccaaggcggccgaacgcgcgcacacgtccatgggggccgagtagaccagagacccgacacacgtcgcaacgaaaaccctcgacgcggttaacacgagcgaactaacaagggctactttaacgcgggaaggtaacccaccccccaagtggaagaggtggcacagcttaggcttcgcaccaaggactcccgcgggacacggagcggacgcgtaggggacaccagcagttaccaagaagggacacgcgcgcgcattgggcgacatgtgggacccgccaaaaggtcgcctcacacgagagtccccacgccccaacaggtgagacaggccccaggactctccaaccactggg

SEQ ID NO: 365508 - DNA, 148 bp, Homo sapiens
gagcggccgcctactactactactgctcgaattcaagcttctaacgatgtacgggcccatgtggattttggggggtcccttttgtgtctcccccgccattcaaggactcctctctttcttcaccaagaagcacagaattctgctgggc

SEQ ID NO: 365509 - DNA, 2587 bp, Homo sapiens
acgtgaccctgacccaataagggtggaaggctgagtcccgcagagccaataacgagagtccgagaggcgacggaggcggactctgtgaggaaacaagaagagaggcccaagatggagacggcggcggctgtagcggcgtgacaggagccccatggcacctgcccagccccacctcagcccatcttgacaaaatctaaggctccatggagccaccacggggcccccctgccaatggggccgagccatcccgggcagtgggcaccgtcaaagtatacctgcccaacaagcaacgcacggtggtgactgtccgggatggcatgagtgtctacgactctctagacaaggccctgaaggtgcggggtctaaatcaggactgctgtgtggtctaccgactcatcaagggacgaaagacggtcactgcctgggacacagccattgctcccctggatggcgaggagctcattgtcgaggtccttgaagatgtcccgctgaccatgcacaattttgtacggaagaccttcttcagcctggcgttctgtgacttctgccttaagtttctgttccatggcttccgttgccaaacctgtggctacaagttccaccagcattgttcctccaaggtccccacagtctgtgttgacatgagtaccaaccgccaacagtgagcccagcctggggtgggtggggggatggggagcacagaggcccagccacgaggcccttacagacagctgacccgtgtccccttgctttatacccttcatgccctcaaggttctaccacagtgtccaggatttgtccggaggctccagacagcatgaggctccctcgaaccgccccctgaatgagttgctaaccccccagggtcccagcccccgcacccagcactgtgacccggagcacttccccttccctgccccagccaatgcccccctacagcgcatccgctccacgtccactcccaacgtccatatggtcagcaccacggcccccatggactccaacctcatccagctcactggccagagtttcagcactgatgctgccggtagtagaggaggtagtgatggaaccccccgggggagccccagcccagccagcgtgtcctcggggaggaagtccccacattccaagtcaccagcagagcagcgcgagcggaagtccttggccgatgacaagaagaaagtgaagaacctggggtaccgggactcaggctattactgggaggtaccacccagtgaggtgcagctgctgaagaggatcgggacgggctcgtttggcaccgtgtttcgagggcggtggcatggcgatgtggccgtgaaggtgctcaaggtgtcccagcccacagctgagcaggcccaggctttcaagaatgagatgcaggtgctcaggaagacgcgacatgtcaacatcttgctgtttatgggcttcatgacccggccgggatttgccatcatcacacagtggtgtgagggctccagcctctaccatcacctgcatgtggccgacacacgcttcgacatggtccagctcatcgacgtggcccggcagactgcccagggcatggactacctccatgccaagaacatcatccaccgagatctcaagtctaacaacatcttcctacatgaggggctcacggtgaagatcggtgactttggcttggccacagtgaagactcgatggagcggggcccagcccttggagcagccctcaggatctgtgctgtggatggcagctgaggtgatccgtatgcaggacccgaacccctacagcttccagtcagacgtctatgcctacggggttgtgctctacgagcttatgactggctcactgccttacagccacattggctgccgtgaccagattatctttatggtgggccgtggctatctgtccccggacctcagcaaaatctccagcaactgccccaaggccatgcggcgcctgctgtctgactgcctcaagttccagcgggaggagcggcccctcttcccccagatcctggccacaattgagctgctgcaacggtcactccccaagattgagcggagtgcctcggaaccctccttgcaccgcacccaggccgatgagttgcctgcctgcctactcagcgcagcccgccttgtgccttaggccccgcccaagccaccagggagccaatctcagccctccacgccaaggagccttgcccaccagccaatcaatgttcgtctctgccctgatgctgcctcaggatcccccattccccaccctgggagatgagggggtccccatgtgcttttccagttcttctggaattgggggacccccgccaaagactgagccccctgtctcctccatcatttggtttcctcttggctttggggatacttctaaattttgggagctcctccatctccaatggctgggatttgtggcagggattccactcagaacctctctggaatttgtgcctgatgtgccttccactggattttggggttcccagcaccccatgtggattttggggggtcccttttgtgtctcccccgccattcaaggactcctctctttcttcaccaagaagcacagaattctgctgggc

SEQ ID NO: 365510 - DNA, 2371 bp, Homo sapiens
  misc_feature (263)..(263): n is a, c, g, or t
atatctaatggctcctagtgactgacagctgggcgtgcccgccgtagccactgacgtgcctaggcctgtcaccagtgcacgctagggtcaacagttgccaggtatacctgctctacaatgcaaagcgagggatggctgacttgttacggagacttgcataagttgtctatcaatctttagcagcaacggctggttaagcgatgcttggggctcttaagattccccagactgtgcttgctgtggcgtctacgctgtacttctantctatagggtgtaggacaatgtacgaggtcaccttggtcctgagaggatcagctacggacgcaaatatgacatcccctggatggcgaggagctcattgtcgaggtccttgaagatgtcccgctgaccatgcacaattttgtacggaagaccttcttcagcctggcgttctgtgacttctgccttaagtttctgttccatggcttccgttgccaaacctgtggctacaagttccaccagcattgttcctccaaggtccccacagtctgtgttgacatgagtaccaaccgccaacagttctaccacagtgtccaggatttgtccggaggctccagacagcatgaggctccctcgaaccgccccctgaatgagttgctaaccccccagggtcccagcccccgcacccagcactgtgacccggagcacttccccttccctgccccagccaatgcccccctacagcgcatccgctccacgtccactcccaacgtccatatggtcagcaccacggcccccatggactccaacctcatccagctcactggccagagtttcagcactgatgctgccggtagtagaggaggtagtgatggaaccccccgggggagccccagcccagccagcgtgtcctcggggaggaagtccccacattccaagtcaccagcagagcagcgcgagcggaagtccttggccgatgacaagaagaaagtgaagaacctggggtaccgggactcaggctattactgggaggtaccacccagtgaggtgcagctgctgaagaggatcgggacgggctcgtttggcaccgtgtttcgagggcggtggcatggcgatgtggccgtgaaggtgctcaaggtgtcccagcccacagctgagcaggcccaggctttcaagaatgagatgcaggtgctcaggaagacgcgacatgtcaacatcttgctgtttatgggcttcatgacccggccgggatttgccatcatcacacagtggtgtgagggctccagcctctaccatcacctgcatgtggccgacacacgcttcgacatggtccagctcatcgacgtggcccggcagactgcccagggcatggactacctccatgccaagaacatcatccaccgagatctcaagtctaacaacatcttcctacatgaggggctcacggtgaagatcggtgactttggcttggccacagtgaagactcgatggagcggggcccagcccttggagcagccctcaggatctgtgctgtggatggcagctgaggtgatccgtatgcaggacccgaacccctacagcttccagtcagacgtctatgcctacggggttgtgctctacgagcttatgactggctcactgccttacagccacattggctgccgtgaccagattatctttatggtgggccgtggctatctgtccccggacctcagcaaaatctccagcaactgccccaaggccatgcggcgcctgctgtctgactgcctcaagttccagcgggaggagcggcccctcttcccccagatcctggccacaattgagctgctgcaacggtcactccccaagattgagcggagtgcctcggaaccctccttgcaccgcacccaggccgatgagttgcctgcctgcctactcagcgcagcccgccttgtgccttaggccccgcccaagccaccagggagccaatctcagccctccacgccaaggagccttgcccaccagccaatcaatgttcgtctctgccctgatgctgcctcaggatcccccattccccaccctgggagatgagggggtccccatgtgcttttccagttcttctggaattgggggacccccgccaaagactgagccccctgtctcctccatcatttggtttcctcttggctttggggatacttctaaattttgggagctcctccatctccaatggctgggatttgtggcagggattccactcagaacctctctggaatttgtgcctgatgtgccttccactggattttggggttcccagcaccccatgtggattttggggggtcccttttgtgtctcccccgccattcaaggactcctctctttcttcaccaagaagcacagaattctgctgggc

SEQ ID NO: 365511 - DNA, 1641 bp, Homo sapiens
ctcgaacccgacactcaaactgggatttctcatcacccacggcccccatggactccaacctcatccagctcactggccagagtttcagcactgatgctgccggtagtagaggaggtagtgatggaaccccccgggggagccccagcccagccagcgtgtcctcggggaggaagtccccacattccaagtcaccagcagagcagcgcgagcggaagtccttggccgatgacaagaagaaagtgaagaacctggggtaccgggactcaggctattactgggaggtaccacccagtgaggtgcagctgctgaagaggatcgggacgggctcgtttggcaccgtgtttcgagggcggtggcatggcgatgtggccgtgaaggtgctcaaggtgtcccagcccacagctgagcaggcccaggctttcaagaatgagatgcaggtgctcaggaagacgcgacatgtcaacatcttgctgtttatgggcttcatgacccggccgggatttgccatcatcacacagtggtgtgagggctccagcctctaccatcacctgcatgtggccgacacacgcttcgacatggtccagctcatcgacgtggcccggcagactgcccagggcatggactacctccatgccaagaacatcatccaccgagatctcaagtctaacaacatcttcctacatgaggggctcacggtgaagatcggtgactttggcttggccacagtgaagactcgatggagcggggcccagcccttggagcagccctcaggatctgtgctgtggatggcagctgaggtgatccgtatgcaggacccgaacccctacagcttccagtcagacgtctatgcctacggggttgtgctctacgagcttatgactggctcactgccttacagccacattggctgccgtgaccagattatctttatggtgggccgtggctatctgtccccggacctcagcaaaatctccagcaactgccccaaggccatgcggcgcctgctgtctgactgcctcaagttccagcgggaggagcggcccctcttcccccagatcctggccacaattgagctgctgcaacggtcactccccaagattgagcggagtgcctcggaaccctccttgcaccgcacccaggccgatgagttgcctgcctgcctactcagcgcagcccgccttgtgccttaggccccgcccaagccaccagggagccaatctcagccctccacgccaaggagccttgcccaccagccaatcaatgttcgtctctgccctgatgctgcctcaggatcccccattccccaccctgggagatgagggggtccccatgtgcttttccagttcttctggaattgggggacccccgccaaagactgagccccctgtctcctccatcatttggtttcctcttggctttggggatacttctaaattttgggagctcctccatctccaatggctgggatttgtggcagggattccactcagaacctctctggaatttgtgcctgatgtgccttccactggattttggggttcccagcaccccatgtggattttggggggtcccttttgtgtctcccccgccattcaaggactcctctctttcttcaccaagaagcacagaattctgctgggc

SEQ ID NO: 365512 - DNA, 1802 bp, Homo sapiens
acgtgaccctgacccaataagggtggaaggctgagtcccgcagagccaataacgagagtccgagaggcgacggaggcggactctgtgaggaaacaagaagagaggcccaagatggagacggcggcggctgtagcggcgtgacaggagccccatggcacctgcccagccccacctcagcccatcttgacaaaatctaaggctccatggagccaccacggggcccccctgccaatggggccgagccatcccgggcagtgggcaccgtcaaagtatacctgcccaacaagcaacgcacggtggtgactgtccgggatggcatgagtgtctacgactctctagacaaggccctgaaggtgcggggtctaaatcaggactgctgtgtggtctaccgactcatcaagggacgaaagacggtcactgcctgggacacagccattgctcccctggatggcgaggagctcattgtcgaggtccttgaagatgtcccgctgaccatgcacaattttgtacggaagaccttcttcagcctggcgttctgtgacttctgccttaagtttctgttccatggcttccgttgccaaacctgtggctacaagttccaccagcattgttcctccaaggtccccacagtctgtgttgacatgagtaccaaccgccaacagttctaccacagtgtccaggatttgtccggaggctccagacagcatgaggctccctcgaaccgccccctgaatgagttgctaaccccccagggtcccagcccccgcacccagcactgtgacccggagcacttccccttccctgccccagccaatgcccccctacagcgcatccgctccacgtccactcccaacgtccatatggtcagcaccacggcccccatggactccaacctcatccagctcactggccagagtttcagcactgatgctgccggtagtagaggaggtagtgatggaaccccccgggggagccccagcccagccagcgtgtcctcggggaggaagtccccacattccaagtcaccagcagagcagcgcgagcggaagtccttggccgatgacaagaagaaagtgaagaacctggggtaccgggactcaggctattactgggaggtaccacccagtgaggtgcagctgctgaagaggatcgggacgggctcgtttggcaccgtgtttcgagggcggtggcatggcgatgtggccgtgaaggtgctcaaggtgtcccagcccacagctgagcaggcccaggctttcaagaatgagatgcaggtgctcaggaagacgcgacatgtcaacatcttgctgtttatgggcttcatgacccggccgggatttgccatcatcacacagtggtgtgagggctccagcctctaccatcacctgcatgtggccgacacacgcttcgacatggtccagctcatcgacgtggcccggcagactgcccagggcatggactacctccatgccaagaacatcatccaccgagatctcaagtctaacaacatcttcctacatgaggggctcacggtgaagatcggtgactttggcttggccacagtgaagactcgatggagcggggcccagcccttggagcagccctcaggatctgtgctgtggatggcagctgaggtgatccgtatgcaggacacgtatggtcaagtcattctaataatcgcacacgtactaacatcctcaatatctattcggcctagcaaactcaatctacgcacgcactcacagtcgcatataatcctctctcaaggacacgaatgttcaggtaccgagctgaattgtatatta

SEQ ID NO: 365513 - DNA, 1177 bp, Homo sapiens
aagttccagcgggaggagcggcccctcttcccccagatcctggccacaattgagctgctgcaacggtcactccccaagattgagcggagtgcctcggaaccctccttgcaccgcacccaggccgatgagttgcctgcctgcctactcagcgcagcccgccttgtgccttaggccccgcccaagccaccagggagccaatctcagccctccacgccaaggagccttgcccaccagccaatcaatgttcgtctctgccctgatgctgcctcaggatcccccattccccagcccttggagcagccctcaggatctgtgctgtggatggcagctgaggtgatccgtatgcaggacccgaacccctacagcttccagtcagacgtctatgcctacggggttgtgctctacgagcttatgactggctcactgccttacagccacattggctgccgtgaccagattatctttatggtgggccgtggctatctgtccccggacctcagcaaaatctccagcaactgccccaaggccatgcggcgcctgctgtctgactgcctcaagttccagcgggaggagcggcccctcttcccccagatcctggccacaattgagctgctgcaacggtcactccccaagattgagcggagtgcctcggaaccctccttgcaccgcacccaggccgatgagttgcctgcctgcctactcagcgcagcccgccttgtgccttaggccccgcccaagccaccagggagccaatctcagccctccacgccaaggagccttgcccaccagccaatcaatgttcgtctctgccctgatgctgcctcaggatcccccattccccaccctgggagatgagggggtccccatgtgcttttccagttcttctggaattgggggacccccgccaaagactgagccccctgtctcctccatcatttggtttcctcttggctttggggatacttctaaattttgggagctcctccatctccaatggctgggatttgtggcagggattccactcagaacctctctggaatttgtgcctgatgtgccttccactggattttggggttcccagcaccccatgtggattttggggggtcccttttgtgtctcccccgccattcaaggactcctctctttcttcaccaagaagcacagaattctgctgggc

SEQ ID NO: 365514 - DNA, 1455 bp, Homo sapiens
  misc_feature (767)..(767): n is a, c, g, or t
acgtgaccctgacccaataagggtggaaggctgagtcccgcagagccaataacgagagtccgagaggcgacggaggcggactctgtgaggaaacaagaagagaggcccaagatggagacggcggcggctgtagcggcgtgacaggagccccatggcacctgcccagccccacctcagcccatcttgacaaaatctaaggctccatggagccaccacggggcccccctgccaatggggccgagccatcccgggcagtgggcaccgtcaaagtatacctgcccaacaagcaacgcacggtggtgactgtccgggatggcatgagtgtctacgactctctagacaaggccctgaaggtgcggggtctaaatcaggactgctgtgtggtctaccgactcatcaagggacgaaagacggtcactgcctgggacacagccattgctcccctggatggcgaggagctcattgtcgaggtccttgaagatgtcccgctgaccatgcacaattttgtacggaagaccttcttcagcctggcgttctgtgacttctgccttaagtttctgttccatggcttccgttgccaaacctgtggctacaagttccaccagcattgttcctccaaggtccccacagtctgtgttgacatgagtaccaaccgccaacagttctaccacagtgtccaggatttgtccggaggctccagacagcatgaggctccctcgaaccgccccctgaatgagttgctaaccccccagggtcccagccccganccagcatgtgaccggagcatgtcccacccatttcccctggcccagcgcaagtgctccgcgcctacaggcgcagtgccgacttccgacgtgcagctcgccaacagtccatatgtgtcagccaacaccggcccccccatggaactcacaagctcatccaagctcacatggcaccaggagttttcagcacctgatgctgcccggtaagatagagcgaggtagtgatgggaagcccccccacggggggaggcaccccaagcacacagccaaggcagctgttcctcgaggggcaaggaaaagatcccccacaatttgtcacaaaaggtccacacaaggcacaagagccaaggcggccgaacgcgcgcacacgtccatgggggccgagtagaccagagacccgacacacgtcgcaacgaaaaccctcgacgcggttaacacgagcgaactaacaagggctactttaacgcgggaaggtaacccaccccccaagtggaagaggtggcacagcttaggcttcgcaccaaggactcccgcgggacacggagcggacgcgtaggggacaccagcagttaccaagaagggacacgcgcgcgcattgggcgacatgtgggacccgccaaaaggtcgcctcacacgagagtccccacgccccaacaggtgagacaggccccaggactctccaaccactggg

SEQ ID NO: 365515 - DNA, 1864 bp, Homo sapiens
acgtgaccctgacccaataagggtggaaggctgagtcccgcagagccaataacgagagtccgagaggcgacggaggcggactctgtgaggaaacaagaagagaggcccaagatggagacggcggcggctgtagcggcgtgacagtgaagctgagaccttggcactcaagagtgagacaagcaacaggagggcctgagcagagaaggaactggaaggacttcagatgtgagcaggatctcttggactgtcgtgtgaaaattaggctgcagggggcgacaggagcctggactttgaattttattttgtcccctgccactttgcttctagactatcattattggacctctgaattcttgtctgccttcttgtaggagccccatggcacctgcccagccccacctcagcccatcttgacaaaatctaaggctccatggagccaccacggggcccccctgccaatggggccgagccatcccgggcagtgggcaccgtcaaagtatacctgcccaacaagcaacgcacggtggtgactgtccgggatggcatgagtgtctacgactctctagacaaggccctgaaggtgcggggtctaaatcaggactgctgtgtggtctaccgactcatcaagggacgaaagacggtcactgcctgggacacagccattgctcccctggatggcgaggagctcattgtcgaggtccttgaagatgtcccgctgaccatgcacaattttgtacggaagaccttcttcagcctggcgttctgtgacttctgccttaagtttctgttccatggcttccgttgccaaacctgtggctacaagttccaccagcattgttcctccaaggtccccacagtctgtgttgacatgagtaccaaccgccaacagttctaccacagtgtccaggatttgtccggaggctccagacagcatgaggctccctcgaaccgccccctgaatgagttgctaaccccccagggtcccaggtagggatgccttagctgaagagctgctgggggagaaaaagatcttggggctcttgtagaccacgagccatactttattcatttgtttacttgacaaacatttattgagcacctacaagtgtgagtaagggcatgaaactgggaccttgggcaagtcacctcatttctctgggcctcagttttctcatctgtaaagaggggatgatgatactttctaccatataaaggttctggtgaggcttaaatgagttaagacatgttcagtgcctagaacaggatctggtacagtgtaaataatcaatttttttgttattaattataaatatatttataagcatctaactactttgctaattctagtataatcatactcaagcctttccattttgaaatacgtattattttatcataaattacttcccttttattgcttttttatgttaaatattatataaaactatagctatattaaaatatattattgctctaatatatattttatgatgtgcatattttatggtatatttatgttattgtatcatgttgtattacataattttatataatgtagaacatcatacatgtttatatgatacataaaataaagttagggtattattttaaattatgagtgtatgtgcattaattacctttgagtttcatttcaggatagtgaagggaacattaacatatttttgtaactttacaatatgtttagcatatatcatatgtataacatgtatgtataacaatatggtaatatgtatattttaaaacattgccatttttatatagatgatacatattatataacatttgaaaagtacatgtaattataatatataattataaaatatgatacattaccctttcccca

SEQ ID NO: 365516 - DNA, 515 bp, Homo sapiens
aacccccagccaatccgccacctgcctccacccccacagctacctccatgccaagaacatcatccaccgagatctcaagtctaacagtatctatctgtccctgggctggggttgagtgggggtgtcaagggcttagaaggatgcctcttgtgggggttctgggaattacaagggaggggcatgtgtcccagagctccttgccaggtggcagagctgtggccagccagggggctttaatggcagtctcttagaagtcagaggtgtggctggttcaggtactattcttggggactctggttagagtctgatgtctgacagttgtggagggcattatggtcaacatcagaggcatagtgggttcggatgccctccgaggggcttcctgttcaggagtcacagcggggctgagtgtggggggcattagcaggcgttccctgcccacgtcaaggttgtggatagtttgcgtgatattaaggggctcctggtcaggatcagagggatgagtggtatagggg

SEQ ID NO: 365517 - DNA, 517 bp, Homo sapiens
agtgagctgagaccatgccattgcactccagcctgggcaacaagagcgaaactctgtcagaaaaaaaaaaaaacagaaaaaaaaaaaaaaaaaacccaggacattctgttcgtgcttcttatgtacctgacggctcagtgcagtgtgtactgacttccccattggtccccagcacagagtcttgtgtgctcctctaccctccaagacagtatgctctgtcccccttccctgttctctcccccgcaaccctgtgcagtgaagctgagaccttggcactcaagagtgagacaagcaacaggagggcctgagcagagaaggaactggaaggacttcagatgtgagcaggatctcttggactgtcgtgtgaaaattaggctgcagggggcgacaggagcctggactttgaattttattttgtcccctgccactttgcttctagactatcattattggacctctgaattcttgtctgccttcttgtaggagccccatggcacctgcccagccccacctcagc

SEQ ID NO: 365518 - DNA, 1553 bp, Homo sapiens
ggctggtacggtccgagttttatggatatggagacggcggcggctgtagcggcgtgacaggagccccatggcacctgcccagccccacctcagcccatcttgacaaaatctaaggctccatggagccaccacggggcccccctgccaatggggccgagccatcccgggcagtgggcaccgtcaaagtatacctgcccaacaagcaacgcacggtggtgactgtccgggatggcatgagtgtctacgactctctagacaaggccctgaaggtgcggggtctaaatcaggactgctgtgtggtctaccgactcatcaagggacgaaagacggtcactgcctgggacacagccattgctcccctggatggcgaggagctcattgtcgaggtccttgaagatgtcccgctgaccatgcacaattttgtacggaagaccttcttcagcctggcgttctgtgacttctgccttaagtttctgttccatggcttccgttgccaaacctgtggctacaagttccaccagcattgttcctccaaggtccccacagtctgtgttgacatgagtaccaaccgccaacagttctaccacagtgtccaggatttgtccggaggctccagacagcatgaggctccctcgaaccgccccctgaatgagttgctaaccccccagggtcccaggtagggatgccttagctgaagagctgctgggggagaaaaagatcttggggctcttgtagaccacgagccatactttattcatttgtttacttgacaaacatttattgagcacctacaagtgtgagtaagggcatgaaactgggaccttgggcaagtcacctcatttctctgggcctcagttttctcatctgtaaagaggggatgatgatactttctaccatataaaggttctggtgaggcttaaatgagttaagacatgttcagtgcctagaacaggatctggtacagtgtaaataatcaatttttttgttattaattataaatatatttataagcatctaactactttgctaattctagtataatcatactcaagcctttccattttgaaatacgtattattttatcataaattacttcccttttattgcttttttatgttaaatattatataaaactatagctatattaaaatatattattgctctaatatatattttatgatgtgcatattttatggtatatttatgttattgtatcatgttgtattacataattttatataatgtagaacatcatacatgtttatatgatacataaaataaagttagggtattattttaaattatgagtgtatgtgcattaattacctttgagtttcatttcaggatagtgaagggaacattaacatatttttgtaactttacaatatgtttagcatatatcatatgtataacatgtatgtataacaatatggtaatatgtatattttaaaacattgccatttttatatagatgatacatattatataacatttgaaaagtacatgtaattataatatataattataaaatatgatacattaccctttcccca

SEQ ID NO: 365519 - DNA, 780 bp, Homo sapiens
ggggcaccaatgggaacctcccaggcagggtgagaggcatggctattaggagtccctgtagtggtccttgaccctggcggacatcttcctacatgaggggctcacggtgaagatcggtgactttggcttggccacagtgaagactcgatggagcggggcccagcccttggagcagccctcaggatctgtgctgtggatggcagctgaggtgatccgtatgcaggacccgaacccctacagcttccagtcagacgtctatgcctacggggttgtgctctacgagcttatgactggctcactgccttacagccacattggctgccgtgaccaggtgagccccacaccttacccacagttccctgggctgagggatcccctcaggcatccataccccacatcccctcctttgcactgataaatgccacactttccccagaaacctaaaattttctaggataaggactcccagaatcccttgggctccagacacttacaataaattctctgggtctcccctaccccaacttccctcttctcacatccacagccctctgggacaaaaatctttgaagtccaaaatgccccgaatctctatacctagaatcccctgaggcccccaaataccccaaagccctctgtatccctagacgcctatagtcgtctgctctgggtactcaaaatcccccagatcctcaaagcccagatctcatttctcccagcatcccatttttccccagaaacagaacccctttgtgcttctggaatagtcatggacaccca

SEQ ID NO: 365520 - DNA, 2447 bp, Homo sapiens
acgtgaccctgacccaataagggtggaaggctgagtcccgcagagccaataacgagagtccgagaggcgacggaggcggactctgtgaggaaacaagaagagaggcccaagatggagacggcggcggctgtagcggcgtgacaggagccccatggcacctgcccagccccacctcagcccatcttgacaaaatctaaggctccatggagccaccacggggcccccctgccaatggggccgagccatcccgggcagtgggcaccgtcaaagtatacctgcccaacaagcaacgcacggtggtgactgtccgggatggcatgagtgtctacgactctctagacaaggccctgaaggtgcggggtctaaatcaggactgctgtgtggtctaccgactcatcaagggacgaaagacggtcactgcctgggacacagccattgctcccctggatggcgaggagctcattgtcgaggtccttgaagatgtcccgctgaccatgcacaattttgtacggaagaccttcttcagcctggcgttctgtgacttctgccttaagtttctgttccatggcttccgttgccaaacctgtggctacaagttccaccagcattgttcctccaaggtccccacagtctgtgttgacatgagtaccaaccgccaacagttctaccacagtgtccaggatttgtccggaggctccagacagcatgaggctccctcgaaccgccccctgaatgagttgctaaccccccagggtcccagcccccgcacccagcactgtgacccggagcacttccccttccctgccccagccaatgcccccctacagcgcatccgctccacgtccactcccaacgtccatatggtcagcaccacggcccccatggactccaacctcatccagctcactggccagagtttcagcactgatgctgccggtagtagaggaggtagtgatggaaccccccgggggagccccagcccagccagcgtgtcctcggggaggaagtccccacattccaagtcaccagcagagcagcgcgagcggaagtccttggccgatgacaagaagaaagtgaagaacctggggtaccgggactcaggctattactgggaggtaccacccagtgaggtgcagctgctgaagaggatcgggacgggctcgtttggcaccgtgtttcgagggcggtggcatggcgatgtggccgtgaaggtgctcaaggtgtcccagcccacagctgagcaggcccaggctttcaagaatgagatgcaggtgctcaggaagacgcgacatgtcaacatcttgctgtttatgggcttcatgacccggccgggatttgccatcatcacacagtggtgtgagggctccagcctctaccatcacctgcatgtggccgacacacgcttcgacatggtccagctcatcgacgtggcccggcagactgcccagggcatggactacctccatgccaagaacatcatccaccgagatctcaagtctaacaacatcttcctacatgaggggctcacggtgaagatcggtgactttggcttggccacagtgaagactcgatggagcggggcccagcccttggagcagccctcaggatctgtgctgtggatggcagctgaggtgatccgtatgcaggacccgaacccctacagcttccagtcagacgtctatgcctacggggttgtgctctacgagcttatgactggctcactgccttacagccacattggctgccgtgaccagattatctttatggtgggccgtggctatctgtccccggacctcagcaaaatctccagcaactgccccaaggccatgcggcgcctgctgtctgactgcctcaagttccagcgggaggagcggcccctcttcccccagggtcactccccaagattgagcggagtgcctcggaaccctccttgcaccgcacccaggccgatgagttgcctgcctgcctactcagcgcagcccgccttgtgccttaggccccgcccaagccaccagggagccaatctcagccctccacgccaaggagccttgcccaccagccaatcaatgttcgtctctgccctgatgctgcctcaggatcccccattccccaccctgggagatgagggggtccccatgtgcttttccagttcttctggaattgggggacccccgccaaagactgagccccctgtctcctccatcatttggtttcctcttggctttggggatacttctaaattttgggagctcctccatctccaatggctgggatttgtggcagggattccactcagaacctctctggaatttgtgcctgatgtgccttccactggattttggggttcccagcaccccatgtggattttggggggtcccttttgtgtctcccccgccattcaaggactcctctctttcttcaccaagaagcacagaattctgctgggc

SEQ ID NO: 365521 - DNA, 2391 bp, Homo sapiens
ggctggtacggtccgagttttatggatatggagacggcggcggctgtagcggcgtgacaggagccccatggcacctgcccagccccacctcagcccatcttgacaaaatctaaggctccatggagccaccacggggcccccctgccaatggggccgagccatcccgggcagtgggcaccgtcaaagtatacctgcccaacaagcaacgcacggtggtgactgtccgggatggcatgagtgtctacgactctctagacaaggccctgaaggtgcggggtctaaatcaggactgctgtgtggtctaccgactcatcaagggacgaaagacggtcactgcctgggacacagccattgctcccctggatggcgaggagctcattgtcgaggtccttgaagatgtcccgctgaccatgcacaattttgtacggaagaccttcttcagcctggcgttctgtgacttctgccttaagtttctgttccatggcttccgttgccaaacctgtggctacaagttccaccagcattgttcctccaaggtccccacagtctgtgttgacatgagtaccaaccgccaacagttctaccacagtgtccaggatttgtccggaggctccagacagcatgaggctccctcgaaccgccccctgaatgagttgctaaccccccagggtcccagcccccgcacccagcactgtgacccggagcacttccccttccctgccccagccaatgcccccctacagcgcatccgctccacgtccactcccaacgtccatatggtcagcaccacggcccccatggactccaacctcatccagctcactggccagagtttcagcactgatgctgccggtagtagaggaggtagtgatggaaccccccgggggagccccagcccagccagcgtgtcctcggggaggaagtccccacattccaagtcaccagcagagcagcgcgagcggaagtccttggccgatgacaagaagaaagtgaagaacctggggtaccgggactcaggctattactgggaggtaccacccagtgaggtgcagctgctgaagaggatcgggacgggctcgtttggcaccgtgtttcgagggcggtggcatggcgatgtggccgtgaaggtgctcaaggtgtcccagcccacagctgagcaggcccaggctttcaagaatgagatgcaggtgctcaggaagacgcgacatgtcaacatcttgctgtttatgggcttcatgacccggccgggatttgccatcatcacacagtggtgtgagggctccagcctctaccatcacctgcatgtggccgacacacgcttcgacatggtccagctcatcgacgtggcccggcagactgcccagggcatggactacctccatgccaagaacatcatccaccgagatctcaagtctaacaacatcttcctacatgaggggctcacggtgaagatcggtgactttggcttggccacagtgaagactcgatggagcggggcccagcccttggagcagccctcaggatctgtgctgtggatggcagctgaggtgatccgtatgcaggacccgaacccctacagcttccagtcagacgtctatgcctacggggttgtgctctacgagcttatgactggctcactgccttacagccacattggctgccgtgaccagattatctttatggtgggccgtggctatctgtccccggacctcagcaaaatctccagcaactgccccaaggccatgcggcgcctgctgtctgactgcctcaagttccagcgggaggagcggcccctcttcccccagatcctggccacaattgagctgctgcaacggtcactccccaagattgagcggagtgcctcggaaccctccttgcaccgcacccaggccgatgagttgcctgcctgcctactcagcgcagcccgccttgtgccttaggccccgcccaagccaccagggagccaatctcagccctccacgccaaggagccttgcccaccagccaatcaatgttcgtctctgccctgatgctgcctcaggatcccccattccccaccctgggagatgagggggtccccatgtgcttttccagttcttctggaattgggggacccccgccaaagactgagccccctgtctcctccatcatttggtttcctcttggctttggggatacttctaaattttgggagctcctccatctccaatggctgggatttgtggcagggattccactcagaacctctctggaatttgtgcctgatgtgccttccactggattttggggttcccagcaccccatgtggattttggggggtcccttttgtgtctcccccgccattcaaggactcctctctttcttcaccaagaagcacagaattctgctgggc

SEQ ID NO: 365522 - DNA, 2203 bp, Homo sapiens
acgtgaccctgacccaataagggtggaaggctgagtcccgcagagccaataacgagagtccgagaggcgacggaggcggactctgtgaggaaacaagaagagaggcccaagatggagacggcggcggctgtagcggcgtgacaggagccccatggcacctgcccagccccacctcagcccatcttgacaaaatctaaggctccatggagccaccacggggcccccctgccaatggggccgagccatcccgggcagtgggcaccgtcaaagtatacctgcccaacaagcaacgcacggtggtgactgtccgggatggcatgagtgtctacgactctctagacaaggccctgaaggtgcggggtctaaatcaggactgctgtgtggtctaccgactcatcaagggacgaaagacggtcactgcctgggacacagccattgctcccctggatggcgaggagctcattgtcgaggtccttgaagatgtcccgctgaccatgcacaattttgtacggaagaccttcttcagcctggcgttctgtgacttctgccttaagtttctgttccatggcttccgttgccaaacctgtggctacaagttccaccagcattgttcctccaaggtccccacagtctgtgttgacatgagtaccaaccgccaacagttctaccacagtgtccaggatttgtccggaggctccagacagcatgaggctccctcgaaccgccccctgaatgagttgctaaccccccagggtcccagcccccgcacccagcactgtgacccggagcacttccccttccctgccccagccaatgcccccctacagcgcatccgctccacgtccactcccaacgtccatatggtcagcaccacggcccccatggactccaacctcatccagctcactggccagagtttcagcactgatgctgccggtagtagaggaggtagtgatggaaccccccgggggagccccagcccagccagcgtgtcctcggggaggaagtccccacattccaagtcaccagcagagcagcgcgagcggaagtccttggccgatgacaagaagaaagtgaagaacctggggtaccgggactcaggctattactgggaggtaccacccagtgaggtgcagctgctgaagaggatcgggacgggctcgtttggcaccgtgtttcgagggcggtggcatggcgatgtggccgtgaaggtgctcaaggtgtcccagcccacagctgagcaggcccaggctttcaagaatgagatgcaggtgctcaggaagacgcgacatgtcaacatcttgctgtttatgggcttcatgacccggccgggatttgccatcatcacacagtggtgtgagggctccagcctctaccatcacctgcatgtggccgacacacgcttcgacatggtccagctcatcgacgtggcccggcagactgcccagggcatggactacctccatgccaagaacatcatccaccgagatctcaagtctaacaacatcttcctacatgaggggctcacggtgaagatcggtgactttggcttggccacagtgaagactcgatggagcggggcccagcccttggagcagccctcaggatctgtgctgtggatggcagctgaggtgatccgtatgcaggacccgaacccctacagcttccagtcagacgtctatgcctacggggttgtgctctacgagcttatgactggctcactgccttacagccacattggctgccgtgaccaggtgagccccacaccttacccacagttccctgggctgagggatcccctcaggcatccataccccacatcccctcctttgcactgataaatgccacactttccccagaaacctaaaattttctaggataaggactcccagaatcccttgggctccagacacttacaataaattctctgggtctcccctaccccaacttccctcttctcacatccacagccctctgggacaaaaatctttgaagtccaaaatgccccgaatctctatacctagaatcccctgaggcccccaaataccccaaagccctctgtatccctagacgcctatagtcgtctgctctgggtactcaaaatcccccagatcctcaaagcccagatctcatttctcccagcatcccatttttccccagaaacagaacccctttgtgcttctggaatagtcatggacaccca

SEQ ID NO: 365523 - DNA, 1052 bp, Homo sapiens
ggggcaccaatgggaacctcccaggcagggtgagaggcatggctattaggagtccctgtagtggtccttgaccctggcggacatcttcctacatgaggggctcacggtgaagatcggtgactttggcttggccacagtgaagactcgatggagcggggcccagcccttggagcagccctcaggatctgtgctgtggatggcagctgaggtgatccgtatgcaggacccgaacccctacagcttccagtcagacgtctatgcctacggggttgtgctctacgagcttatgactggctcactgccttacagccacattggctgccgtgaccagattatctttatggtgggccgtggctatctgtccccggacctcagcaaaatctccagcaactgccccaaggccatgcggcgcctgctgtctgactgcctcaagttccagcgggaggagcggcccctcttcccccagatcctggccacaattgagctgctgcaacggtcactccccaagattgagcggagtgcctcggaaccctccttgcaccgcacccaggccgatgagttgcctgcctgcctactcagcgcagcccgccttgtgccttaggccccgcccaagccaccagggagccaatctcagccctccacgccaaggagccttgcccaccagccaatcaatgttcgtctctgccctgatgctgcctcaggatcccccattccccaccctgggagatgagggggtccccatgtgcttttccagttcttctggaattgggggacccccgccaaagactgagccccctgtctcctccatcatttggtttcctcttggctttggggatacttctaaattttgggagctcctccatctccaatggctgggatttgtggcagggattccactcagaacctctctggaatttgtgcctgatgtgccttccactggattttggggttcccagcaccccatgtggattttggggggtcccttttgtgtctcccccgccattcaaggactcctctctttcttcaccaagaagcacagaattctgctgggc

SEQ ID NO: 365524 - DNA, 872 bp, Homo sapiens
ctggtctggcctgttgtaggcagctgaggtgatccgtatgcaggacccgaacccctacagcttccagtcagacgtctatgcctacggggttgtgctctacgagcttatgactggctcactgccttacagccacattggctgccgtgaccagattatctttatggtgggccgtggctatctgtccccggacctcagcaaaatctccagcaactgccccaaggccatgcggcgcctgctgtctgactgcctcaagttccagcgggaggagcggcccctcttcccccagatcctggccacaattgagctgctgcaacggtcactccccaagattgagcggagtgcctcggaaccctccttgcaccgcacccaggccgatgagttgcctgcctgcctactcagcgcagcccgccttgtgccttaggccccgcccaagccaccagggagccaatctcagccctccacgccaaggagccttgcccaccagccaatcaatgttcgtctctgccctgatgctgcctcaggatcccccattccccaccctgggagatgagggggtccccatgtgcttttccagttcttctggaattgggggacccccgccaaagactgagccccctgtctcctccatcatttggtttcctcttggctttggggatacttctaaattttgggagctcctccatctccaatggctgggatttgtggcagggattccactcagaacctctctggaatttgtgcctgatgtgccttccactggattttggggttcccagcaccccatgtggattttggggggtcccttttgtgtctcccccgccattcaaggactcctctctttcttcaccaagaagcacagaattctgctgggc

SEQ ID NO: 365525 - DNA, 410 bp, Homo sapiens
tgggtgacagagtgagactccgtctcaaaaataaataagcaaacaaatataatggaatccttccatgcgctcccctctggtaccatcgctcttcgtctttgtctgaaggtaaccactgttttaaagttcatacttgtcatttctgcatacgtctttatactacatacagttgactcttgaacaacatgggcttgcactgtgcaggtctgcttacatgcagattttcttttacctctgccacccctgagacaacaagaacaatccctcctcttcctcctcctcctcagcctactcagtgtgaagacgatgacgatgaagactttcatgatgatccacttctatttaataaatagtaaatatattttctcttccttatgattttcttagagtttcttttctctagcttactt

SEQ ID NO: 365526 - DNA, 280 bp, Homo sapiens
tctacttagaaaaatcccactattcaccacatgtattcatttagtgttccattttattggtcctaaaatcactgaattcaggtagagtagaaactgggtccatcctacacccatgttgctctaattatatttgagatatttactaggcaaaccatcgcatttatgcatattaggggataattctgtttagaaaggttatgtgacatatagctaaaatgacttctatgaatatgactaatagagactaatataaaatttaataaatatgtcaactataaca

SEQ ID NO: 365527 - DNA, 366 bp, Homo sapiens
atgtaatatattcacaagtgtctttatgaagtgattttgatactctttgtcttctccctggcatctccttgttctttaataatttttttccttggtttattttggtcttatttttctttttaaagcctttccttaaatatctattctatgttgcttatcatttgttgtcttttttttttttttttgagacccagtttcgctcttgttgcctaggctggagtacaatgatgtgatctcggctcaccacagcctctgcctccaaggttcaagcggttctcctgcctcagcctcccaagtagctgggattacaggcatgtgctaccacgcccagctaatttgtgtatttttagtagagatgggatttct

SEQ ID NO: 365528 - DNA, 461 bp, Homo sapiens
gacccagcctggcccccaccagcaagttcttaccagcacacgtgacttcctgtgtgagctgacccccaccccactctaccgcatctcccctgccttgcacctcagttgctctgtccagccccaccccctttacctttcctctgccacccttgtcaccatcctgccctgggacctttgcacttgctgtgttctccaccctgaacacaaacatcatcactccctcagggtctcctcttgtcctcttgctgaggcacacgctgcgggaagagcatgtcaggcagaaagaatagcccacacaaaagccctgtcttgaccaggtgtggttggtggtgcctgcctgtgatccaagccctttgggaggctgaggtgagaggatcacttgagccaggattcccaggctgcagcgagctatgattgcaacactgcactccagcctgagcaacagagcaagaccctgtctc

SEQ ID NO: 365529 - DNA, 513 bp, Homo sapiens
gaccttgttgcggttgacttgcagtggtctaagcccacctcaggtttcttcccaagactaccaacaaatcttccctcttgctgtggggaaatgagtcttccttcaacatcttcagtgaaaatatcaaggcccttcggcatgggctccgccagcatctctcgccgatgccttcactccaaatcctctcttctttcttcccttgtctctgtgtctgtagacaactggtctcttttcagggctaactctgatttgggttctcctttctccagagccttctttaatcccttaggcactgtggttttcccctcagtccattcagcatgagctctccatttcttttttttctttttcttttttttgagacggagtctcagtctgtcgctcaggctggaatgcagtggtgtgatcttggctcacctgcaacctccgcctcctgggttcaagtgattcccctgcctcagcctcccgagtagctgggactataggcaccagccaccacgctcagctaatttt

SEQ ID NO: 365530 - DNA, 260 bp, Homo sapiens
ttttattttaaatcatagcatgggggcattttttttattatatattttttcttctcctttttttcagagacagaatcttgctctgtcatccagactggagggcagtgatgttctgaacatcgctcactgcagccttcaaatcaggctcaagcaatcctcctgcctcagccttctgagtcactggaataacaggtatgtgccactgggcctggctctatattttcagtatatttaaggcatgtcgaaaaaaaattgtatag

SEQ ID NO: 365531 - DNA, 425 bp, Homo sapiens
gctgatctggtccaaacgcccacgctctcctccctctagggaagccctcgctgtctcctgcctcctgcactgtcctctttctgcctccacctaaggagaagcctgccttgaagaaaaacctccagcttcctccatggtgcagcttgaaagacctcccacttgtctgaacttttgctttttacacatcttgctcaagcggcagtgagctgggcaggcagcctgagattgaattcagcttgaggctgaagattaggttgaatccttggagtgataaaagctttagctctaccttcctcatttgtaaaaggccaattaattataatatgtgttttgccagatcgggattttttttttgggggggtgggggtgggacgaactcttgctctgttgcccaggctggagtgcagtgacgccatctcggctca

SEQ ID NO: 365532 - DNA, 2005 bp, Homo sapiens
cccagcgcagctcagctaaactcagcggagccagcgcggcgcgatggaaggtcgagtgcagctgatgaaggccctcctggctcggcccctccggcccgcggcgcgtcgctggaggaacccgattccctttcccgagacgtttgatggcgataccgaccggctcccggagttcatcgtgcagacgagctcctacatgttcgtggacgagaacacgttctccaacgacgccctgaaggtgacgttcctcatcacccgcctcacggggcccgccctgcagtgggtgatcccctacatcaagaaggagagccccctcctcagtgattaccggggcttcctggctgagatgaagcgggtctttggatgggaggaggacgaggacttctaggccgggagaccctcgggcctggggacgggtgctctgggaagggtccgctgtgttactggccgccgccagggtcgccaccggcgccctccctccgcgcctccctccccctcgagccgccacgatgtcccctgcgctcctgtcccctcccgcgtagtgcttgcctttgttccaggaatagcgctccaggctcctgctgccgcccctgggcctcactctggagcgggctgcctccgccctctcgtgacagctcagcccctcccatgcacatttggacgctgtcctgcgctccagttgcacaaagctgagctcctgttacacactgacagaccactgacagccgccgctgccaacccccctcctcctcaccagacttccagacgactacatcatgctgcccacagacctgcgctgccactgccatcgccatccatcgcattccaccgacagactgctgcttctagtgatctgtactcacctcggaggtatctgggctggacacagcccctggacaatgatccagacagctggctgcccctcaagggacctgttaccttcagcgagacccatttcctccccaatcccagagactttttgtgctcctgccacatggctgccagggctcagttgtgcctggcagccaaatcgagtctctcattttctcttgtggaccagttagttttgcccagaatccatttctcttctgaatttgcagcattttctcaggtgctttttgatcaacaaaataacttgtatcttctgcttaactcctttatactacctggagaaaagtattttccatattttcaataaatgtcagacactattgagaaagaaatagagtctgaatgaatatggcacctttccctccctggtcctgtaaatgtggtccatatcttgttcagaagcgatatcccctgccattcagtgactgatgttgactcctgcattataaaacatctaagatagagtcctgtggtaacctgggggatagtgtccccactggtgatccttctgtcccagatgttgaatcctctaaaccagttaggattatcccaagcctcttagtaaatgaatcgttacctcattttggtcaacactatgtgagaagtcagccagcaggctcttggaaaatgtatcctcatttccagaaagtggtttgaaaacacaattcccaaattgttacaaaccataaatcccacacagattattggtgaacagctgtaaaattttactcaacccatgattcagggaaccaacagaattatataggtgcttttcaaaagcatttataaattcttgattatgtaggtagtggggggaaatgcagaaatgagatcattaatttagatacaaacctggttgatgaccagggggttttattttgcagaagaattgggtatttggtatcattttattcaattacatgtgatcctggtacatttcataagcttgggtaaaaaaattttttgttattttccatgcacaataagggaaatgttttaattggctttgtgcctcctgctttacaacagttctggcctcaagttaccaggtagcctgaactttgattttattttaccattaaattgctttaataccattgtatttggtgaagtttta

SEQ ID NO: 365533 - DNA, 160 bp, Homo sapiens
cggggaatcgtgtgccaggcactgttcctacctttaaactttataccaccctatgaatagtagatactattatcaatcttattttaagatgagaaaactgaggctcagaaaggttaaataactttccaagattacacagcaaggtcaaggactgatagct

SEQ ID NO: 365534 - DNA, 308 bp, Homo sapiens
ggattggagtcattgagtctctccttaaaggaaataattgacagaattgtctggttagccctttactggctaaagatcttcccttaggaagagggctgttttaggattgagaaaagtggccaggcacagtggctcatgcctgtaatcccagcaccctgggaggccaaggtgggagggtcacttgtgcccaggagttctagaccagcctgggaaacagcaagaccctgtatctaccaaaaaaataaaagtgacctttagtcactcactttgggaggccaaggtgggtggatcacttgagtttgagacca

SEQ ID NO: 365535 - DNA, 511 bp, Homo sapiens
tgaaaatgggtagtagaagtatgatgatattatttcgtggtaatgaatttacctttatgacagatcattatccccttctgtagctgaactggatgaaggacaagtctagcagaataacctggtagtacttggatttattggctttaaatttttaagctggaaaaatgcagtagcagccaggttatctctgtatgaatgttgcagaggaggacagagatgaaggaagtcacattttctttctagtaatggtagaaagcaggtgatgatgacagtcttttaacgaaacatgaatgcagttgctcatatgctttgccattttagtgcacaagtcaaggagtaaatgagtagaaaaaaatccataagatatcatcatcatcaataataaaaaattgcttaaggtctcattgagtgttacaccataggaaagagcaaagatttctttttaaaatgagttagacgagacttccctctcaggtgtgtataatccaggttcatgctttaaaggctatat

SEQ ID NO: 365536 - DNA, 561 bp, Homo sapiens
taccaagtaactggttcttgaccatcattaatactagcgtctcatttcctgtgggtggcgtgggctctggtggtgtgcttaggaaccagtcattcatatagaactgaagaaaatctgttctgaattctaagacagattttccaacaaacttttggatcaataccaagttttaagttgtcagttccctataaagccctaggggtgcctagcttagctaaagggaaagaattcaaggtttctgtgggtgaagtaagacagggaacttcaggggaactccagaaagaatttcctgggaaataaaattgcatcacggctcacctgcctgagctgcttagagtgttcatgcttctactaaagaagccttcttctctctgcagccccacattttaaatacgaacagtataataacaaactccaccaagaagagctgatcattcaccacacaatgtgatttctaattgcttgaataataccgtatgatggaataatttcctacccagtaaaaatgatttctttttttttcagagtgataatatcctgttaaaatataatgccattcta

SEQ ID NO: 365537 - DNA, 985 bp, Homo sapiens
acccagaagaatgtagaactttcataacagaaagaaaagattttaggcatctattttaccatctcagaggaagatagctgcagttgtgtaaaacagtgaaggaagactttgaaagagcagaatcgtgaggaatgatgccagtgccatttgctgaaaatgaaagcaggaacttggaccagaagttttagaatcctgaatttatcaaagaaatgtgaaggctgaggcttacagagatcgaagagtagaggatgcattgaggccacagttgaaggaaagaagcctggatttccactgaatttgggctaaatttccactattcttcttcctcttccttaagattctgctcattgggttacccaccaacccaggaaacagacttatctccttatcctcaagttgctgaaggcaggaagaatgagcaaggttttgctcaaggaagagctattgtaacaaaataattgtaattagtctgatagtgcagggaaagaaactccatttcttctgaggaattcggggcattatttgcatttgaaaaagcaatctcattagagcagtatgttatattataagacattttgcagaaaaatgtttgagaagaaccatagcagtctcttgcatgtgcatgtgtgcccacacacagacacacacacactctgaattttccacttaaaagtacatatacttcaattaaaaagcaatttgaaaagtaatataaattgatcaggggatgttcctaaatttaaagagggaaagacttgtagaggtttaaaaataaaaggacttggggttggaggaacaggcattagggaaagctatatggcaaggttaaaagaattgtggaattaatgctatttaaaaataattgcattagaaatctagctaatgggaattagtccatttcattgacttagatagttataaaattaattcctttttgtgggaattttaattgggtggctacaaccagatgcacatgaggaatccc

SEQ ID NO: 365538 - DNA, 750 bp, Homo sapiens
acccagaagaatgtagaactttcataacagaaagaaaagattttaggcatctattttaccatctcagaggaagatagctgcagttgtgtaaaacagatttatttattcaaaaatcaactatttatggaatacctactttgtcttgagccctgatgtgagagctggagatcccaagatgaataagacaccgtcgctactctcaaggaactcacagcccagtgaaagacacagagaagaaactagacagttgtagttgtatcagacacctgtagttgccatctacctttccagaaattgtcctttcccacctacacagtcacaaaaggcaatatgattctaccctcactttcccaagatgattggtccctcaggaagcagttgactcatgagtattctacattgttattgaagtgatgattcttctgaccagtgaagcagggtcatatttcctgcatttagaattttatttggttcccagcaagacaatagcagttagagtgaataactcagtaatgggagcactgattgaaaaagaaagatgagaagaacctctgggacttgaacaagatttaatctctattgttctcaaagaaaactggtctgcataaaagagctcaaactgaattgttctaaactggaggggaaggggacttctaaacagcctattatttgagattatccagattatataacttaattccagatacttaggaatcattttattttcaataaattctatcttttcatctt

SEQ ID NO: 365539 - DNA, 847 bp, Homo sapiens
cccatctccagaatttctgattccgggaagcctgggatggggcctgagaacttctcacaagtttccaggtgatggtgatgttgtggtcccagagctacacttggagaatcactcctttatgctaaactttaaggaatacccaaaagctgctctagaactgaccttacaggaaacttgcctctggtgctgctggcctatagaaattcactttaatgctgttgtctctgctgcttggactgataccatttctgattcaggagctagacctataccactgggacacgactaaaagtcttacagcaatgagaatggaacctcgtttctttacactgctctattctgaattgaagttgcatttgagtgtgtttgattggaggaggctgggtcacatgcctgcattctggttttaagggagattggggatttgtatttgacttctattttgggaagctgaaactcataaaatggaaatttctttaaatgtaagaagactatgcaaaggattgatagacagccatggatatggcagttgtcaactatagcagtactactgaaagtaacctgtccacaaactgtttttaatggtcttctagggcacaaggaacctgaaccagaatataaatccatgtactgctttcttcattgaaaaatgtcagtagaactaagcaatgtgcttagtgtcttagtttattttacgttgtggcacaaactccttatctcattcttagaccagtaacagtctgcataccaaacttagagtaataaatcaatatcaacctccaccaagatttcaggtgatataccaagggtctcttaggcctaaccaataactttgtttaaaaaaaaa

SEQ ID NO: 365540 - DNA, 823 bp, Homo sapiens
ggagttgctgataaagctcctaaggtgaaaacaaaatgtcacattcctctgctttctaaagggtgtcacagagactggacacatggtcccataggactcactagatgtgagagtcacagagccacttgatccttggcccctatagatataaaaaccatgtaaggaggttctgatccagaggagatgggcctcatgctcctgggatgaagcccctaccctgcccctacaggggtgggggacttgggcaccaaggaatgagatattggggagatctgaaagcatgggagcttggcatctccatctccagcaaaaccacaggcccacttcacagctgtcacctggagttcttgggagaacttaatgtttgttccttaaaatgtgttccctgtagtgtggaggtggaaagtggtaaaggatcgaacagagaggggtgcccccaactgtctggagatttcagaagggagggggctgctgctggattagtccctagcagcagagtggagatctctaagggtctgcatttgtgttatccctgggaaggaaaggataggaccactccatctgttttccttgacatcagagatcacaagtcaggatttcagtggttcctggatagggtgtccttataattgattgtccaaacagggaccctgagaatgaaggggaagctaatcagatgggaagctcagattgtgctctaaaacccagatgtatgttcaccctgtacctggagctcctgggaaggaggacaagtgggcaggagccataaggctgtgtcaatggctgctctgccaaactcaccttgagactggttagaggcaag

SEQ ID NO: 365541 - DNA, 294 bp, Homo sapiens
agagataaggtctcactatgttgcctaggttggtctcgaactcctggcctcaaacagtcttcctgccgcagcctcccaaagtgttgggattacaggcatgagccaccatacccggccagtgtcttattaatattagagtgctagatctgacgatacaggcctgaaggtaggagagaaggaggaaggtggcagagggatgatcttctgatggggaatctccagagctgaggtcacaaatggggagactgagtcccactggcagataggtcatgtgcagacatgctgctgttttgt

SEQ ID NO: 365542 - DNA, 401 bp, Homo sapiens
gttaccatggatggaagggagccagatgctattcatcaagacaatgagaaaaagtcccccaaagtatttcagagatctttgaggctgcccctcttgtcacagacccagagctatagggggaccagcccaggatgccttccatgggcttgctgcaaagagacacttgggtctcttcttcccacatttcaggacagtgctcctcagccaccccagttgctgtggcccaagtgaccgcaggtgtggctcaatctgcagcttcagaagatacaagctgtaaacattagtggtatccatatgctgctaattctaaaggcatacagagtgcaagagctgtgagggcatgacttcctcctcctagatttgaaaggatgtctcagacagcctggagatccaggcagaga

SEQ ID NO: 365543 - DNA, 469 bp, Homo sapiens
ttggatgttttgacgggttattgcaatcttttctgaaattgaatttcagtttgcttcaatagcatttcccagtaaataggagtgactctggtatctcgtttgtgaatcttgatgtaataatcggaggtaattgaagcgtgcacaaaccacagagacttatgacatgtttttaaacaaggattgactgatacgaaactaattgaacaaaagctggaaatcagattcctccaagaaaccttgcacagaatacagggtctttcataatggcactgagtttgactttaaaagtggcgtgttcaagtttccttattttcctgaaggagtttaggagtaagttactgacaggcaaggttgtgacccaatgaccagagttaatcatctggcgactggaattaatcttttgtctgtcctgtggtttggattaaccagggtcggtcatcccctcatgccttggtggcccctatgaatt

SEQ ID NO: 365544 - DNA, 2283 bp, Homo sapiens
ctctccgcccccaccccctgtcggcgtctgggcctcgtccccttctctctgtctcccttgcctcccccatcacgtcccctgacaccgacaccccattgctcccacagtctccccagtctccactttggtccccagcgctgtctgcccgaggatttgcctgaaggctgcccccaactctgcacccgccccccgagggccaccgaggaccatgactaagacagatcctgccccgatggccccgccaccccgaggagaggaggaagaagaggaggaggaggatgaacccgtccccgaggcccccagccccacccaggagcgccggcagaagcctgttgtgcacccctcggcacctgcccccctccctaaggactacgctttcaccttcttcgatcccaatgacccggcgtgccaggagatcctgtttgaccctcagaccaccatccccgagctgtttgccattgtgcgccagtgggtgccccaagtccagcacaagatagacgtcatcggcaatgagattctgcgccgaggctgccatgtgaacgatcgtgacgggctgaccgacatgacactgctccactatgcgtgcaaagctggggcccacggagtcggggaccccgcggcagccgtgcgcctctcgcagcagctgctggcgctgggcgcagatgtgacgctgcgcagccgctggaccaacatgaacgcgcttcactacgcggcctattttgatgtgcccgacctcgtgcgtgtgctgctgaagggtgcgaggccgcgagtggtgaactccacgtgcagtgacttcaaccacggctcagccctgcacatcgctgcttccagcctgtgcctgggcgccgccaaatgtttgctggagcacggcgccaaccctgcgctgaggaatcgaaaaggacaggtgccggcggaggtggtcccagatcctatggacatgtccctggacaaggcagaggcggcactggtggccaaggagctgcggacgcttctggaagaggcagtgccactatcttgcgccctccccaaggtcacgctacccaactatgacaacgtcccaggcaatctcatgcttagcgcactgggcttgcgcctgggagaccgcgtgctgctggatggccagaagacgggcacactgcggttctgtgggaccacggagtttgccagcggccagtgggtgggcgtggagctggacgaacctgagggcaagaacgatggcagcgttgggggcgttcggtacttcatctgccctcccaagcagggtctctttgcctccgtgtccaagatctccaaggcagtggacgcacccccctcctctgtcacctccacaccccggaccccccggatggacttctcccgtgtcaccggcaaaggccgcagggaacacaaaggcaagaagaagaccccatcatccccatctctgggcagcttgcagcagcgtgacggggccaaggctgaggttggagaccaggtccttgtcgcgggccagaagcaggggatcgtgcgcttctacgggaagacagactttgccccaggttactggtatggcattgagctggaccagcccacaggcaagcatgatggctctgtcttcggtgtccggtacttcacttgccccccgaggcatggggtcttcgcaccagcatcccgtattcagaggattggcggatccactgattcccccggggacagcgttggagccaaaaaagtgcatcaagtgacaatgacgcagcccaaacgcaccttcaccacagtccggaccccaaaggacattgcatcagagaactccatttccaggttgctgttctgctgctggttcccctggatgctgagggcggagatgcagtcttagaggccctggacacctgacaaagagacagagtccccactagcatctcctgacacccgaggagccctgagtcaccctgagatagagattcccagtaacacatccagagtagagacccctgttagccagccctcgatcattgaggccccattattaacagatactcccataataacccccaaatacagaccccatgtcacccagaaagagattccctgagtagcaccttcaggctagtccctatccccaacccctcagagcagattcccagattaacagatttccatatcaccccaaatgatggtgaccctctccacataatgcattacaacagaacattcttgaatcacccaaccctggatcagaaacctccccattaacaaacactgccccttaagtcctcttgaaataaacataggtcacacccccaaagc

SEQ ID NO: 365545 - DNA, 3447 bp, Homo sapiens
ctctccgcccccaccccctgtcggcgtctgggcctcgtccccttctctctgtctcccttgcctcccccatcacgtcccctgacaccgacaccccattgctcccacagtctccccagtctccactttggtccccagcgctgtctgcccgagatccagttgcgcggaggccacccggggccctggaagctcctaggggcttggaccctggagcctgccgggcaccctctccagctgacctctgcctccaggatttgcctgaaggctgcccccaactctgcacccgccccccgagggccaccgaggaccatgactaagacagatcctgccccgatggccccgccaccccgaggagaggaggaagaagaggaggaggaggatgaacccgtccccgaggcccccagccccacccaggagcgccggcagaagcctgttgtgcacccctcggcacctgcccccctccctaaggactacgctttcaccttcttcgatcccaatgacccggcgtgccaggagatcctgtttgaccctcagaccaccatccccgagctgtttgccattgtgcgccagtgggtgccccaagtccagcacaagatagacgtcatcggcaatgagattctgcgccgaggctgccatgtgaacgatcgtgacgggctgaccgacatgacactgctccactatgcgtgcaaagctggggcccacggagtcggggaccccgcggcagccgtgcgcctctcgcagcagctgctggcgctgggcgcagatgtgacgctgcgcagccgctggaccaacatgaacgcgcttcactacgcggcctattttgatgtgcccgacctcgtgcgtgtgctgctgaagggtgcgaggccgcgagtggtgaactccacgtgcagtgacttcaaccacggctcagccctgcacatcgctgcttccagcctgtgcctgggcgccgccaaatgtttgctggagcacggcgccaaccctgcgctgaggaatcgaaaaggacaggtgccggcggaggtggtcccagatcctatggacatgtccctggacaaggcagaggcggcactggtggccaaggagctgcggacgcttctggaagaggcagtgccactatcttgcgccctccccaaggtcacgctacccaactatgacaacgtcccaggcaatctcatgcttagcgcactgggcttgcgcctgggagaccgcgtgctgctggatggccagaagacgggcacactgcggttctgtgggaccacggagtttgccagcggccagtgggtgggcgtggagctggacgaacctgagggcaagaacgatggcagcgttgggggcgttcggtacttcatctgccctcccaagcagggtctctttgcctccgtgtccaagatctccaaggcagtggacgcacccccctcctctgtcacctccacaccccggaccccccggatggacttctcccgtgtcaccggcaaaggccgcagggaacacaaaggcaagaagaagaccccatcatccccatctctgggcagcttgcagcagcgtgacggggccaaggctgaggttggagaccaggtccttgtcgcgggccagaagcaggggatcgtgcgcttctacgggaagacagactttgccccaggttactggtatggcattgagctggaccagcccacaggcaagcatgatggctctgtcttcggtgtccggtacttcacttgccccccgaggcatggggtcttcgcaccagcatcccgtattcagaggattggcggatccactgattcccccggggacagcgttggagccaaaaaagtgcatcaagtgacaatgacgcagcccaaacgcaccttcaccacagtccggaccccaaaggacattgcatcagagaactccatttccaggttgctgttctgctgctggttcccctggatgctgagggcggagatgcagtcttagaggccctggacacctgacaaagagacagagtccccactagcatctcctgacacccgaggagccctgagtcaccctgagatagagattcccagtaacacatccagagtagagacccctgttagccagccctcgatcattgaggccccattattaacagatactcccataataacccccaaatacagaccccatgtcacccagaaagagattccctgagtagcaccttcaggctagtccctatccccaacccctcagagcagattcccagattaacagatttccatatcaccccaaatgatggtgaccctctccacataatgcattacaacagaacattcttgaatcacccaaccctggatcagaaacctccccattaacaaacactgccccttaagtcctcttgaaataaacataggtcacacccccaaagcaaaagagtaacagacattcatgtcattgttccccatttaacatcagtcctctcaagatgtcgtgaccccatggtcaccctgaagcccttagattccaacccctcaatcagagacttccttcattaacaaagacccttgttcttatccctcaagaagaaacccaccataaccagcccactgtcacccctaatttacagacaccaaaacagtcctggaagtgctaattacaggaccccccaagtcttcctaccctctgcaccctcaagaaacccccagtgccttgtatgaagcccaccccacatggcccacagctcctgtgctggccagactcccagaaaattctctattttttaagtaacgacttccccctttgggggaccccaaaatttggaggccccattctaggactctggggatcccaaaccctagagtacacacgtcccaaactcccctgtgccctcaagtcctacagcccctagaagaccccaatgccgtaactcctaggacccccaaatcatggaatcccaaatccccagggaatcccaaatttgaaaatccaatcccaagtccccaggaaacccaatcatgaggtccttgtgcctggtatggaggagactgcagtcaggatatgcattccaggctcccagacacctcaagccctattcacaggcaccaggaaaccccacacaggaattcccatccctggaaactggagaatttcaatgccccgagtccatgggtttcaagacaccaaattccaagagccccagccctaagggaaccccaaatcctaaagcctccatctctaataaatggaaggccccaaggccctgaggggatctcaaatcctggaaccccgatttcaatctacgttctagtcactggcctcaaaggaccccacagcacctgggccagaccaacagctcgagggagaacctgaaggcccagggggtccagggcggacctggggccccgaccaccaaggacagctcacgactgccccttcactgcatgtccccaaactcagcatgactcctgtcctcttcaataaagacgtttctatggc

SEQ ID NO: 365546 - DNA, 3475 bp, Homo sapiens
ccttcttgttgtcgttgttcggtggggtggtgttcggtgtgtctgtctgttgttgtcttgttgtggggtagttacaagaaccaggacttctggctttatttatttttgctctggagattcagccaaacttcactcatactctcacagggcaacagtgggtgaggtcagtagcagtccccctggacatgcagactccaaggtactgcactctctgtcaggcttttgtttcagggggtggagtttgctgctatatgggaattgcctgatcttccaacttttcaagacacactgggcatcgagatttttatgtgaacccacctgagtttgaaacctcatgctggccacacagaaaatgcctgtgggttgactgtggcccatgtgccaccagcttgagaccctgcattagaggctctaaaaggcaaagacctacagctcccctactgaggctggaaggagggggtcagttgcgtggggtgaccttggacctcttgccaccccagctttcaccttcttcgatcccaatgacccggcgtgccaggagatcctgtttgaccctcagaccaccatccccgagctgtttgccattgtgcgccagtgggtgccccaagtccagcacaagatagacgtcatcggcaatgagattctgcgccgaggctgccatgtgaacgatcgtgacgggctgaccgacatgacactgctccactatgcgtgcaaagctggggcccacggagtcggggaccccgcggcagccgtgcgcctctcgcagcagctgctggcgctgggcgcagatgtgacgctgcgcagccgctggaccaacatgaacgcgcttcactacgcggcctattttgatgtgcccgacctcgtgcgtgtgctgctgaagggtgcgaggccgcgagtggtgaactccacgtgcagtgacttcaaccacggctcagccctgcacatcgctgcttccagcctgtgcctgggcgccgccaaatgtttgctggagcacggcgccaaccctgcgctgaggaatcgaaaaggacaggtgccggcggaggtggtcccagatcctatggacatgtccctggacaaggcagaggcggcactggtggccaaggagctgcggacgcttctggaagaggcagtgccactatcttgcgccctccccaaggtcacgctacccaactatgacaacgtcccaggcaatctcatgcttagcgcactgggcttgcgcctgggagaccgcgtgctgctggatggccagaagacgggcacactgcggttctgtgggaccacggagtttgccagcggccagtgggtgggcgtggagctggacgaacctgagggcaagaacgatggcagcgttgggggcgttcggtacttcatctgccctcccaagcagggtctctttgcctccgtgtccaagatctccaaggcagtggacgcacccccctcctctgtcacctccacaccccggaccccccggatggacttctcccgtgtcaccggcaaaggccgcagggaacacaaaggcaagaagaagaccccatcatccccatctctgggcagcttgcagcagcgtgacggggccaaggctgaggttggagaccaggtccttgtcgcgggccagaagcaggggatcgtgcgcttctacgggaagacagactttgccccaggttactggtatggcattgagctggaccagcccacaggcaagcatgatggctctgtcttcggtgtccggtacttcacttgccccccgaggcatggggtcttcgcaccagcatcccgtattcagaggattggcggatccactgattcccccggggacagcgttggagccaaaaaagtgcatcaagtgacaatgacgcagcccaaacgcaccttcaccacagtccggaccccaaaggacattgcatcagagaactccatttccaggttgctgttctgctgctggttcccctggatgctgagggcggagatgcagtcttagaggccctggacacctgacaaagagacagagtccccactagcatctcctgacacccgaggagccctgagtcaccctgagatagagattcccagtaacacatccagagtagagacccctgttagccagccctcgatcattgaggccccattattaacagatactcccataataacccccaaatacagaccccatgtcacccagaaagagattccctgagtagcaccttcaggctagtccctatccccaacccctcagagcagattcccagattaacagatttccatatcaccccaaatgatggtgaccctctccacataatgcattacaacagaacattcttgaatcacccaaccctggatcagaaacctccccattaacaaacactgccccttaagtcctcttgaaataaacataggtcacacccccaaagcaaaagagtaacagacattcatgtcattgttccccatttaacatcagtcctctcaagatgtcgtgaccccatggtcaccctgaagcccttagattccaacccctcaatcagagacttccttcattaacaaagacccttgttcttatccctcaagaagaaacccaccataaccagcccactgtcacccctaatttacagacaccaaaacagtcctggaagtgctaattacaggaccccccaagtcttcctaccctctgcaccctcaagaaacccccagtgccttgtatgaagcccaccccacatggcccacagctcctgtgctggccagactcccagaaaattctctattttttaagtaacgacttccccctttgggggaccccaaaatttggaggccccattctaggactctggggatcccaaaccctagagtacacacgtcccaaactcccctgtgccctcaagtcctacagcccctagaagaccccaatgccgtaactcctaggacccccaaatcatggaatcccaaatccccagggaatcccaaatttgaaaatccaatcccaagtccccaggaaacccaatcatgaggtccttgtgcctggtatggaggagactgcagtcaggatatgcattccaggctcccagacacctcaagccctattcacaggcaccaggaaaccccacacaggaattcccatccctggaaactggagaatttcaatgccccgagtccatgggtttcaagacaccaaattccaagagccccagccctaagggaaccccaaatcctaaagcctccatctctaataaatggaaggccccaaggccctgaggggatctcaaatcctggaaccccgatttcaatctacgttctagtcactggcctcaaaggaccccacagcacctgggccagaccaacagctcgagggagaacctgaaggcccagggggtccagggcggacctggggccccgaccaccaaggacagctcacgactgccccttcactgcatgtccccaaactcagcatgactcctgtcctcttcaataaagacgtttctatggc

SEQ ID NO: 365547 - DNA, 1479 bp, Homo sapiens
  misc_feature (34)..(34): n is a, c, g, or t
  misc_feature (37)..(37): n is a, c, g, or t
  misc_feature (59)..(59): n is a, c, g, or t
gccccagtgtctagaatggggctccaactttggnggncattctaggactctggggatcncaaaccctagagtacacacgtcccaaactcccctgtgccctcaagtcctacagcccctagaagacccaatgccgtaacagatactcccataataacccccaaatacagaccccatgtcacccagaaagagattccctgagtagcaccttcaggctagtccctatccccaacccctcagagcagattcccagattaacagatttccatatcaccccaaatgatggtgaccctctccacataatgcattacaacagaacattcttgaatcacccaaccctggatcagaaacctccccattaacaaacactgccccttaagtcctcttgaaataaacataggtcacacccccaaagcaaaagagtaacagacattcatgtcattgttccccatttaacatcagtcctctcaagatgtcgtgaccccatggtcaccctgaagcccttagattccaacccctcaatcagagacttccttcattaacaaagacccttgttcttatccctcaagaagaaacccaccataaccagcccactgtcacccctaatttacagacaccaaaacagtcctggaagtgctaattacaggaccccccaagtcttcctaccctctgcaccctcaagaaacccccagtgccttgtatgaagcccaccccacatggcccacagctcctgtgctggccagactcccagaaaattctctattttttaagtaacgacttccccctttgggggaccccaaaatttggaggccccattctaggactctggggatcccaaaccctagagtacacacgtcccaaactcccctgtgccctcaagtcctacagcccctagaagaccccaatgccgtaactcctaggacccccaaatcatggaatcccaaatccccagggaatcccaaatttgaaaatccaatcccaagtccccaggaaacccaatcatgaggtccttgtgcctggtatggaggagactgcagtcaggatatgcattccaggctcccagacacctcaagccctattcacaggcaccaggaaaccccacacaggaattcccatccctggaaactggagaatttcaatgccccgagtccatgggtttcaagacaccaaattccaagagccccagccctaagggaaccccaaatcctaaagcctccatctctaataaatggaaggccccaaggccctgaggggatctcaaatcctggaaccccgatttcaatctacgttctagtcactggcctcaaaggaccccacagcacctgggccagaccaacagctcgagggagaacctgaaggcccagggggtccagggcggacctggggccccgaccaccaaggacagctcacgactgccccttcactgcatgtccccaaactcagcatgactcctgtcctcttcaataaagacgtttctatggc

SEQ ID NO: 365548 - DNA, 2323 bp, Homo sapiens
ctctccgcccccaccccctgtcggcgtctgggcctcgtccccttctctctgtctcccttgcctcccccatcacgtcccctgacaccgacaccccattgctcccacagtctccccagtctccactttggtccccagcgctgtctgcccgaggatttgcctgaaggctgcccccaactctgcacccgccccccgagggccaccgaggaccatgactaagacagatcctgccccgatggccccgccaccccgaggagaggaggaagaagaggaggaggaggatgaacccgtccccgaggcccccagccccacccaggagcgccggcagaagcctgttgtgcacccctcggcacctgcccccctccctaaggactacgctttcaccttcttcgatcccaatgacccggcgtgccaggagatcctgtttgaccctcagaccaccatccccgagctgtttgccattgtgcgccagtgggtgccccaagtccagcacaagatagacgtcatcggcaatgagattctgcgccgaggctgccatgtgaacgatcgtgacgggctgaccgacatgacactgctccactatgcgtgcaaagctggggcccacggagtcggggaccccgcggcagccgtgcgcctctcgcagcagctgctggcgctgggcgcagatgtgacgctgcgcagccgctggaccaacatgaacgcgcttcactacgcggcctattttgatgtgcccgacctcgtgcgtgtgctgctgaagggtgcgaggccgcgagtggtgaactccacgtgcagtgacttcaaccacggctcagccctgcacatcgctgcttccagcctgtgcctgggcgccgccaaatgtttgctggagcacggcgccaaccctgcgctgaggaatcgaaaaggacaggtgccggcggaggtggtcccagatcctatggacatgtccctggacaaggcagaggcggcactggtggccaaggagctgcggacgcttctggaagaggcagtgccactatcttgcgccctccccaaggtcacgctacccaactatgacaacgtcccaggcaatctcatgcttagcgcactgggcttgcgcctgggagaccgcgtgctgctggatggccagaagacgggcacactgcggttctgtgggaccacggagtttgccagcggccagtgggtgggcgtggagctggacgaacctgagggcaagaacgatggcagcgttgggggcgttcggtacttcatctgccctcccaagcagggtctctttgcctccgtgtccaagatctccaaggcagtggacgcacccccctcctctgtcacctccacaccccggaccccccggatggacttctcccgtgtcaccggcaaaggccgcagggaacacaaaggcaagaagaagaccccatcatccccatctctgggcagcttgcagcagcgtgacggggccaaggctgaggttggagaccaggtccttgtcgcgggccagaagcaggggatcgtgcgcttctacgggaagacagactttgccccaggttactggtatggcattgagctggaccagcccacaggcaagcatgatggctctgtcttcggtgtccggtacttcacttgccccccgaggcatggggtcttcgcaccagcatcccgtattcagaggattggcggatccactgattcccccggggacagcgttggagccaaaaaagtgcatcaagtgacaatgacgcagcccaaacgcaccttcaccacagtccggaccccaaaggacattgcatcagagaactccatttccaggttgctgttctgctgctggttcccctggatgctgagggcggagatgcagtcttagaggccctggacacctgacaaagagacagagtccccactagcatctcctgacacccgaggagccctgagtcaccctgagatagagattcccagtaacacatccagagtagagacccctgttagccagccctcgatcattgaggccccattattaacagatactcccataataacccccaaatacagaccccatgtcacccagaaagagattccctgagtagcaccttcaggctagtccctatccccaacccctcagagcagattcccagattaacagatttccatatcaccccaaatgatggtgaccctctccacataatgcattacaacagaacattcttgaatcacgttgacagctttctcttgaagatgtagcttcattgctctttaaagtgtcaactccaaattctataactagataaagtcattcttgagaaaagaagacttattcagataaaagaaagcttcaaac

SEQ ID NO: 365549 - DNA, 3349 bp, Homo sapiens
ctctccgcccccaccccctgtcggcgtctgggcctcgtccccttctctctgtctcccttgcctcccccatcacgtcccctgacaccgacaccccattgctcccacagtctccccagtctccactttggtccccagcgctgtctgcccgaggatttgcctgaaggctgcccccaactctgcacccgccccccgagggccaccgaggaccatgactaagacagatcctgccccgatggccccgccaccccgaggagaggaggaagaagaggaggaggaggatgaacccgtccccgaggcccccagccccacccaggagcgccggcagaagcctgttgtgcacccctcggcacctgcccccctccctaaggactacgctttcaccttcttcgatcccaatgacccggcgtgccaggagatcctgtttgaccctcagaccaccatccccgagctgtttgccattgtgcgccagtgggtgccccaagtccagcacaagatagacgtcatcggcaatgagattctgcgccgaggctgccatgtgaacgatcgtgacgggctgaccgacatgacactgctccactatgcgtgcaaagctggggcccacggagtcggggaccccgcggcagccgtgcgcctctcgcagcagctgctggcgctgggcgcagatgtgacgctgcgcagccgctggaccaacatgaacgcgcttcactacgcggcctattttgatgtgcccgacctcgtgcgtgtgctgctgaagggtgcgaggccgcgagtggtgaactccacgtgcagtgacttcaaccacggctcagccctgcacatcgctgcttccagcctgtgcctgggcgccgccaaatgtttgctggagcacggcgccaaccctgcgctgaggaatcgaaaaggacaggtgccggcggaggtggtcccagatcctatggacatgtccctggacaaggcagaggcggcactggtggccaaggagctgcggacgcttctggaagaggcagtgccactatcttgcgccctccccaaggtcacgctacccaactatgacaacgtcccaggcaatctcatgcttagcgcactgggcttgcgcctgggagaccgcgtgctgctggatggccagaagacgggcacactgcggttctgtgggaccacggagtttgccagcggccagtgggtgggcgtggagctggacgaacctgagggcaagaacgatggcagcgttgggggcgttcggtacttcatctgccctcccaagcagggtctctttgcctccgtgtccaagatctccaaggcagtggacgcacccccctcctctgtcacctccacaccccggaccccccggatggacttctcccgtgtcaccggcaaaggccgcagggaacacaaaggcaagaagaagaccccatcatccccatctctgggcagcttgcagcagcgtgacggggccaaggctgaggttggagaccaggtccttgtcgcgggccagaagcaggggatcgtgcgcttctacgggaagacagactttgccccaggttactggtatggcattgagctggaccagcccacaggcaagcatgatggctctgtcttcggtgtccggtacttcacttgccccccgaggcatggggtcttcgcaccagcatcccgtattcagaggattggcggatccactgattcccccggggacagcgttggagccaaaaaagtgcatcaagtgacaatgacgcagcccaaacgcaccttcaccacagtccggaccccaaaggacattgcatcagagaactccatttccaggttgctgttctgctgctggttcccctggatgctgagggcggagatgcagtcttagaggccctggacacctgacaaagagacagagtccccactagcatctcctgacacccgaggagccctgagtcaccctgagatagagattcccagtaacacatccagagtagagacccctgttagccagccctcgatcattgaggccccattattaacagatactcccataataacccccaaatacagaccccatgtcacccagaaagagattccctgagtagcaccttcaggctagtccctatccccaacccctcagagcagattcccagattaacagatttccatatcaccccaaatgatggtgaccctctccacataatgcattacaacagaacattcttgaatcacccaaccctggatcagaaacctccccattaacaaacactgccccttaagtcctcttgaaataaacataggtcacacccccaaagcaaaagagtaacagacattcatgtcattgttccccatttaacatcagtcctctcaagatgtcgtgaccccatggtcaccctgaagcccttagattccaacccctcaatcagagacttccttcattaacaaagacccttgttcttatccctcaagaagaaacccaccataaccagcccactgtcacccctaatttacagacaccaaaacagtcctggaagtgctaattacaggaccccccaagtcttcctaccctctgcaccctcaagaaacccccagtgccttgtatgaagcccaccccacatggcccacagctcctgtgctggccagactcccagaaaattctctattttttaagtaacgacttccccctttgggggaccccaaaatttggaggccccattctaggactctggggatcccaaaccctagagtacacacgtcccaaactcccctgtgccctcaagtcctacagcccctagaagaccccaatgccgtaactcctaggacccccaaatcatggaatcccaaatccccagggaatcccaaatttgaaaatccaatcccaagtccccaggaaacccaatcatgaggtccttgtgcctggtatggaggagactgcagtcaggatatgcattccaggctcccagacacctcaagccctattcacaggcaccaggaaaccccacacaggaattcccatccctggaaactggagaatttcaatgccccgagtccatgggtttcaagacaccaaattccaagagccccagccctaagggaaccccaaatcctaaagcctccatctctaataaatggaaggccccaaggccctgaggggatctcaaatcctggaaccccgatttcaatctacgttctagtcactggcctcaaaggaccccacagcacctgggccagaccaacagctcgagggagaacctgaaggcccagggggtccagggcggacctggggccccgaccaccaaggacagctcacgactgccccttcactgcatgtccccaaactcagcatgactcctgtcctcttcaataaagacgtttctatggc

SEQ ID NO: 365550 - DNA, 3753 bp, Homo sapiens
ctctccgcccccaccccctgtcggcgtctgggcctcgtccccttctctctgtctcccttgcctcccccatcacgtcccctgacaccgacaccccattgctcccacagtctccccagtctccactttggtccccagcgctgtctgcccgaggatttgcctgaaggctgcccccaactctgcacccgccccccgagggccaccgaggaccatgactaagacagatcctgccccgatggccccgccaccccgaggagaggaggaagaagaggaggaggaggatgaacccgtccccgaggcccccagccccacccaggagcgccggcagaagcctgttgtgcacccctcggcacctgcccccctccctaaggactacgctttcaccttcttcgatcccaatgacccggcgtgccaggagatcctgtttgaccctcagaccaccatccccgagctgtttgccattgtgcgccagtgggtgccccaagtccagcacaagatagacgtcatcggcaatgagattctgcgccgaggctgccatgtgaacgatcgtgacgggctgaccgacatgacactgctccactatgcgtgcaaagctggggcccacggagtcggggaccccgcggcagccgtgcgcctctcgcagcagctgctggcgctgggcgcagatgtgacgctgcgcagccgctggaccaacatgaacgcgcttcactacgcggcctattttgatgtgcccgacctcgtgcgtgtgctgctgaagggtgcgaggccgcgagtggtgaactccacgtgcagtgacttcaaccacggctcagccctgcacatcgctgcttccagcctgtgcctgggcgccgccaaatgtttgctggagcacggcgccaaccctgcgctgaggaatcgaaaaggacaggtgccggcggaggtggtcccagatcctatggacatgtccctggacaaggcagaggcggcactggtggccaaggagctgcggacgcttctggaagaggcagtgccactatcttgcgccctccccaaggtcacgctacccaactatgacaacgtcccaggcaatctcatgcttagcgcactgggcttgcgcctgggagaccgcgtgctgctggatggccagaagacgggcacactgcggttctgtgggaccacggagtttgccagcggccagtgggtgggcgtggagctggacgaacctgagggcaagaacgatggcagcgttgggggcgttcggtacttcatctgccctcccaagcagggtctctttgcctccgtgtccaagatctccaaggcagtggacgcacccccctcctctgtcacctccacaccccggaccccccggatggacttctcccgtgtcaccggcaaaggccgcagggaacacaaaggcaagaagaagaccccatcatccccatctctgggcagcttgcagcagcgtgacggggccaaggctgaggttggagaccaggtccttgtcgcgggccagaagcaggggatcgtgcgcttctacgggaagacagactttgccccaggttactggtatggcattgagctggaccagcccacaggcaagcatgatggctctgtcttcggtgtccggtacttcacttgccccccgaggcatggggtcttcgcaccagcatcccgtattcagaggattggcggatccactgattcccccggggacagcgttggagccaaaaaagtgcatcaagtgacaatgacgcagcccaaacgcaccttcaccacagtccggaccccaaaggacattgcatcagagaactccatttccaggttgctgttctgctgctggttcccctggatgctgagggcggagatgcagtcttagaggccctggacacctgacaaagagacagagtccccactagcatctcctgacacccgaggagccctgagtcaccctgagatagagattcccagtaacacatccagagtagagacccctgttagccagccctcgatcattgaggccccattattaacagatactcccataataacccccaaatacagaccccatgtcacccagaaagagattccctgagtagcaccttcaggctagtccctatccccaacccctcagagcagattcccagattaacagatttccatatcaccccaaatgatggtgaccctctccacataatgcattacaacagaacattcttgaatcacccaaccctggatcagaaacctccccattaacaaacactgccccttaagtcctcttgaaataaacataggtcacacccccaaagcaaaagagtaacagacattcatgtcattgttccccatttaacatcagtcctctcaagatgtcgtgaccccatggtcaccctgaagcccttagattccaacccctcaatcagagacttccttcattaacaaagacccttgttcttatccctcaagaagaaacccaccataaccagcccactgtcacccctaatttacagacaccaaaacagtcctggaagtgctaattacaggaccccccaagtcttcctaccctctgcaccctcaagaaacccccagtgccttgtatgaagcccaccccacatggcccacagctcctgtgctggccagactcccagaaaattctctattttttaagtaacgacttccccctttgggggaccccaaaatttggaggccccattctaggactctggggatcccaaaccctagagtacacacgtcccaaactcccctgtgccctcaagtcctacagcccctagaagaccccaatgccgtaactcctaggacccccaaatcatggaatcccaaatccccagggaatcccaaatttgaaaatccaatcccaagtccccaggaaacccaatcatgaggtccttgtgcctggtatggaggagactgcagtcaggatatgcattccaggctcccagacacctcaagccctattcacaggcaccaggaaaccccacacaggaattcccatccctggaaactggagaatttcaatgccccgagtccatgggtttcaagacaccaaattccaagagccccagccctaagggaaccccaaatcctaaagcctccatctctaataaatggaaggccccaaggccctgaggggatctcaaatcctggaaccccgatttcaatctacgttctagtcactggcctcaaaggaccccacagcacctgggccagaccaacagctcgagggagaacctgaaggcccagggggtccagggcggacctggggccccgaccaccaaggacagctcacgactgccccttcactgcatgtccccaaactcagcatgactcctgtcctcttcaataaagacgtttctatggcaaaaaaaaaaacaaaaaaaaaaaaaaaaaaaaaaaaaaaaaaaaatgacagaaaaacaaaagaaacagaaaaataacatagaaaaacaaaaaaaggggagcggggcgacccgaaaaaaggaaccccaccgagggggaggacaacacacatggacacgacagccaccgaccgacgtatggtaggaaacaaagagggcgcccacaacaaagaacgaggcgaccgaagaattaaaaagaaacaaaggagcagcgcaggcacgcagcgccaaacaaaacacgagcgagagggaggtggaaaccgaacagaacacgactacggcgaagacactaactagtgagcgaaaagaccagccaccccccccgtcggggggggcgagccaacatagtgagggacagcgaaaccat

SEQ ID NO: 365551 - DNA, 1178 bp, Homo sapiens
ctctccgcccccaccccctgtcggcgtctgggcctcgtccccttctctctgtctcccttgcctcccccatcacgtcccctgacaccgacaccccattgctcccacagtctccccagtctccactttggtccccagcgctgtctgcccgaggatttgcctgaaggctgcccccaactctgcacccgccccccgagggccaccgaggaccatgactaagacagatcctgccccgatggccccgccaccccgaggagaggaggaagaagaggaggaggaggatgaacccgtccccgaggcccccagccccacccaggagcgccggcagaagcctgttgtgcacccctcggcacctgcccccctccctaaggactacgctttcaccttcttcgatcccaatgacccggcgtgccaggagatcctgtttgaccctcagaccaccatccccgagctgtttgccattgtgcgccagtgggtgccccaagtccagcacaagatagacgtcatcggcaatgagattctgcgccgaggctgccatgtgaacgatcgtgacgggctgaccgacatgacactgctccactatgcgtgcaaagctggggcccacggagtcggggaccccgcggcagccgtgcgcctctcgcagcagctgctggcgctgggcgcagatgtgacgctgcgcagccgctggaccaacatgaacgcgcttcactacgcggcctattttgatgtgcccgacctcgtgcgtgtgctgctgaagggtgcgaggccgcgagtggtgaactccacgtgcagtgacttcaaccacggctcagccctgcacatcgctgcttccagcctgtgcctgggcgccgccaaatgtttgctggagcacggcgccaaccctgcgctgaggaatcgaaaaggacaggtgccggcggaggtggtcccagatcctatggacatgtccctggacaaggcagaggcggcactggtggccaaggagctgcggacgcttctggaagaggcagtgccactatcttgcgccctccccaaggtcacgctacccaactatgacaacgtcccaggcaatctcatgcttagcgcactgggcttgcgcctgggagaccgcgtgctgctggatggccagaaggtcaggggctgggatgtgtgtttgcatggtgggtgggggtgggactcagccc

SEQ ID NO: 365552 - DNA, 427 bp, Homo sapiens
cataagcaagaatatgaaacctttcatttgacaatagaagttaaaacattttgtgttcccatagtaaatattgtgattgggaagaactatttgactccttgagaagattatagagtttttcaattcgactgtttccttgagaataaggaaagaaattcattattacaactgaaaatgaatgaatgaagatccagggtaaatgtattctggaaataatatttcatggaagatactccccctttattctaagcactgccaaaaatgatttgatgctgaatgtaacattcagggcaaaataataagatcaaaaggggtgtattatagttatattaagctagtctgatcctttgaaatctgtgtaaaaggcctgacaaagcagtaatttttacatatggaaatgtatttataataaaagcatacggataat

SEQ ID NO: 365553 - DNA, 631 bp, Homo sapiens
ccatatacccaccctctagcacacatgtagtaaggagcttcgcttgtgttgcttgcttaaaaaaattatttgaagatctaatgtattcacatgatttttaaataaaaacacgaagtctttctaactttccttaccttttctttcttctttcttttccaagacacaggatattactgtttcccagggcactggaattacaggcctgagccactgtgcttggtacaagattaaggacttctagggagaggcagaggaggaacgggtcttgctctgtcacccaggctgaagtgcagtggtacaatcatggctcactgcagccttcacatcccaggcttaagtgatcctcctctcgagtcggggtcttgcgggccaggcaccgtggctcgtgcctgtcatctcagctctttgggaggcttagtcagtggatcacttgaggctacaggccccatgcaagtgcaaaaccaagcagaacggtcaggacatcttcaaagctccaaaatactcacctttggccaggcatggcgactcaagtctgtaatgtcagctctttgtgaggctgagatgtacggatcacttgagctcaggagttggataccagcctgggcaaggtgatgaaaccccatctctacga

SEQ ID NO: 365554 - DNA, 472 bp, Homo sapiens
caaaaaaaatctgaatttccacaatacattgagcatcaagggctcagatagggattgtggcccaaatttcaaatcaactaggaaaaagtgaattatgaaataggtactattaactatcactttagaagaacatgttggaggcatttttttacttcacacacttttggtaacttaaatatttaaatataataataaaagttatagaagataatatagttggagtcataaagtctaaaaggaaatgggtctttctaagtctaatatggatagaattaatgaaatgaatgtctggaactatacctcaaaaaggaactttaataacatcaaaagcaacaatatactgagaaaatatttgcaatgtgacaataagttaatatgcttaatatgtgaagtgcactttcagacagattttcaaaatcattcataaaaagataaaaaccaaggaaagtaagagcaaagaaagtaaacatac

SEQ ID NO: 365555 - DNA, 334 bp, Homo sapiens
ttgtctggctcttagtgttttctgcacagaagttatgtgtgcttcttttatccatgatttattgctcaaaacaagtgagatgccaagtctagtatcagtggggtggggaagtaaaatcttcccaacagaaaggggcagtgtgtgtttgtaaataaagatacactcccacagagagagtgtgagtaactttccctagccagtgagctggtacgtggaagagctgggagtctgaactcaagcagaacagtgtctgactcccatgatgaattaaaatggattttgagaggttcccatgaaattcatggaggttttgtgtgtgtgtgtccggattact

SEQ ID NO: 365556 - DNA, 361 bp, Homo sapiens
gagatggagtctctgtcacccaggttagagtgcaatagtgtaatctgggctcactgctacgtctgcctctcgggttcaagcaattctcctgcctcagcctcccaagtagctgggattacaggtgcacaccaccacacctggctaatttttgtatttttagtacagatggggtttcaccatgttggccaggctggtctcgaactcctgacctcaggtgatctgcctacctcagcctcccaaagtgctgggattacaggtgtgagctaccacacctggccacaaatttcttcttcttataaggacacgagttagggtggaataagcctcatccaacagctttattttaccttagtcacctctt

SEQ ID NO: 365557 - DNA, 180 bp, Homo sapiens
gaggaaaagagaaagagaaagggtacaaagagcttatgtgaagaaacaatatctgacatctttccaaatctgaggaagaaaatggacatctaaattcagtaagcttaatggttcaaactagggtgaatccacagaggcccacagctagacacattataatcaaaatgttgaaagtgaaaa

SEQ ID NO: 365558 - DNA, 444 bp, Homo sapiens
tgagacaagagtctcgctttgttgccaggctggagtgcaggagcacaatctcagctcactgcaagcttgtgatccgcccgtctcagccttccaaagtgctgggattataggcgtgagccaccgcgcctggcctaacatcgtattgtcttatgtactcaagtgccagcaaaccattttgctagcaccatagcagtaatgtagtaagagctatatgctgcaatatacttgatcagttctgaacatcttgctttaatactttgtggtattacagttcaaaagcacgttcaaagtttatacttgttctaacagctataatattactaattaggaacaatataaatagaataattacctctttggatgtgcctattaagtcaaatactaattttttagtcccatctcctagctgttcaaagtgtttttctttgatatttatttaattaa

SEQ ID NO: 365559 - DNA, 1115 bp, Homo sapiens
agaggaagagagagagagagctcatgagccaggatccctggggaatttgaagtcagtgtgaccagggttctgtggctctggggtcagagctgggacacaggacccagcaggagggccaccaccccttccttttggaaacagctctggttccaagcagcaatcaggtaggaggatcggggctttggctgatgatgcacacacaagatgctgatggtgtacggtgagatattgtgaacgcaacaactggagctgtagttggcgtgtgtgagtgtgtacctgcggttctgtttagtggcgagacaaggtatgtttcagtactgctttcacggcaactgtgtaatgcatatgctctttctacactagcggtttgctcagttttgtctgtccggttaagttggagaaagaaccaagttgtgttgttctctggagggggtgctgctgcctctccttgagtagttctgtgacccccaatccagctgttttgtagagaatccttctagcttctggtatgcctgctctccagcagctggaaacagatcttcctgcctgaccaaagctccttgtttcttgcgtggcatgtttgttcttcccgatccggtggctgtcgtagccgagggcctgcctgccaccttcctttatcatttgccctgttggggttcagggtgcatccttagcccaggacctgctcttccagcatcatgggttttttcctaaagatctcaacggctcccttgggctccataaaatatttcttttttaaaaaagcagactcctttcatgcattgggatgaacggccctcttgtctgggtgctgggctacagcaaacaaatgtgtttgaatcccagtattccagagattcctggcggtgggctgtctagaagaggcgaggctggatctcacggtttttaaactgtatttttacccctttgggacccatacctgtgccctggagtctttcatgaggcacgtgggtcctctgcatcctcactctcccccctagcccaggtgcagccccgggaggggtgccctgaccccgccttaaacaaccaactttcccaccgaatcccatctggcgggcggggggggggggtttgggtgccaagtgccctggaaa

SEQ ID NO: 365560 - DNA, 725 bp, Homo sapiens
  misc_feature (10)..(10): n is a, c, g, or t
  misc_feature (20)..(20): n is a, c, g, or t
tcagttgtcncccgggttanggatagtcgaccagccccgggggtgctgctgcctctccttgagtagttctgtgacccccaatccagctgttttgtagagaatccttctagcttctggtatgcctgctctccagcagctggaaacagatcttcctgcctgaccaaagctccttgtttcttgcgtggcatgtttgttcttcccgatccggtggctgtcgtagccgagggcctgcctgccaccttcctttatcatttgccctgttggggttcagggtgcatccttagcccaggacctgctcttccagcatcatgggttttttcctaaagatctcaacggctcccttgggctccataaaatatttcttttttaaaaaagcagactcctttcatgcattgggatgaacggccctcttgtctgggtgctgggctacagcaaacaaatgtgtttgaatcccagtattccagagattcctggcggtgggctgtctagaagaggcgaggctggatctcacggtttttaaactgtatttttacccctttgggacccatacctgtgccctggagtctttcatgaggcacgtgggtcctctgcatcctcactctcccccctagcccaggtgcagccccgggaggggtgccctgaccccgccttaaacaaccaactttcccaccgaatcccatctggcgggcggggggggggggtttgggtgccaagtgccctggaaa

SEQ ID NO: 365561 - DNA, 5213 bp, Homo sapiens
  misc_feature (5212)..(5212): n is a, c, g, or t
gctgttggctgggctcgggagggaacgctccaggtaaagcgctgggggaggaagcgacgccgaggagctacggtttcctccagaggtctccgcccctctgcccctatattcccagagctcgagtctgatccgggccttgccgggcaccctggaaaggcgggggtgatagtacagatggagacgcaactgcagagcattttcgaagaggtggtgaaaacggaagttatagaagaggcttttcctggcatgtttatggatactcctgaagatgagaaaacaaaactaattagctgtttgggggccttcagacagttttggggtggtctttctcaggagtctcatgaacagtgtatccagtggattgttaagtttattcatggtcagcatagtcctaaaagaatttcttttctttatgactgcttagcaatggcagttgagactggtctccttccacccaggctggtttgtgaatccctgataaactctgacactcttgagtgggaaagaacacagctttgggccttaacatttaaactggttcggaaaataattgggggagtggattacaagggtgttcgagatctcttaaaagtgattttggagaagattttgacaattcctaatacagtgagctctgctgttgtacagcagcttctggcagcaagagaggttatagcatatatcttggaaagaaatgcctgcttattaccagcctattttgcagtcactgagatcaggaaactgtatcctgaaggcaaacttccacactggttacttggaaacctagtatcagactttgtggataccttcaggcccacagcaaggataaactccatttgtggtcgctgtagtcttctgccagttgtaaataattcgggtgccatttgtaattcatggaaactggatcctgctactcttcgttttcctttgaaaggccttttgccatatgataaggatctgtttgaaccacagactgctttgttgagatatgtattggagcagccttattccagggatatggtctgcaatatgctaggtttaaataagcagcacaagcagcgctgccctgtgctggaggaccagttggtggatctggttgtttatgccatggagcgatctgagaccgaggagaagtttgacgatgggggaacaagccaactcctgtggcagcatctctcaagtcagctcattttctttgtgcttttccagtttgcaagttttccacatatggtgctttctcttcatcagaagttagcagggcgaggactgattaaaggcagagatcatcttatgtgggttctcctgcaattcatttctggaagtattcagaaaaatgcactagctgattttctccctgtgatgaagctcttcgacttgctatacccagaaaaagaatatatcccagttcctgatattaacaaaccccagtcaacccatgcctttgcaatgacctgtatttggattcatctcaatagaaaagctcaaaatgacaactccaagctacagattccaatacctcattccctaagacttcaccatgagttcctgcagcagagtctaagaaataaaagtttacagatgaatgactataagattgctctattgtgtaatgcatactctacaaattcagaatgttttacattacccatgggagctctggtagaaactatttatggaaatggaattatgaggatacctctccctggaacaaactgtatggcttcaggatctattacccccttacctatgaacctcctggattcactgacagttcatgccaaaatgagccttattcacagcattgcaaccagggtgataaaacttgctcatgcaaagtccagtgtggccttggctccagccctagtggaaacttacagtcgtttattggtctatatggaaatagagtctttgggcatcaaaggatttatcagtcagcttttgccaactgttttcaaatcacatgcatgggggatcttacacacactccttgagatgtttagctaccggatgcatcatattcagcctcattacagagttcagctcctgagtcatcttcatactttggctgcagttgcacaaacaaaccagaaccagctccatctttgtgtcgagagcactgctctcaggcttataacagcattaggtagctcagaggtacaaccgcagtttacacgcttccttagtgatcccaaaacagtgctctcagcagaatctgaagaactgaaccgagccttgatattgaccttggctagagcaactcatgtaacagatttttttacaggctctgattcaattcagggaacttggtgtaaagacatacttcagaccatcatgagtttcactcctcataattgggcttcacacaccctgagctgttttccaggcccactacaggcattcttcaaacaaaataatgtgcctcaggaaagccgttttaatctgaaaaaaaatgtggaggaggagtataggaagtggaagtcaatgagcaacgaaaacgacattattacccacttctctatgcagggctcccctcctctctttctttgtcttctctggaaaatgctcttggaaacagatcatattaatcagattggctatagagtattagagagaattggagccagggccttggtagcccatgtgaggacatttgcagatttcctggtatatgagttttctacatcagcagggggtcagcaactcaataaatgcattgaaattcttaatgacatggtatggaagtataacattgttacactggacagattaattctctgcctggccatgcgtagtcacgaaggaaatgaagcccaggtttgttatttcataattcagttgctgttactcaaaccaaacgattttagaaatcgagtaagtgactttgtgaaggaaaattccccagagcactggttacagaatgactggcacaccaagcacatgaattatcacaagaaatatccagagaagttgtattttgagggcctcgcggaacaggtggatcctcctgtacagatccagtctccctatctgcccatctattttgggaatgtgtgtcttcgattccttccagtatttgatatagtaatccacagatttttagagttgcttccggtatccaaatcactggagactctactggatcatctaggaggcttatataaatttcatgatcgtccagtgacttatctgtataacactctgcactattatgaaatgcacctgagagaccgcgcatttctcaaacgaaaactcgtccatgcgatcattggctctctgaaggataatcgaccgcagggctggtgtctaagtgacacttacctgaaatgcgctatgaatgcacgagaggaaaatccttgggttccagatgacacctactattgcagattgattggcagactagtcgatacgatggctggcaaatctcctggtccctttccaaactgtgactggagattcaatgagtttcccaacccagctgcccatgctctccatgttacttgtgtggagctcatggccttggcagtttcaggcaaagaagttgggaatgcccttctaaatgttgtcctaaaaagtcagcctttagtgccaagagagaacattacagcatggatgaatgcaattggtttgatcatcactgccctaccagagccatattggattgttcttcatgatcgaattgtgagtgtcatcagcagccccagcttgacgtctgaaacagagtgggttggctatccattccgcctctttgatttcactgcctgtcatcagtcctactctgagatgagttgtagctatacgttagctcttgcacatgctgtgtggcaccattctagcatcggacaactttctctcattccaaagtttcttactgaagtacttcttcctatagtgaagaccgaattccagttgctttatgtataccatcttgttggaccatttttacaaagatttcagcaagagagaactcgttgtatgatagagattggtgtggcgttttatgacatgctgctgaatgttgaccagtgtagcacccatttaaattacatggatcccatctgtgacttcctctatcacatgaagtatatgtttactggtgacagcgtgaaagagcaagtagagaagattatctgtaacttaaaaccagctttaaaacttcgtcttcgattcatcacacacattagcaagatggagccagctgcagtgcctccacaagccatgaacagtgggtctccagcacctcagtctaatcaggtgcccgtgtctttaccagtaactcagtgaagccagactgtactgtggagaaagtagaaatatatccgtctttgagagtggactcaaaccttttaaatctgaatgcgatcacactgtagtgatatagtagaagcagtgatgatattcagattgttttattttgattcaaatgatgaatctgttgacaccttataactcccatctccctatctatatttttgtctctaagagatcaagtaagatacatgttgttcatattcataacaacttattagagctatgtaggaacatagaggtatctgtgatcaaatgacttgtcattggcactttcagtctttcctattctagccgttgtttttgtttgtattttttattattaatgacatatttagtcttcagatatattattttaaaggcaccacacatgtaaaacagttattacaaatattttatacataaatctcttggtagattttcagaataatagagatttatatcaagaaaaggaatctagattttgttgcattgtaggagcaaacaaggcttcatattctttttaaaatgacttgaaattttattataaatttccatagtttctatcaaggtcaactggcagttttattacctttgctatggacttgaacttactgtataaaattagttggaagccatgtaagaaaataacatctgaaaattcttgaacttaaaatcatgcttaaatggttgattctccaatttctttttttaaaaataagttaattgcttttgcaggttgacactctcacctgacagatgatgtaattcttcaatttttataatcttaaaatttttaaattttatatttgtaaatacagtacacattttatttcttggattttgagagacattgttaattttgggggaattggcattgcgaaagacttgaaaactaatgagtaaagtctgctgaatgaataaaccnt

SEQ ID NO: 365562 - DNA, 2817 bp, Homo sapiens
gctgttggctgggctcgggagggaacgctccaggtaaagcgctgggggaggaagcgacgccgaggagctacggtttcctccagaggtctccgcccctctgcccctatattcccagagctcgagtctgatccgggccttgccgggcaccctggaaaggcgggggtgatagtacagatggagacgcaactgcagagcattttcgaagaggtggtgaaaacggaagttatagaagaggcttttcctggcatgtttatggatactcctgaagatgagaaaacaaaactaattagctgtttgggggccttcagacagttttggggtggtctttctcaggagtctcatgaacagtgtatccagtggattgttaagtttattcatggtcagcatagtcctaaaagaatttcttttctttatgactgcttagcaatggcagttgagactggtctccttccacccaggctggtttgtgaatccctgataaactctgacactcttgagtgggaaagaacacagctttgggccttaacatttaaactggttcggaaaataattgggggagtggattacaagggtgttcgagatctcttaaaagtgattttggagaagattttgacaattcctaatacagtgagctctgctgttgtacagcagcttctggcagcaagagaggttatagcatatatcttggaaagaaatgcctgcttattaccagcctattttgcagtcactgagatcaggaaactgtatcctgaaggcaaacttccacactggttacttggaaacctagtatcagactttgtggataccttcaggcccacagcaaggataaactccatttgtggtcgctgtagtcttctgccagttgtaaataattcgggtgccatttgtaattcatggaaactggatcctgctactcttcgttttcctttgaaaggccttttgccatatgataaggatctgtttgaaccacagactgctttgttgagatatgtattggagcagccttattccagggatatggtctgcaatatgctaggtttaaataagcagcacaagcagcgctgccctgtgctggaggaccagttggtggatctggttgtttatgccatggagcgatctgagaccgaggagaagtttgacgatgggggaacaagccaactcctgtggcagcatctctcaagtcagctcattttctttgtgcttttccagtttgcaagttttccacatatggtgctttctcttcatcagaagttagcagggcgaggactgattaaaggcagagatcatcttatgtgggttctcctgcaattcatttctggaagtattcagaaaaatgcactagctgattttctccctgtgatgaagctcttcgacttgctatacccagaaaaagaatatatcccagttcctgatattaacaaaccccagtcaacccatgcctttgcaatgacctgtatttggattcatctcaatagaaaagctcaaaatgacaactccaagctacagattccaatacctcattccctaagacttcaccatgagttcctgcagcagagtctaagaaataaaagtttacagatgaatgactataagattgctctattgtgtaatgcatactctacaaattcagaatgttttacattacccatgggagctctggtagaaactatttatggaaatggaattatgaggatacctctccctggaacaaactgtatggcttcaggatctattacccccttacctatgaacctcctggattcactgacagttcatgccaaaatgagccttattcacagcattgcaaccagggtgataaaacttgctcatgcaaagtccagtgtggccttggctccagccctagtggaaacttacagtcgtttattggtctatatggaaatagagtctttgggcatcaaaggatttatcagtcagcttttgccaactgttttcaaatcacatgcatgggggatcttacacacactccttgagatgtttagctaccggatgcatcatattcagcctcattacagagttcagctcctgagtcatcttcatactttggctgcagttgcacaaacaaaccagaaccagctccatctttgtgtcgagagcactgctctcaggcttataacagcattaggtagctcagaggtacaaccgcagtttacacgcttccttagtgatcccaaaacagtgctctcagcagaatctgaagaactgaaccgagccttgatattgaccttggctagagcaactcatgtaacagatttttttacaggctctgattcaattcagggaacttggtgtaaagacatacttcagaccatcatgagtttcactcctcataattgggcttcacacaccctgagctgttttccaggcccactacaggcattcttcaaacaaaataatgtgcctcaggaaagccgttttaatctgaaaaaaaatgtggaggaggagtataggaagtggaagtcaatgagcaacgaaaacgacattattacccacttctctatgcagggctcccctcctctctttctttgtcttctctggaaaatgctcttggaaacagatcatattaatcagattggctatagagtattagagagaattggagccagggccttggtagcccatgtgaggacatttgcagatttcctggtatatgagttttctacatcagcagggggtcagcaactcaataaatgcattgaaattcttaatgacatggtatggaagtataacattgttacactggacagattaattctctgcctggtaagaataaatacatttctaagcttattctcttag

SEQ ID NO: 365563 - DNA, 823 bp, Homo sapiens
catgcgcttagctccacaacttctttctccatgtggatatagcatttttccaacttgcatatgatgatgccattctactatgcattgccctttgtcaaattgaaacaatgatgtccatagtggaagtcaaaagttaatgggaagtcggttttgtaggaaacctgaaaacattttttcatgaagcttatcctgtataataatataacatgatgcagctttaatagactaaatctaaccttgacttcttaagttcaacttcattccgtgcttctcagcctcttgttacaattaatgcccattaactggtaacttctgaaactaaccgagaggcttttggaatactgtatttaatctctgccctcacaagcagcgctgccctgtgctggaggaccagttggtggatctggttgtttatgccatggagcgatctgagaccgaggagaagtttgacgatgggggaacaagccaactcctgtggcagcatctctcaagtcagctcattttctttgtgcttttccagtttgcaagttttccacatatggtgctttctcttcatcagaaggtatgtactaaatcttatggtcggagtgacttcacctgttgattactgtattttagactgctgtgggcattccctagtgattttagaactgacagaagttctgagccctaatttctgtcctgtttagtgcttttatagtttcttaactttttactttcttgtcacctgtaaaaacaggattcagtcattcattctatgtattctcagtgcaggcaccagcagatacaagatgaaaaggcactgtatatcctcaaggagcac

SEQ ID NO: 365564 - DNA, 5567 bp, Homo sapiens
  misc_feature (5566)..(5566): n is a, c, g, or t
gctgttggctgggctcgggagggaacgctccaggtaaagcgctgggggaggaagcgacgccgaggagctacggtttcctccagaggtctccgcccctctgcccctatattcccagagctcgagtctgatccgggccttgccgggcaccctggaaaggcgggggtgatagtacagatggagacgcaactgcagagcattttcgaagaggtggtgaaaacggaagttatagaagaggcttttcctggcatgtttatggatactcctgaagatgagaaaacaaaactaattagctgtttgggggccttcagacagttttggggtggtctttctcaggagtctcatgaacagtgtatccagtggattgttaagtttattcatggtcagcatagtcctaaaagaatttcttttctttatgactgcttagcaatggcagttgagactggtctccttccacccaggctggtttgtgaatccctgataaactctgacactcttgagtgggaaagaacacagctttgggccttaacatttaaactggttcggaaaataattgggggagtggattacaagggtgttcgagatctcttaaaagtgattttggagaagattttgacaattcctaatacagtgagctctgctgttgtacagcagcttctggcagcaagagaggttatagcatatatcttggaaagaaatgcctgcttattaccagcctattttgcagtcactgagatcaggaaactgtatcctgaaggcaaacttccacactggttacttggaaacctagtatcagactttgtggataccttcaggcccacagcaaggataaactccatttgtggtcgctgtagtcttctgccagttgtaaataattcgggtgccatttgtaattcatggaaactggatcctgctactcttcgttttcctttgaaaggccttttgccatatgataaggatctgtttgaaccacagactgctttgttgagatatgtattggagcagccttattccagggatatggtctgcaatatgctaggtttaaataagcagcacaagcagcgctgccctgtgctggaggaccagttggtggatctggttgtttatgccatggagcgatctgagaccgaggagaagtttgacgatgggggaacaagccaactcctgtggcagcatctctcaagtcagctcattttctttgtgcttttccagtttgcaagttttccacatatggtgctttctcttcatcagaagttagcagggcgaggactgattaaaggcagagatcatcttatgtgggttctcctgcaattcatttctggaagtattcagaaaaatgcactagctgattttctccctgtgatgaagctcttcgacttgctatacccagaaaaagaatatatcccagttcctgatattaacaaaccccagtcaacccatgcctttgcaatgacctgtatttggattcatctcaatagaaaagctcaaaatgacaactccaagctacagattccaatacctcattccctaagacttcaccatgagttcctgcagcagagtctaagaaataaaagtttacagatgaatgactataagattgctctattgtgtaatgcatactctacaaattcagaatgttttacattacccatgggagctctggtagaaactatttatggaaatggaattatgaggatacctctccctggaacaaactgtatggcttcaggatctattacccccttacctatgaacctcctggattcactgacagttcatgccaaaatgagccttattcacagcattgcaaccagggtgataaaacttgctcatgcaaagtccagtgtggccttggctccagccctagtggaaacttacagtcgtttattggtctatatggaaatagagtctttgggcatcaaaggatttatcagtcagcttttgccaactgttttcaaatcacatgcatgggggatcttacacacactccttgagatgtttagctaccggatgcatcatattcagcctcattacagagttcagctcctgagtcatcttcatactttggctgcagttgcacaaacaaaccagaaccagctccatctttgtgtcgagagcactgctctcaggcttataacagcattaggtagctcagaggtacaaccgcagtttacacgcttccttagtgatcccaaaacagtgctctcagcagaatctgaagaactgaaccgagccttgatattgaccttggctagagcaactcatgtaacagatttttttacaggctctgattcaattcagggaacttggtgtaaagacatacttcagaccatcatgagtttcactcctcataattgggcttcacacaccctgagctgttttccaggcccactacaggcattcttcaaacaaaataatgtgcctcaggaaagccgttttaatctgaaaaaaaatgtggaggaggagtataggaagtggaagtcaatgagcaacgaaaacgacattattacccacttctctatgcagggctcccctcctctctttctttgtcttctctggaaaatgctcttggaaacagatcatattaatcagattggctatagagtattagagagaattggagccagggccttggtagcccatgtgaggacatttgcagatttcctggtatatgagttttctacatcagcagggggtcagcaactcaataaatgcattgaaattcttaatgacatggtatggaagtataacattgttacactggacagattaattctctgcctggccatgcgtagtcacgaaggaaatgaagcccaggtttgttatttcataattcagttgctgttactcaaaccaaacgattttagaaatcgagtaagtgactttgtgaaggaaaattccccagagcactggttacagaatgactggcacaccaagcacatgaattatcacaaggtactagtcctaattggtatttcaaatagtccttttaaagccatacttgagtatttgatgaagtgatttggccgttttctctctggttctaatgttttttctcttgtctatatagaagtaagttagctctctgaacttcttcaaggtttgagagtttctataatgttgagaataaattgaaactgcagttttagtggacataaggacttctataaaaagaagtaaagtataatcaagtataattttaaatgtttccttgcaaaaaaaaatctaaacaatgttttcacatttagctcttttaagagaattttttaaaaaatgctctaaccatttatcatcttctcaattccacagaaatatccagagaagttgtattttgagggcctcgcggaacaggtggatcctcctgtacagatccagtctccctatctgcccatctattttgggaatgtgtgtcttcgattccttccagtatttgatatagtaatccacagatttttagagttgcttccggtatccaaatcactggagactctactggatcatctaggaggcttatataaatttcatgatcgtccagtgacttatctgtataacactctgcactattatgaaatgcacctgagagaccgcgcatttctcaaacgaaaactcgtccatgcgatcattggctctctgaaggataatcgaccgcagggctggtgtctaagtgacacttacctgaaatgcgctatgaatgcacgagaggaaaatccttgggttccagatgacacctactattgcagattgattggcagactagtcgatacgatggctggcaaatctcctggtccctttccaaactgtgactggagattcaatgagtttcccaacccagctgcccatgctctccatgttacttgtgtggagctcatggccttggcagtttcaggcaaagaagttgggaatgcccttctaaatgttgtcctaaaaagtcagcctttagtgccaagagagaacattacagcatggatgaatgcaattggtttgatcatcactgccctaccagagccatattggattgttcttcatgatcgaattgtgagtgtcatcagcagccccagcttgacgtctgaaacagagtgggttggctatccattccgcctctttgatttcactgcctgtcatcagtcctactctgagatgagttgtagctatacgttagctcttgcacatgctgtgtggcaccattctagcatcggacaactttctctcattccaaagtttcttactgaagtacttcttcctatagtgaagaccgaattccagttgctttatgtataccatcttgttggaccatttttacaaagatttcagcaagagagaactcgttgtatgatagagattggtgtggcgttttatgacatgctgctgaatgttgaccagtgtagcacccatttaaattacatggatcccatctgtgacttcctctatcacatgaagtatatgtttactggtgacagcgtgaaagagcaagtagagaagattatctgtaacttaaaaccagctttaaaacttcgtcttcgattcatcacacacattagcaagatggagccagctgcagtgcctccacaagccatgaacagtgggtctccagcacctcagtctaatcaggtgcccgtgtctttaccagtaactcagtgaagccagactgtactgtggagaaagtagaaatatatccgtctttgagagtggactcaaaccttttaaatctgaatgcgatcacactgtagtgatatagtagaagcagtgatgatattcagattgttttattttgattcaaatgatgaatctgttgacaccttataactcccatctccctatctatatttttgtctctaagagatcaagtaagatacatgttgttcatattcataacaacttattagagctatgtaggaacatagaggtatctgtgatcaaatgacttgtcattggcactttcagtctttcctattctagccgttgtttttgtttgtattttttattattaatgacatatttagtcttcagatatattattttaaaggcaccacacatgtaaaacagttattacaaatattttatacataaatctcttggtagattttcagaataatagagatttatatcaagaaaaggaatctagattttgttgcattgtaggagcaaacaaggcttcatattctttttaaaatgacttgaaattttattataaatttccatagtttctatcaaggtcaactggcagttttattacctttgctatggacttgaacttactgtataaaattagttggaagccatgtaagaaaataacatctgaaaattcttgaacttaaaatcatgcttaaatggttgattctccaatttctttttttaaaaataagttaattgcttttgcaggttgacactctcacctgacagatgatgtaattcttcaatttttataatcttaaaatttttaaattttatatttgtaaatacagtacacattttatttcttggattttgagagacattgttaattttgggggaattggcattgcgaaagacttgaaaactaatgagtaaagtctgctgaatgaataaaccnt

SEQ ID NO: 365565 - DNA, 5159 bp, Homo sapiens
  misc_feature (5158)..(5158): n is a, c, g, or t
gctgttggctgggctcgggagggaacgctccaggtaaagcgctgggggaggaagcgacgccgaggagctacggtttcctccagaggtctccgcccctctgcccctatattcccagagctcgagtctgatccgggccttgccgggcaccctggaaaggcgggggtgatagtacagatggagacgcaactgcagagcattttcgaagaggtggtgaaaacggaagttatagaagaggcttttcctggcatgtttatggatactcctgaagatgagaaaacaaaactaattagctgtttgggggccttcagacagttttggggtggtctttctcaggagtctcatgaacagtgtatccagtggattgttaagtttattcatggtcagcatagtcctaaaagaatttcttttctttatgactgcttagcaatggcagttgagactggtctccttccacccaggctggtttgtgaatccctgataaactctgacactcttgagtgggaaagaacacagctttgggccttaacatttaaactggttcggaaaataattgggggagtggattacaagggtgttcgagatctcttaaaagtgattttggagaagattttgacaattcctaatacagtgagctctgctgttgtacagcagcttctggcagcaagagaggttatagcatatatcttggaaagaaatgcctgcttattaccagcctattttgcagtcactgagatcaggaaactgtatcctgaaggcaaacttccacactggttacttggaaacctagtatcagactttgtggataccttcaggcccacagcaaggataaactccatttgtggtcgctgtagtcttctgccagttgtaaataattcgggtgccatttgtaattcatggaaactggatcctgctactcttcgttttcctttgaaaggccttttgccatatgataaggatctgtttgaaccacagactgctttgttgagatatgtattggagcagccttattccagggatatggtctgcaatatgctaggtttaaataagcagcacaagcagcgctgccctgtgctggaggaccagttggtggatctggttgtttatgccatggagcgatctgagaccgaggagaagtttgacgatgggggaacaagccaactcctgtggcagcatctctcaagtcagctcattttctttgtgcttttccagtttgcaagttttccacatatggtgctttctcttcatcagaagttagcagggcgaggactgattaaaggcagagatcatcttatgtgggttctcctgcaattcatttctggaagtattcagaaaaatgcactagctgattttctccctgtgatgaagctcttcgacttgctatacccagaaaaagaatatatcccagttcctgatattaacaaaccccagtcaacccatgcctttgcaatgacctgtatttggattcatctcaatagaaaagctcaaaatgacaactccaagctacagattccaatacctcattccctaagacttcaccatgagttcctgcagcagagtctaagaaataaaagtttacagatgaatgactataagattgctctattgtgtaatgcatactctacaaattcagaatgttttacattacccatgggagctctggtagaaactatttatggaaatggaattatgaggatacctctccctggaacaaactgtatggcttcaggatctattacccccttacctatgaacctcctggattcactgacagttcatgccaaaatgagccttattcacagcattgcaaccagggtgataaaacttgctcatgcaaagtccagtgtggccttggctccagccctagtggaaacttacagtcgtttattggtctatatggaaatagagtctttgggcatcaaaggatttatcagtcagcttttgccaactgttttcaaatcacatgcatgggggatcttacacacactccttgagatgtttagctaccggatgcatcatattcagcctcattacagagttcagctcctgagtcatcttcatactttggctgcagttgcacaaacaaaccagaaccagctccatctttgtgtcgagagcactgctctcaggcttataacagcattaggtagctcagaggtacaaccgcagtttacacgcttccttagtgatcccttggctagagcaactcatgtaacagatttttttacaggctctgattcaattcagggaacttggtgtaaagacatacttcagaccatcatgagtttcactcctcataattgggcttcacacaccctgagctgttttccaggcccactacaggcattcttcaaacaaaataatgtgcctcaggaaagccgttttaatctgaaaaaaaatgtggaggaggagtataggaagtggaagtcaatgagcaacgaaaacgacattattacccacttctctatgcagggctcccctcctctctttctttgtcttctctggaaaatgctcttggaaacagatcatattaatcagattggctatagagtattagagagaattggagccagggccttggtagcccatgtgaggacatttgcagatttcctggtatatgagttttctacatcagcagggggtcagcaactcaataaatgcattgaaattcttaatgacatggtatggaagtataacattgttacactggacagattaattctctgcctggccatgcgtagtcacgaaggaaatgaagcccaggtttgttatttcataattcagttgctgttactcaaaccaaacgattttagaaatcgagtaagtgactttgtgaaggaaaattccccagagcactggttacagaatgactggcacaccaagcacatgaattatcacaagaaatatccagagaagttgtattttgagggcctcgcggaacaggtggatcctcctgtacagatccagtctccctatctgcccatctattttgggaatgtgtgtcttcgattccttccagtatttgatatagtaatccacagatttttagagttgcttccggtatccaaatcactggagactctactggatcatctaggaggcttatataaatttcatgatcgtccagtgacttatctgtataacactctgcactattatgaaatgcacctgagagaccgcgcatttctcaaacgaaaactcgtccatgcgatcattggctctctgaaggataatcgaccgcagggctggtgtctaagtgacacttacctgaaatgcgctatgaatgcacgagaggaaaatccttgggttccagatgacacctactattgcagattgattggcagactagtcgatacgatggctggcaaatctcctggtccctttccaaactgtgactggagattcaatgagtttcccaacccagctgcccatgctctccatgttacttgtgtggagctcatggccttggcagtttcaggcaaagaagttgggaatgcccttctaaatgttgtcctaaaaagtcagcctttagtgccaagagagaacattacagcatggatgaatgcaattggtttgatcatcactgccctaccagagccatattggattgttcttcatgatcgaattgtgagtgtcatcagcagccccagcttgacgtctgaaacagagtgggttggctatccattccgcctctttgatttcactgcctgtcatcagtcctactctgagatgagttgtagctatacgttagctcttgcacatgctgtgtggcaccattctagcatcggacaactttctctcattccaaagtttcttactgaagtacttcttcctatagtgaagaccgaattccagttgctttatgtataccatcttgttggaccatttttacaaagatttcagcaagagagaactcgttgtatgatagagattggtgtggcgttttatgacatgctgctgaatgttgaccagtgtagcacccatttaaattacatggatcccatctgtgacttcctctatcacatgaagtatatgtttactggtgacagcgtgaaagagcaagtagagaagattatctgtaacttaaaaccagctttaaaacttcgtcttcgattcatcacacacattagcaagatggagccagctgcagtgcctccacaagccatgaacagtgggtctccagcacctcagtctaatcaggtgcccgtgtctttaccagtaactcagtgaagccagactgtactgtggagaaagtagaaatatatccgtctttgagagtggactcaaaccttttaaatctgaatgcgatcacactgtagtgatatagtagaagcagtgatgatattcagattgttttattttgattcaaatgatgaatctgttgacaccttataactcccatctccctatctatatttttgtctctaagagatcaagtaagatacatgttgttcatattcataacaacttattagagctatgtaggaacatagaggtatctgtgatcaaatgacttgtcattggcactttcagtctttcctattctagccgttgtttttgtttgtattttttattattaatgacatatttagtcttcagatatattattttaaaggcaccacacatgtaaaacagttattacaaatattttatacataaatctcttggtagattttcagaataatagagatttatatcaagaaaaggaatctagattttgttgcattgtaggagcaaacaaggcttcatattctttttaaaatgacttgaaattttattataaatttccatagtttctatcaaggtcaactggcagttttattacctttgctatggacttgaacttactgtataaaattagttggaagccatgtaagaaaataacatctgaaaattcttgaacttaaaatcatgcttaaatggttgattctccaatttctttttttaaaaataagttaattgcttttgcaggttgacactctcacctgacagatgatgtaattcttcaatttttataatcttaaaatttttaaattttatatttgtaaatacagtacacattttatttcttggattttgagagacattgttaattttgggggaattggcattgcgaaagacttgaaaactaatgagtaaagtctgctgaatgaataaaccnt

SEQ ID NO: 365566 - DNA, 3305 bp, Homo sapiens
  misc_feature (3304)..(3304): n is a, c, g, or t
accgcgcctggccttcgggtagatttctttaaaaagatattgaagtaggctggaaaatgctacattgaaaaaaattctatggcggtgacatttggagtggcatagtttaacgttaaccccttagctgtggagcatagatataaaagtagttattatattttagggggaataatgtaagtctataaatcaataagatgtcaggataagatggaggtgtagaaaaaatatttctaggaaacagtgagaaatcttatctgcttaggtgatagctgtgaaagatagattaaatttttaaaagtaaagatggacatcccaggcagaaggaatggtaagccagaaataggcaagaaaggtcatatatgtttggggaatactgaacagttggtttgggatagactagacgtctaaggaaattataatagtgagattttactttgttaaaatctaggctttcagatggccctcatgattttacacaggttgaacattttcatataatttttctgttgtttttcaaaggccatgcgtagtcacgaaggaaatgaagcccaggtttgttatttcataattcagttgctgttactcaaaccaaacgattttagaaatcgagtaagtgactttgtgaaggaaaattccccagagcactggttacagaatgactggcacaccaagcacatgaattatcacaaggtactagtcctaattggtatttcaaatagtccttttaaagccatacttgagtatttgatgaagtgatttggccgttttctctctggttctaatgttttttctcttgtctatatagaagtaagttagctctctgaacttcttcaaggtttgagagtttctataatgttgagaataaattgaaactgcagttttagtggacataaggacttctataaaaagaagtaaagtataatcaagtataattttaaatgtttccttgcaaaaaaaaatctaaacaatgttttcacatttagctcttttaagagaattttttaaaaaatgctctaaccatttatcatcttctcaattccacagaaatatccagagaagttgtattttgagggcctcgcggaacaggtggatcctcctgtacagatccagtctccctatctgcccatctattttgggaatgtgtgtcttcgattccttccagtatttgatatagtaatccacagatttttagagttgcttccggtatccaaatcactggagactctactggatcatctaggaggcttatataaatttcatgatcgtccagtgacttatctgtataacactctgcactattatgaaatgcacctgagagaccgcgcatttctcaaacgaaaactcgtccatgcgatcattggctctctgaaggataatcgaccgcagggctggtgtctaagtgacacttacctgaaatgcgctatgaatgcacgagaggaaaatccttgggttccagatgacacctactattgcagattgattggcagactagtcgatacgatggctggcaaatctcctggtccctttccaaactgtgactggagattcaatgagtttcccaacccagctgcccatgctctccatgttacttgtgtggagctcatggccttggcagtttcaggcaaagaagttgggaatgcccttctaaatgttgtcctaaaaagtcagcctttagtgccaagagagaacattacagcatggatgaatgcaattggtttgatcatcactgccctaccagagccatattggattgttcttcatgatcgaattgtgagtgtcatcagcagccccagcttgacgtctgaaacagagtgggttggctatccattccgcctctttgatttcactgcctgtcatcagtcctactctgagatgagttgtagctatacgttagctcttgcacatgctgtgtggcaccattctagcatcggacaactttctctcattccaaagtttcttactgaagtacttcttcctatagtgaagaccgaattccagttgctttatgtataccatcttgttggaccatttttacaaagatttcagcaagagagaactcgttgtatgatagagattggtgtggcgttttatgacatgctgctgaatgttgaccagtgtagcacccatttaaattacatggatcccatctgtgacttcctctatcacatgaagtatatgtttactggtgacagcgtgaaagagcaagtagagaagattatctgtaacttaaaaccagctttaaaacttcgtcttcgattcatcacacacattagcaagatggagccagctgcagtgcctccacaagccatgaacagtgggtctccagcacctcagtctaatcaggtgcccgtgtctttaccagtaactcagtgaagccagactgtactgtggagaaagtagaaatatatccgtctttgagagtggactcaaaccttttaaatctgaatgcgatcacactgtagtgatatagtagaagcagtgatgatattcagattgttttattttgattcaaatgatgaatctgttgacaccttataactcccatctccctatctatatttttgtctctaagagatcaagtaagatacatgttgttcatattcataacaacttattagagctatgtaggaacatagaggtatctgtgatcaaatgacttgtcattggcactttcagtctttcctattctagccgttgtttttgtttgtattttttattattaatgacatatttagtcttcagatatattattttaaaggcaccacacatgtaaaacagttattacaaatattttatacataaatctcttggtagattttcagaataatagagatttatatcaagaaaaggaatctagattttgttgcattgtaggagcaaacaaggcttcatattctttttaaaatgacttgaaattttattataaatttccatagtttctatcaaggtcaactggcagttttattacctttgctatggacttgaacttactgtataaaattagttggaagccatgtaagaaaataacatctgaaaattcttgaacttaaaatcatgcttaaatggttgattctccaatttctttttttaaaaataagttaattgcttttgcaggttgacactctcacctgacagatgatgtaattcttcaatttttataatcttaaaatttttaaattttatatttgtaaatacagtacacattttatttcttggattttgagagacattgttaattttgggggaattggcattgcgaaagacttgaaaactaatgagtaaagtctgctgaatgaataaaccnt

SEQ ID NO: 365567 - DNA, 2787 bp, Homo sapiens
  misc_feature (2786)..(2786): n is a, c, g, or t
cacttaaaacaagattctcttcatcttgttttcaagatttcaagattcttttaaaaattagcatgaagtatgggataatgattggggaggaagtatttttaaaaagccttcttgagtttttatgcatattacatttttattcaataaaaaattccccattgttttattgaaatggattagttgtcgatcctctgaattagacatattctttaaaaataagatccgttgtcagccatctaaaatgtttttataaattcatacttacattcttttttgccggttgcagtcagcctttagtgccaagagagaacattacagcatggatgaatgcaattggtttgatcatcactgccctaccagtgagttaataattgtgatttgtacttagtgatgaaatacagccagctgttccatgtcagcaaaaagaaaaagatgcatataggatgcccttgtacgggacgtcatgcaaattaatgaagtattttatgtttttaaagttttttcatattattactgctttaaaaatctacagtgactagtttttgcttttctgtattagatctaaatatatctatgtgacttacgggtctctgcattttctggtaccaccttacctatccaactttagtttttacataatagcttgatctactcttggccacttaacgtgttgtatatctacagcctttgttccttcagatagtgcttaagacatgttttaggtacttctgaatgtgagggaataagacatttttcttattccagaagcttcttctttccatcaccttctctaaagcctattcattctttgctagcttagagcctcctttctcagtgaatgaagccttccctgacttttccagctcacatgaagactcctttctctgacctccacacatatttttttaaagtttattatttttaaataagtaataaagctatagatttattgtttgataaattaattgatttactgcatagtgtatatcaggtacctaaatgagctggacagatacatgtatggagccccttaactcacagttacttctcccaggttgttactgacttaatttgaccagttacaaagccacccagctgtattgtgcagaagctggaaaaatagaaaactttaaagaatgagaaaacactattactttagactttggggtggaatgctggataagtgatatttttcactagctttcctccgattttaaaggagccatattggattgttcttcatgatcgaattgtgagtgtcatcagcagccccagcttgacgtctgaaacagagtgggttggctatccattccgcctctttgatttcactgcctgtcatcagtcctactctgagatgagttgtagctatacgttagctcttgcacatgctgtgtggcaccattctagcatcggacaactttctctcattccaaagtttcttactgaagtacttcttcctatagtgaagaccgaattccagttgctttatgtataccatcttgttggaccatttttacaaagatttcagcaagagagaactcgttgtatgatagagattggtgtggcgttttatgacatgctgctgaatgttgaccagtgtagcacccatttaaattacatggatcccatctgtgacttcctctatcacatgaagtatatgtttactggtgacagcgtgaaagagcaagtagagaagattatctgtaacttaaaaccagctttaaaacttcgtcttcgattcatcacacacattagcaagatggagccagctgcagtgcctccacaagccatgaacagtgggtctccagcacctcagtctaatcaggtgcccgtgtctttaccagtaactcagtgaagccagactgtactgtggagaaagtagaaatatatccgtctttgagagtggactcaaaccttttaaatctgaatgcgatcacactgtagtgatatagtagaagcagtgatgatattcagattgttttattttgattcaaatgatgaatctgttgacaccttataactcccatctccctatctatatttttgtctctaagagatcaagtaagatacatgttgttcatattcataacaacttattagagctatgtaggaacatagaggtatctgtgatcaaatgacttgtcattggcactttcagtctttcctattctagccgttgtttttgtttgtattttttattattaatgacatatttagtcttcagatatattattttaaaggcaccacacatgtaaaacagttattacaaatattttatacataaatctcttggtagattttcagaataatagagatttatatcaagaaaaggaatctagattttgttgcattgtaggagcaaacaaggcttcatattctttttaaaatgacttgaaattttattataaatttccatagtttctatcaaggtcaactggcagttttattacctttgctatggacttgaacttactgtataaaattagttggaagccatgtaagaaaataacatctgaaaattcttgaacttaaaatcatgcttaaatggttgattctccaatttctttttttaaaaataagttaattgcttttgcaggttgacactctcacctgacagatgatgtaattcttcaatttttataatcttaaaatttttaaattttatatttgtaaatacagtacacattttatttcttggattttgagagacattgttaattttgggggaattggcattgcgaaagacttgaaaactaatgagtaaagtctgctgaatgaataaaccnt

SEQ ID NO: 365568 - DNA, 4442 bp, Homo sapiens
  misc_feature (4441)..(4441): n is a, c, g, or t
gctgttggctgggctcgggagggaacgctccaggtaaagcgctgggggaggaagcgacgccgaggagctacggtttcctccagaggtctccgcccctctgcccctatattcccagagctcgagtctgatccgggccttgccgggcaccctggaaaggcgggggtgatagtacagatggagacgcaactgcagagcattttcgaagaggtggtgaaaacggaagttatagaagaggcttttcctggcatgtttatggatactcctgaagatgagaaaacaaaactaattagctgtttgggggccttcagacagttttggggtggtctttctcaggagtctcatgaacagtgtatccagtggattgttaagtttattcatggtcagcatagtcctaaaagaatttcttttctttatgactgcttagcaatggcagttgagactggtctccttccacccaggctggtttgtgaatccctgataaactctgacactcttgagtgggaaagaacacagctttgggccttaacatttaaactggttcggaaaataattgggggagtggattacaagggtgttcgagatctcttaaaagtgattttggagaagattttgacaattcctaatacagtgagctctgctgttgtacagcagcttctggcagcaagagaggttatagcatatatcttggaaagaaatgcctgcttattaccagcctattttgcagtcactgagatcaggaaactgtatcctgaaggcaaacttccacactggttacttggaaacctagtatcagactttgtggataccttcaggcccacagcaaggataaactccatttgtggtcgctgtagtcttctgccagttgtaaataattcgggtgccatttgtaattcatggaaactggatcctgctactcttcgttttcctttgaaaggccttttgccatatgataaggatctgtttgaaccacagactgctttgttgagatatgtattggagcagccttattccagggatatggtctgcaatatgctaggtttaaataagcagcacaagcagcgctgccctgtgctggaggaccagttggtggatctggttgtttatgccatggagcgatctgagaccgaggagaagtttgacgatgggggaacaagccaactcctgtggcagcatctctcaagtcagctcattttctttgtgcttttccagtttgcaagttttccacatatggtgctttctcttcatcagaagttagcagggcgaggactgattaaaggcagagatcatcttatgtgggttctcctgcaattcatttctggaagtattcagaaaaatgcactagctgattttctccctgtgatgaagctcttcgacttgctatacccagaaaaagaatatatcccagttcctgatattaacaaaccccagtcaacccatgcctttgcaatgacctgtatttggattcatctcaatagaaaagctcaaaatgacaactccaagctacagattccaatacctcattccctaagacttcaccatgagttcctgcagcagagtctaagaaataaaagtttacagatgaatgactataagattgctctattgtgtaatgcatactctacaaattcagaatgttttacattacccatgggagctctggtagaaactatttatggaaatggaattatgaggatacctctccctggaacaaactgtatggcttcaggatctattacccccttacctatgaacctcctggattcactgacagttcatgccaaaatgagccttattcacagcattgcaaccagggtgataaaacttgctcatgcaaagtccagtgtggccttggctccagccctagtggaaacttacagtcgtttattggtctatatggaaatagagtctttgggcatcaaaggatttatcagtcagcttttgccaactgttttcaaatcacatgcatgggggatcttacacacactccttgagatgtttagctaccggatgcatcatattcagcctcattacagagttcagctcctgagtcatcttcatactttggctgcagttgcacaaacaaaccagaaccagctccatctttgtgtcgagagcactgctctcaggcttataacagcattaggtagctcagaggtacaaccgcagtttacacgcttccttagtgatcccaaaacagtgctctcagcagaatctgaagaactgaaccgagccttgatattgaccttggctagagcaactcatgtaacagatttttttacaggctctgattcaattcagggaacttggtgtaaagacatacttcagaccatcatgagtttcactcctcataattgggcttcacacaccctgagctgttttccaggcccactacaggcattcttcaaacaaaataatgtgcctcaggaaagccgttttaatctgaaaaaaaatgtggaggaggagtataggaagtggaagtcaatgagcaacgaaaacgacattattacccacttctctatgcagggctcccctcctctctttctttgtcttctctggaaaatgctcttggaaacagatcatattaatcagattggctatagagtattagagagaattggagccagggccttggtagcccatgtgaggacatttgcagatttcctggtatatgagttttctacatcagcagggggtcagcaactcaataaatgcattgaaattcttaatgacatggtatggaagtataacattgttacactggacagattaattctctgcctggccatgcgtagtcacgaaggaaatgaagcccaggtttgttatttcataattcagttgctgttactcaaaccaaacgattttagaaatcgagtaagtgactttgtgaaggaaaattccccagagcactggttacagaatgactggcacaccaagcacatgaattatcacaagaaatatccagagaagttgtattttgagggcctcgcggaacaggtggatcctcctgtacagatccagtctccctatctgcccatctattttgggaatgtgtgtcttcgattccttccagtatttgatatagtaatccacagatttttagagttgcttccggtatccaaatcactggagactctactggatcatctaggaggcttatataaatttcatgatcgtccagtgacttatctgtataacactctgcactattatgaaatgcacctgagagaccgcgcatttctcaaacgaaaactcgtccatgcgatcattggctctctgaaggataatcgaccgcagggctggtgtctaagtgacacttacctgaaatgcgctatgaatgcacgagaggaaaatccttgggttccagatgacacctactattgcagattgattggcagactagtcgatacgatggctggcaaatctcctggtccctttccaaactgtgactggagattcaatgagtttcccaacccagctgcccatgctctccatgttacttgtgtggagctcatggccttggcagtttcaggcaaagaagttgggaatgcccttctaaatgttgtcctaaaaagtcagcctttagtgccaagagagaacattacagcatggatgaatgcaattggtttgatcatcactgccctaccagagccatattggattgttcttcatgatcgaattgtgagtgtcatcagcagccccagcttgacgtctgaaacagagtgggttggctatccattccgcctctttgatttcactgcctgtcatcagtcctactctgagatgagttgtagctatacgttagctcttgcacatgctgtgtggcaccattctagcatcggacaactttctctcattccaaagtttcttactgaagtacttcttcctatagtgaagaccgaattccagttgctttatgtataccatcttgttggaccatttttacaaagatttcagcaagagagaactcgttgtatgatagagattggtgtggcgttttatgacatgctgctgaatgttgaccagtgtagcacccatttaaattacatggatcccatctgtgacttcctctatcacatgaagtatatgtttactggtgacagcgtgaaagagcaagtagagaagattatctgtaacttaaaaccagctttaaaacttcgtcttcgattcatcacacacattagcaagatggagccagctgcagtgcctccacaagccatgaacagtgggtctccagcacctcagtctaatcaggttgacactctcacctgacagatgatgtaattcttcaatttttataatcttaaaatttttaaattttatatttgtaaatacagtacacattttatttcttggattttgagagacattgttaattttgggggaattggcattgcgaaagacttgaaaactaatgagtaaagtctgctgaatgaataaaccnt

SEQ ID NO: 365569 - DNA, 802 bp, Homo sapiens
  misc_feature (32)..(32): n is a, c, g, or t
  misc_feature (801)..(801): n is a, c, g, or t
ccaaatggaatccccaaatggaatccccccanatggaaccatctccctatctatatttttgtctctaagagatcaagtaagatacatgttgttcatattcataacaacttattagagctatgtaggaacatagaggtatctgtgatcaaatgacttgtcattggcactttcagtctttcctattctagccgttgtttttgtttgtattttttattattaatgacatatttagtcttcagatatattattttaaaggcaccacacatgtaaaacagttattacaaatattttatacataaatctcttggtagattttcagaataatagagatttatatcaagaaaaggaatctagattttgttgcattgtaggagcaaacaaggcttcatattctttttaaaatgacttgaaattttattataaatttccatagtttctatcaaggtcaactggcagttttattacctttgctatggacttgaacttactgtataaaattagttggaagccatgtaagaaaataacatctgaaaattcttgaacttaaaatcatgcttaaatggttgattctccaatttctttttttaaaaataagttaattgcttttgcaggttgacactctcacctgacagatgatgtaattcttcaatttttataatcttaaaatttttaaattttatatttgtaaatacagtacacattttatttcttggattttgagagacattgttaattttgggggaattggcattgcgaaagacttgaaaactaatgagtaaagtctgctgaatgaataaaccnt

SEQ ID NO: 365570 - DNA, 471 bp, Homo sapiens
aactggcgagtgattttttagaaggaagcaaaagggagctaacctttaaacagttatcatgtgcaatctttacatatattatctcattttatataaatgttcatatatttcaggggcagtctcaattttccttttgtacgtatttatttgacttccctctttctttctctctttagttacttggaaacctagtatcagactttgtggataccttcaggcccacagcaaggataaactccatttgtggtaggattataattttaaatatgccaaatagtacctgatttttagtaatctaattattgaacaaagctgagggatgttctcttaatatgtgccttggtggcttgtcattttggtgactctctaagagcttaatataatgcctttcccttgttttcacttactctgtgtgccaagtacagggaggaaaaagaaactctctggaatgggtttaagcttcatttaaaa

SEQ ID NO: 365571 - DNA, 4579 bp, Homo sapiens
gctgttggctgggctcgggagggaacgctccaggtaaagcgctgggggaggaagcgacgccgaggagctacggtttcctccagaggtctccgcccctctgcccctatattcccagagctcgagtctgatccgggccttgccgggcaccctggaaaggcgggggtgatagtacagatggagacgcaactgcagagcattttcgaagaggtggtgaaaacggaagttatagaagaggcttttcctggcatgtttatggatactcctgaagatgagaaaacaaaactaattagctgtttgggggccttcagacagttttggggtggtctttctcaggagtctcatgaacagtgtatccagtggattgttaagtttattcatggtcagcatagtcctaaaagaatttcttttctttatgactgcttagcaatggcagttgagactggtctccttccacccaggctggtttgtgaatccctgataaactctgacactcttgagtgggaaagaacacagctttgggccttaacatttaaactggttcggaaaataattgggggagtggattacaagggtgttcgagatctcttaaaagtgattttggagaagattttgacaattcctaatacagtgagctctgctgttgtacagcagcttctggcagcaagagaggttatagcatatatcttggaaagaaatgcctgcttattaccagcctattttgcagtcactgagatcaggaaactgtatcctgaaggcaaacttccacactggttacttggaaacctagtatcagactttgtggataccttcaggcccacagcaaggataaactccatttgtggtcgctgtagtcttctgccagttgtaaataattcgggtgccatttgtaattcatggaaactggatcctgctactcttcgttttcctttgaaaggccttttgccatatgataaggatctgtttgaaccacagactgctttgttgagatatgtattggagcagccttattccagggatatggtctgcaatatgctaggtttaaataagcagcacaagcagcgctgccctgtgctggaggaccagttggtggatctggttgtttatgccatggagcgatctgagaccgaggagaagtttgacgatgggggaacaagccaactcctgtggcagcatctctcaagtcagctcattttctttgtgcttttccagtttgcaagttttccacatatggtgctttctcttcatcagaagttagcagggcgaggactgattaaaggcagagatcatcttatgtgggttctcctgcaattcatttctggaagtattcagaaaaatgcactagctgattttctccctgtgatgaagctcttcgacttgctatacccagaaaaagaatatatcccagttcctgatattaacaaaccccagtcaacccatgcctttgcaatgacctgtatttggattcatctcaatagaaaagctcaaaatgacaactccaagctacagattccaatacctcattccctaagacttcaccatgagttcctgcagcagagtctaagaaataaaagtttacagatgaatgactataagattgctctattgtgtaatgcatactctacaaattcagaatgttttacattacccatgggagctctggtagaaactatttatggaaatggaattatgaggatacctctccctggaacaaactgtatggcttcaggatctattacccccttacctatgaacctcctggattcactgacagttcatgccaaaatgagccttattcacagcattgcaaccagggtgataaaacttgctcatgcaaagtccagtgtggccttggctccagccctagtggaaacttacagtcgtttattggtctatatggaaatagagtctttgggcatcaaaggatttatcagtcagcttttgccaactgttttcaaatcacatgcatgggggatcttacacacactccttgagatgtttagctaccggatgcatcatattcagcctcattacagagttcagctcctgagtcatcttcatactttggctgcagttgcacaaacaaaccagaaccagctccatctttgtgtcgagagcactgctctcaggcttataacagcattaggtagctcagaggtacaaccgcagtttacacgcttccttagtgatcccaaaacagtgctctcagcagaatctgaagaactgaaccgagccttgatattgaccttggctagagcaactcatgtaacagatttttttacaggctctgattcaattcagggaacttggtgtaaagacatacttcagaccatcatgagtttcactcctcataattgggcttcacacaccctgagctgttttccaggcccactacaggcattcttcaaacaaaataatgtgcctcaggaaagccgttttaatctgaaaaaaaatgtggaggaggagtataggaagtggaagtcaatgagcaacgaaaacgacattattacccacttctctatgcagggctcccctcctctctttctttgtcttctctggaaaatgctcttggaaacagatcatattaatcagattggctatagagtattagagagaattggagccagggccttggtagcccatgtgaggacatttgcagatttcctggtatatgagttttctacatcagcagggggtcagcaactcaataaatgcattgaaattcttaatgacatggtatggaagtataacattgttacactggacagattaattctctgcctggccatgcgtagtcacgaaggaaatgaagcccaggtttgttatttcataattcagttgctgttactcaaaccaaacgattttagaaatcgagtaagtgactttgtgaaggaaaattccccagagcactggttacagaatgactggcacaccaagcacatgaattatcacaagaaatatccagagaagttgtattttgagggcctcgcggaacaggtggatcctcctgtacagatccagtctccctatctgcccatctattttgggaatgtgtgtcttcgattccttccagtatttgatatagtaatccacagatttttagagttgcttccggtatccaaatcactggagactctactggatcatctaggaggcttatataaatttcatgatcgtccagtgacttatctgtataacactctgcactattatgaaatgcacctgagagaccgcgcatttctcaaacgaaaactcgtccatgcgatcattggctctctgaaggataatcgaccgcagggctggtgtctaagtgacacttacctgaaatgcgctatgaatgcacgagaggaaaatccttgggttccagatgacacctactattgcagattgattggcagactagtcgatacgatggctggcaaatctcctggtccctttccaaactgtgactggagattcaatgagtttcccaacccagctgcccatgctctccatgttacttgtgtggagctcatggccttggcagtttcaggcaaagaagttgggaatgcccttctaaatgttgtcctaaaaagtcagcctttagtgccaagagagaacattacagcatggatgaatgcaattggtttgatcatcactgccctaccagagccatattggattgttcttcatgatcgaattgtgagtgtcatcagcagccccagcttgacgtctgaaacagagtgggttggctatccattccgcctctttgatttcactgcctgtcatcagtcctactctgagatgagttgtagctatacgttagctcttgcacatgctgtgtggcaccattctagcatcggacaactttctctcattccaaagtttcttactgaagtacttcttcctatagtgaagaccgaattccagttgctttatgtataccatcttgttggaccatttttacaaagatttcagcaagagagaactcgttgtatgatagagattggtgtggcgttttatgacatgctgctgaatgttgaccagtgtagcacccatttaaattacatggatcccatctgtgacttcctctatcacatgaagtatatgtttactggtgacagcgtgaaagagcaagtagagaagattatctgtaacttaaaaccagctttaaaacttcgtcttcgattcatcacacacattagcaagatggagccagctgcagtgcctccacaagccatgaacagtgggtctccagcacctcagtctaatcagtaaaaagtcagagtacacagcaagggttccaaattaagaggaagcaaaacgctgcccagatcctgagaaacctggagaaaatcaaccttagtagtttcaactcatacattgtcttgtttgattttgttctttgttttttatcctctttaagcacagatgcgtgttgaagtctaaggtgttctgtcatcacactctctttactagaataagtgtgcccaggcagaaaaaaaagtgtattcaatgttgctggcatgtgtggattcacagctcgtggctgtaaggaaatctgggggtttcataaatccattaaaatccttttagagttgcc

SEQ ID NO: 365572 - DNA, 6073 bp, Homo sapiens
  misc_feature (6072)..(6072): n is a, c, g, or t
gctgttggctgggctcgggagggaacgctccaggtaaagcgctgggggaggaagcgacgccgaggagctacggtttcctccagaggtctccgcccctctgcccctatattcccagagctcgagtctgatccgggccttgccgggcaccctggaaaggcgggggtgatagtacagatggagacgcaactgcagagcattttcgaagaggtggtgaaaacggaagttatagaagaggcttttcctggcatgtttatggatactcctgaagatgagaaaacaaaactaattagctgtttgggggccttcagacagttttggggtggtctttctcaggagtctcatgaacagtgtatccagtggattgttaagtttattcatggtcagcatagtcctaaaagaatttcttttctttatgactgcttagcaatggcagttgagactggtctccttccacccaggctggtttgtgaatccctgataaactctgacactcttgagtgggaaagaacacagctttgggccttaacatttaaactggttcggaaaataattgggggagtggattacaagggtgttcgagatctcttaaaagtgattttggagaagattttgacaattcctaatacagtgagctctgctgttgtacagcagcttctggcagcaagagaggttatagcatatatcttggaaagaaatgcctgcttattaccagcctattttgcagtcactgagatcaggaaactgtatcctgaaggcaaacttccacactggttacttggaaacctagtatcagactttgtggataccttcaggcccacagcaaggataaactccatttgtggtcgctgtagtcttctgccagttgtaaataattcgggtgccatttgtaattcatggaaactggatcctgctactcttcgttttcctttgaaaggccttttgccatatgataaggatctgtttgaaccacagactgctttgttgagatatgtattggagcagccttattccagggatatggtctgcaatatgctaggtttaaataagcagcacaagcagcgctgccctgtgctggaggaccagttggtggatctggttgtttatgccatggagcgatctgagaccgaggagaagtttgacgatgggggaacaagccaactcctgtggcagcatctctcaagtcagctcattttctttgtgcttttccagtttgcaagttttccacatatggtgctttctcttcatcagaagttagcagggcgaggactgattaaaggcagagatcatcttatgtgggttctcctgcaattcatttctggaagtattcagaaaaatgcactagctgattttctccctgtgatgaagctcttcgacttgctatacccagaaaaagaatatatcccagttcctgatattaacaaaccccagtcaacccatgcctttgcaatgacctgtatttggattcatctcaatagaaaagctcaaaatgacaactccaagctacagattccaatacctcattccctaagacttcaccatgagttcctgcagcagagtctaagaaataaaagtttacagatgaatgactataagattgctctattgtgtaatgcatactctacaaattcagaatgttttacattacccatgggagctctggtagaaactatttatggaaatggaattatgaggatacctctccctggaacaaactgtatggcttcaggatctattacccccttacctatgaacctcctggattcactgacagttcatgccaaaatgagccttattcacagcattgcaaccagggtgataaaacttgctcatgcaaagtccagtgtggccttggctccagccctagtggaaacttacagtcgtttattggtctatatggaaatagagtctttgggcatcaaaggatttatcagtcagcttttgccaactgttttcaaatcacatgcatgggggatcttacacacactccttgagatgtttagctaccggatgcatcatattcagcctcattacagagttcagctcctgagtcatcttcatactttggctgcagttgcacaaacaaaccagaaccagctccatctttgtgtcgagagcactgctctcaggcttataacagcattaggtagctcagaggtacaaccgcagtttacacgcttccttagtgatcccaaaacagtgctctcagcagaatctgaagaactgaaccgagccttgatattgaccttggctagagcaactcatgtaacagatttttttacaggctctgattcaattcagggaacttggtgtaaagacatacttcagaccatcatgagtttcactcctcataattgggcttcacacaccctgagctgttttccaggcccactacaggcattcttcaaacaaaataatgtgcctcaggaaagccgttttaatctgaaaaaaaatgtggaggaggagtataggaagtggaagtcaatgagcaacgaaaacgacattattacccacttctctatgcagggctcccctcctctctttctttgtcttctctggaaaatgctcttggaaacagatcatattaatcagattggctatagagtattagagagaattggagccagggccttggtagcccatgtgaggacatttgcagatttcctggtatatgagttttctacatcagcagggggtcagcaactcaataaatgcattgaaattcttaatgacatggtatggaagtataacattgttacactggacagattaattctctgcctggccatgcgtagtcacgaaggaaatgaagcccaggtttgttatttcataattcagttgctgttactcaaaccaaacgattttagaaatcgagtaagtgactttgtgaaggaaaattccccagagcactggttacagaatgactggcacaccaagcacatgaattatcacaagaaatatccagagaagttgtattttgagggcctcgcggaacaggtggatcctcctgtacagatccagtctccctatctgcccatctattttgggaatgtgtgtcttcgattccttccagtatttgatatagtaatccacagatttttagagttgcttccggtatccaaatcactggagactctactggatcatctaggaggcttatataaatttcatgatcgtccagtgacttatctgtataacactctgcactattatgaaatgcacctgagagaccgcgcatttctcaaacgaaaactcgtccatgcgatcattggctctctgaaggataatcgaccgcagggctggtgtctaagtgacacttacctgaaatgcgctatgaatgcacgagaggaaaatccttgggttccagatgacacctactattgcagattgattggcagactagtcgatacgatggctggcaaatctcctggtccctttccaaactgtgactggagattcaatgagtttcccaacccagctgcccatgctctccatgttacttgtgtggagctcatggccttggcagtttcaggcaaagaagttgggaatgcccttctaaatgttgtcctaaaaagtcagcctttagtgccaagagagaacattacagcatggatgaatgcaattggtttgatcatcactgccctaccagtgagttaataattgtgatttgtacttagtgatgaaatacagccagctgttccatgtcagcaaaaagaaaaagatgcatataggatgcccttgtacgggacgtcatgcaaattaatgaagtattttatgtttttaaagttttttcatattattactgctttaaaaatctacagtgactagtttttgcttttctgtattagatctaaatatatctatgtgacttacgggtctctgcattttctggtaccaccttacctatccaactttagtttttacataatagcttgatctactcttggccacttaacgtgttgtatatctacagcctttgttccttcagatagtgcttaagacatgttttaggtacttctgaatgtgagggaataagacatttttcttattccagaagcttcttctttccatcaccttctctaaagcctattcattctttgctagcttagagcctcctttctcagtgaatgaagccttccctgacttttccagctcacatgaagactcctttctctgacctccacacatatttttttaaagtttattatttttaaataagtaataaagctatagatttattgtttgataaattaattgatttactgcatagtgtatatcaggtacctaaatgagctggacagatacatgtatggagccccttaactcacagttacttctcccaggttgttactgacttaatttgaccagttacaaagccacccagctgtattgtgcagaagctggaaaaatagaaaactttaaagaatgagaaaacactattactttagactttggggtggaatgctggataagtgatatttttcactagctttcctccgattttaaaggagccatattggattgttcttcatgatcgaattgtgagtgtcatcagcagccccagcttgacgtctgaaacagagtgggttggctatccattccgcctctttgatttcactgcctgtcatcagtcctactctgagatgagttgtagctatacgttagctcttgcacatgctgtgtggcaccattctagcatcggacaactttctctcattccaaagtttcttactgaagtacttcttcctatagtgaagaccgaattccagttgctttatgtataccatcttgttggaccatttttacaaagatttcagcaagagagaactcgttgtatgatagagattggtgtggcgttttatgacatgctgctgaatgttgaccagtgtagcacccatttaaattacatggatcccatctgtgacttcctctatcacatgaagtatatgtttactggtgacagcgtgaaagagcaagtagagaagattatctgtaacttaaaaccagctttaaaacttcgtcttcgattcatcacacacattagcaagatggagccagctgcagtgcctccacaagccatgaacagtgggtctccagcacctcagtctaatcaggtgcccgtgtctttaccagtaactcagtgaagccagactgtactgtggagaaagtagaaatatatccgtctttgagagtggactcaaaccttttaaatctgaatgcgatcacactgtagtgatatagtagaagcagtgatgatattcagattgttttattttgattcaaatgatgaatctgttgacaccttataactcccatctccctatctatatttttgtctctaagagatcaagtaagatacatgttgttcatattcataacaacttattagagctatgtaggaacatagaggtatctgtgatcaaatgacttgtcattggcactttcagtctttcctattctagccgttgtttttgtttgtattttttattattaatgacatatttagtcttcagatatattattttaaaggcaccacacatgtaaaacagttattacaaatattttatacataaatctcttggtagattttcagaataatagagatttatatcaagaaaaggaatctagattttgttgcattgtaggagcaaacaaggcttcatattctttttaaaatgacttgaaattttattataaatttccatagtttctatcaaggtcaactggcagttttattacctttgctatggacttgaacttactgtataaaattagttggaagccatgtaagaaaataacatctgaaaattcttgaacttaaaatcatgcttaaatggttgattctccaatttctttttttaaaaataagttaattgcttttgcaggttgacactctcacctgacagatgatgtaattcttcaatttttataatcttaaaatttttaaattttatatttgtaaatacagtacacattttatttcttggattttgagagacattgttaattttgggggaattggcattgcgaaagacttgaaaactaatgagtaaagtctgctgaatgaataaaccnt

SEQ ID NO: 365573 - DNA, 4924 bp, Homo sapiens
gctgttggctgggctcgggagggaacgctccaggtaaagcgctgggggaggaagcgacgccgaggagctacggtttcctccagaggtctccgcccctctgcccctatattcccagagctcgagtctgatccgggccttgccgggcaccctggaaaggcgggggtgatagtacagatggagacgcaactgcagagcattttcgaagaggtggtgaaaacggaagttatagaagaggcttttcctggcatgtttatggatactcctgaagatgagaaaacaaaactaattagctgtttgggggccttcagacagttttggggtggtctttctcaggagtctcatgaacagtgtatccagtggattgttaagtttattcatggtcagcatagtcctaaaagaatttcttttctttatgactgcttagcaatggcagttgagactggtctccttccacccaggctggtttgtgaatccctgataaactctgacactcttgagtgggaaagaacacagctttgggccttaacatttaaactggttcggaaaataattgggggagtggattacaagggtgttcgagatctcttaaaagtgattttggagaagattttgacaattcctaatacagtgagctctgctgttgtacagcagcttctggcagcaagagaggttatagcatatatcttggaaagaaatgcctgcttattaccagcctattttgcagtcactgagatcaggaaactgtatcctgaaggcaaacttccacactggttacttggaaacctagtatcagactttgtggataccttcaggcccacagcaaggataaactccatttgtggtcgctgtagtcttctgccagttgtaaataattcgggtgccatttgtaattcatggaaactggatcctgctactcttcgttttcctttgaaaggccttttgccatatgataaggatctgtttgaaccacagactgctttgttgagatatgtattggagcagccttattccagggatatggtctgcaatatgctaggtttaaataagcagcacaagcagcgctgccctgtgctggaggaccagttggtggatctggttgtttatgccatggagcgatctgagaccgaggagaagtttgacgatgggggaacaagccaactcctgtggcagcatctctcaagtcagctcattttctttgtgcttttccagtttgcaagttttccacatatggtgctttctcttcatcagaagttagcagggcgaggactgattaaaggcagagatcatcttatgtgggttctcctgcaattcatttctggaagtattcagaaaaatgcactagctgattttctccctgtgatgaagctcttcgacttgctatacccagaaaaagaatatatcccagttcctgatattaacaaaccccagtcaacccatgcctttgcaatgacctgtatttggattcatctcaatagaaaagctcaaaatgacaactccaagctacagattccaatacctcattccctaagacttcaccatgagttcctgcagcagagtctaagaaataaaagtttacagatgaatgactataagattgctctattgtgtaatgcatactctacaaattcagaatgttttacattacccatgggagctctggtagaaactatttatggaaatggaattatgaggatacctctccctggaacaaactgtatggcttcaggatctattacccccttacctatgaacctcctggattcactgacagttcatgccaaaatgagccttattcacagcattgcaaccagggtgataaaacttgctcatgcaaagtccagtgtggccttggctccagccctagtggaaacttacagtcgtttattggtctatatggaaatagagtctttgggcatcaaaggatttatcagtcagcttttgccaactgttttcaaatcacatgcatgggggatcttacacacactccttgagatgtttagctaccggatgcatcatattcagcctcattacagagttcagctcctgagtcatcttcatactttggctgcagttgcacaaacaaaccagaaccagctccatctttgtgtcgagagcactgctctcaggcttataacagcattaggtagctcagaggtacaaccgcagtttacacgcttccttagtgatcccaaaacagtgctctcagcagaatctgaagaactgaaccgagccttgatattgaccttggctagagcaactcatgtaacagatttttttacaggctctgattcaattcagggaacttggtgtaaagacatacttcagaccatcatgagtttcactcctcataattgggcttcacacaccctgagctgttttccaggcccactacaggcattcttcaaacaaaataatgtgcctcaggaaagccgttttaatctgaaaaaaaatgtggaggaggagtataggaagtggaagtcaatgagcaacgaaaacgacattattacccacttctctatgcagggctcccctcctctctttctttgtcttctctggaaaatgctcttggaaacagatcatattaatcagattggctatagagtattagagagaattggagccagggccttggtagcccatgtgaggacatttgcagatttcctggtatatgagttttctacatcagcagggggtcagcaactcaataaatgcattgaaattcttaatgacatggtatggaagtataacattgttacactggacagattaattctctgcctggccatgcgtagtcacgaaggaaatgaagcccaggtttgttatttcataattcagttgctgttactcaaaccaaacgattttagaaatcgagtaagtgactttgtgaaggaaaattccccagagcactggttacagaatgactggcacaccaagcacatgaattatcacaagaaatatccagagaagttgtattttgagggcctcgcggaacaggtggatcctcctgtacagatccagtctccctatctgcccatctattttgggaatgtgtgtcttcgattccttccagtatttgatatagtaatccacagatttttagagttgcttccggtatccaaatcactggagactctactggatcatctaggaggcttatataaatttcatgatcgtccagtgacttatctgtataacactctgcactattatgaaatgcacctgagagaccgcgcatttctcaaacgaaaactcgtccatgcgatcattggctctctgaaggataatcgaccgcagggctggtgtctaagtgacacttacctgaaatgcgctatgaatgcacgagaggaaaatccttgggttccagatgacacctactattgcagattgattggcagactagtcgatacgatggctggcaaatctcctggtccctttccaaactgtgactggagattcaatgagtttcccaacccagctgcccatgctctccatgttacttgtgtggagctcatggccttggcagtttcaggcaaagaagttgggaatgcccttctaaatgttgtcctaaaaagtcagcctttagtgccaagagagaacattacagcatggatgaatgcaattggtttgatcatcactgccctaccagagccatattggattgttcttcatgatcgaattgtgagtgtcatcagcagccccagcttgacgtctgaaacagagtgggttggctatccattccgcctctttgatttcactgcctgtcatcagtcctactctgagatgagttgtagctatacgttagctcttgcacatgctgtgtggcaccattctagcatcggacaactttctctcattccaaagtttcttactgaagtacttcttcctatagtgaagaccgaattccagttgctttatgtataccatcttgttggaccatttttacaaagatttcagcaagagagaactcgttgtatgatagagattggtgtggcgttttatgacatgctgctgaatgttgaccagtgtagcacccatttaaattacatggatcccatctgtgacttcctctatcacatgaagtatatgtttactggtgacagcgtgaaagagcaagtagagaagattatctgtaacttaaaaccagctttaaaacttcgtcttcgattcatcacacacattagcaagatggagccagctgcagtgcctccacaagccatgaacagtgggtctccagcacctcagtctaatcagtaaaaagtcagagtacacagcaagggttccaaattaagaggaagcaaaacgctgcccagatcctgagaaacctggagaaaatcaaccttagtagtttcaactcatacattgtcttgtttgattttgttctttgttttttatcctctttaagcacagatgcgtgttgaagtctaaggtgttctgtcatcacactctctttactagaataagtgtgcccaggcagaaaaaaaagtgtattcaatgttgctggcatgtgtggattcacagctcgtggctgtaaggaaatctgggggtttcataaatccattaaaatccttttagagttgccaacccgcagtaggattttctttctttttttgttctttttttccccttccaagtgaggcacataaaggattctacctagtccatgaatgaacagtttcatagaaacattaaaaccctaacataacatgaattattcacaaagttgcatgaaacaataatatttaggttatccaaattataagaagcctgaaggttaccaccaaactattaaatttttctaggcattaattacataactaaacaaatgtatttcttaaaattctctcttcctctacatacacacagtaacatcaaaaacaacaagagcaactaaacctcaatgagtagctacaatgcagaaagagtc

SEQ ID NO: 365574 - DNA, 1512 bp, Homo sapiens
gctgttggctgggctcgggagggaacgctccaggtaaagcgctgggggaggaagcgacgccgaggagctacggtttcctccagaggtctccgcccctctgcccctatattcccagagctcgagtctgatccgggccttgccgggcaccctggaaaggcgggggtgatagtacagatggagacgcaactgcagagcattttcgaagaggtggtgaaaacggaagttatagaagaggcttttcctggcatgtttatggatactcctgaagatgagaaaacaaaactaattagctgtttgggggccttcagacagttttggggtggtctttctcaggagtctcatgaacagtgtatccagtggattgttaagtttattcatggtcagcatagtcctaaaagaatttcttttctttatgactgcttagcaatggcagttgagactggtctccttccacccaggctggtttgtgaatccctgataaactctgacactcttgagtgggaaagaacacagctttgggccttaacatttaaactggttcggaaaataattgggggagtggattacaagggtgttcgagatctcttaaaagtgattttggagaagattttgacaattcctaatacagtgagctctgctgttgtacagcagcttctggcagcaagagaggttatagcatatatcttggaaagaaatgcctgcttattaccagcctattttgcagtcactgagatcaggaaactgtatcctgaaggcaaacttccacactggttacttggaaacctagtatcagactttgtggataccttcaggcccacagcaaggataaactccatttgtggtcgctgtagtcttctgccagttgtaaataattcgggtgccatttgtaattcatggaaactggatcctgctactcttcgttttcctttgaaaggccttttgccatatgataaggatctgtttgaaccacagactgctttgttgagatatgtattggagcagccttattccagggatatggtctgcaatatgctaggtttaaataagcagcacaagcagcgctgccctgtgctggaggaccagttggtggatctggttgtttatgccatggagcgatctgagaccgaggagaagtttgacgatgggggaacaagccaactcctgtggcagcatctctcaagtcagctcattttctttgtgcttttccagtttgcaagttttccacatatggtgctttctcttcatcagaaggtatgtactaaatcttatggtcggagtgacttcacctgttgattactgtattttagactgctgtgggcattccctagtgattttagaactgacagaagttctgagccctaatttctgtcctgtttagtgcttttatagtttcttaactttttactttcttgtcacctgtaaaaacaggattcagtcattcattctatgtattctcagtgcaggcaccagcagatacaagatgaaaaggcactgtatatcctcaaggagcac

SEQ ID NO: 365575 - DNA, 1081 bp, Homo sapiens
gatgtatccccactttccccatcagcttaccctccagcaaatacgagactatacccttcaatatccagcactcagggctcaaccatgtgttttgggagcaagggaatggggttcctctaggtcaggaatcggcaaactcagtactcaagccagatctggccagctgcctacaagctgataatggttttttttatttttaaatggttacattgtaaactgttatataagtacctgataatatcattaattttgtttcttggcctgccatgcttaaaatattaactctctggccctttaagaaaaaaacgtgctgacccctgctctagatcaaagaaaacaaacctcaaaaatactttcctccctctaccccacttgacccttgtcccggggcagtaggcatctccgtcaaaactcttgtccctggtctgtggtaactttctcagctccccaacccatgtccctcaaagtcccctccctatagggcaagaacccagcaacttcgctctgccccgactctaggcgggatgtagctcattttgggatacgagtctccatcgtggagcctggcttcttccgaacccctgtgaccaacctggagagtctggagaaaaccctgcaggcctgctgggcacggctgcctcctgccacacaggcccactatgggggggccttcctcaccaagtacctgaaaatgcaacagcgcatcatgaacctgatctgtgacccggacctaaccaaggtgagccgatgcctggagcatgccctgactgctcgacacccccgaacccgctacagcccaggttgggatgccaagctgctctggctgcctgcctcctacctgccagccagcctggtggatgctgtgctcacctgggtccttcccaagcctgcccaagcagtctactgaatccagccttccagcaagagattgtttttcaaggacaaggactttgatttatttctgcccccaccctggtactgcctggtgcctgccacaaaataagcactaacaaaagtgtattgtttaaaaaataaaaagaaggtgggcagaaatgtgcccagtggaaaaaatgaccccatt

SEQ ID NO: 365576 - DNA, 499 bp, Homo sapiens
actccggactttggccttagcagtagttagtgtgggaggctgggaagactgggagcagtctcttaaacaaaagcaaaagaataagcttcgggcgctgtagtacctgccagctttcgccacaggaggtaagtggatactgggagctgggggaactgagaagactagccagatattacatgtattgccaactcaaaactttcagcttttaacatgcttcctcacacattatcccctttgatcctccacaactctgaggtggacctggtgggtcttagccccacttggtagatgagaaaataggttgagagagacagtgagatgctcagtatcacacagcaaacctcttggccctatacatcattccaaacacaagacccaggttgcatatagaaggttcagtgtccctggtttagaaggagaggtggtgtgaggcaagcaagaagatgcctctgctgcactccagcctgggcgacagagtgagactccatctcaaaaaaaa

SEQ ID NO: 365577 - DNA, 1288 bp, Homo sapiens
actccggactttggccttagcagtagttagtgtgggaggctgggaagactgggagcagtctcttaaacaaaagcaaaagaataagcttcgggcgctgtagtacctgccagctttcgccacaggaggctgccacctgtaggtcacttgggctccagctatgtggctgcctcttctgctgggtgccttactctgggcagtgctgtggttgctcagggaccggcagagcctgcccgccagcaatgcctttgtcttcatcaccggctgtgactcaggctttgggcgccttctggcactgcagctggaccagagaggcttccgagtcctggccagctgcctgaccccctccggggccgaggacctgcagcgggtggcctcctcccgcctccacaccaccctgttggatatcactgatccccagagcgtccagcaggcagccaagtgggtggagatgcacgttaaggaagcagggctttttggtctggtgaataatgctggtgtggctggtatcatcggacccacaccatggctgacccgggacgatttccagcgggtgctgaatgtgaacacaatgggtcccatcggggtcacccttgccctgctgcctctgctgcagcaagcccggggccgggtgatcaacatcaccagcgtcctgggtcgcctggcagccaatggtgggggctactgtgtctccaaatttggcctggaggccttctctgacagcctgaggcgggatgtagctcattttgggatacgagtctccatcgtggagcctggcttcttccgaacccctgtgaccaacctggagagtctggagaaaaccctgcaggcctgctgggcacggctgcctcctgccacacaggcccactatgggggggccttcctcaccaagtacctgaaaatgcaacagcgcatcatgaacctgatctgtgacccggacctaaccaaggtgagccgatgcctggagcatgccctgactgctcgacacccccgaacccgctacagcccaggttgggatgccaagctgctctggctgcctgcctcctacctgccagccagcctggtggatgctgtgctcacctgggtccttcccaagcctgcccaagcagtctactgaatccagccttccagcaagagattgtttttcaaggacaaggactttgatttatttctgcccccaccctggtactgcctggtgcctgccacaaaataagcactaacaaaagtgtattgtttaaaaaataaaaagaaggtgggcagaaatgtgcccagtggaaaaaatgaccccatt

SEQ ID NO: 365578 - DNA, 1150 bp, Homo sapiens
agcgttccagcttccggagccggagggggcccggcgtacccagcccccagcccgacgtgaccatgctgtcccgcctcctaaaagaacaccaggccaagcagaatgaacgcaaggagctgcaggaaaagaggaggcgagaggctatcactgcagcgacctgcctgacagaagctttggtggatcacctcaatgtgggtgtggcccaggcctacatgaaccagagaaagctggaccatgaggtgaagaccctacaggtccaggctgcccaatttgccaagcagacaggccagtggatcggaatggtggagaacttcaaccaggcactcaagggctttttggtctggtgaataatgctggtgtggctggtatcatcggacccacaccatggctgacccgggacgatttccagcgggtgctgaatgtgaacacaatgggtcccatcggggtcacccttgccctgctgcctctgctgcagcaagcccggggccgggtgatcaacatcaccagcgtcctgggtcgcctggcagccaatggtgggggctactgtgtctccaaatttggcctggaggccttctctgacagcctgaggcgggatgtagctcattttgggatacgagtctccatcgtggagcctggcttcttccgaacccctgtgaccaacctggagagtctggagaaaaccctgcaggcctgctgggcacggctgcctcctgccacacaggcccactatgggggggccttcctcaccaagtacctgaaaatgcaacagcgcatcatgaacctgatctgtgacccggacctaaccaaggtgagccgatgcctggagcatgccctgactgctcgacacccccgaacccgctacagcccaggttgggatgccaagctgctctggctgcctgcctcctacctgccagccagcctggtggatgctgtgctcacctgggtccttcccaagcctgcccaagcagtctactgaatccagccttccagcaagagattgtttttcaaggacaaggactttgatttatttctgcccccaccctggtactgcctggtgcctgccacaaaataagcactaacaaaagtgtattgtttaaaaaataaaaagaaggtgggcagaaatgtgcccagtggaaaaaatgaccccatt

SEQ ID NO: 365579 - DNA, 375 bp, Homo sapiens
ctgtggtaagctaaagggacaatttgaggagaagcagttttcagatgctcccaggaagaagagggagctgtgggagtgcctcacctacccccagcatccttttcatctccccacagggctttttggtctggtgaataatgctggtgtggctggtatcatcggacccacaccatggctgacccgggacgatttccagcgggtgctgaatgtgaacacaatgggtcccatcggggtcacccttgccctgctgcctctgctgcagcaagcccggggccgggtgatcaacatcaccagcgtcctgggtcgcctggcagccaatggtgggggctactgtgtctccaaatttggcctggaggccttctctgacagcctgag

SEQ ID NO: 365580 - DNA, 454 bp, Homo sapiens
taagatgggctggagtgaggaagggaaactgattgcaaccacctatggggctgcagacctgaaaatgcaacagcgcatcatgaacctgatctgtgacccggacctaaccaaggtgagccgatgcctggagcatgccctgactgctcgacacccccgaacccgctacagcccaggttgggatgccaagctgctctggctgcctgcctcctacctgccagccagcctggtggatgctgtgctcacctgggtccttcccaagcctgcccaagcagtctactgaatccagccttccagcaagagattgtttttcaaggacaaggactttgatttatttctgcccccaccctggtactgcctggtgcctgccacaaaataagcactaacaaaagtgtattgtttaaaaaataaaaagaaggtgggcagaaatgtgcccagtggaaaaaatgaccccatt

SEQ ID NO: 365581 - DNA, 738 bp, Homo sapiens
tacgccgggccccggttctgatagtgagttcaatgttagtattttccttaagaccaaggagagattttcagtcagagaagataaatgcccagtcccagactactgtgctttctcggcaaaaaagactgagacactgaggatgtgaatgtcaaagtagtaagcagggactaaaggggatggggaggtcaaaaggcaagcatcacaacacctcagtggggagctgggaatttgagtgttaaaggacctcaagagggcagctgagaaaataggccagtggtctcaggctgacgcattccagtctctgtgggaaagtcataaagccaaagcctgaatttggccaaagaagtggatttgtctttatcttgttacctcaatgagggctggaagaactagtagctgatcaccaaggtacctgacctgagagtcttagtgctgtttatacattcaagactgtgactaacataaaatgcctaattagaaagtcacatttcccctgtcccgccgtcatgtcacttcaggtccttgtgtctaaccctgggtctggcatttgcccataggctctgtggcatcagctatcataagagtagtcaagagagatgaacttgataacctgtgttctctccaaagagcagaaagtgggtactatacgtggctacgttgctttgttaggctggcagaacagtccctccctgacagcattcctttggaaaataattcagataagctgaattctggttt

SEQ ID NO: 365582 - DNA, 958 bp, Homo sapiens
ggacgcgtgggtcgacccacgcgtcggaggtgtcgtcctgtttccctggcaggccagactgtatgaccgggatgtggcttctgcagctccagaaaaagcagagaaccctgctggccatggctccaaggaggtgaaaggcaaaactcacacttactatcaggtgctgattgatgctcgtgactgcccacatatatctcagagatctcagacagaagctgtgaccttcttggctaaccatgatgacagtcgggccctctatgccatcccaggcttggactatgtcagccatgaagacatcctcccctacacctccactgatcaggttcccatccaacatgaactctttgaaagatttcttctgtatgaccagacaaaagcacctccttttgtggctcgggagacgctaagggcctggcaagagaagaatcacccctggctggagctctccgatgttcatcgggaaacaactgagaacatacgtgtcactgtcatccccttctacatgggcatgagggaagcccagaattcccacgtgtactggtggcgctactgtatccgtttggagaaccttgacagtgatgtggtacagctccgggagcggcactggaggatattcagtctctctggcaccttggagacagtgcgaggccgaggggtagtgggcagggtgagcatccttggtctagtaattctggtcctgtgtggcaagcctgggggcttagcgcatggcttccttctcctttgttgttatagacagaggctcactttgtgaatacattgtgttgttttgggttagaaatcttaaaacaactacatgagatatgtttcttgaaacccatttcatagatgaaaagagtgagactgagaagttaaataaccagcccatggtcccatagctagtagtggcagggcctcaatttaaacccaagtgagtctgaagtcaaaacttgtgtagttt

SEQ ID NO: 365583 - DNA, 644 bp, Homo sapiens
tgctctgagctccggggtgggaccaggcgggccaagagggccgggacgccgcgcggggcagtgtgggactggggcggaacgccgcccggccgcgggtcgggctctgtgtcagcagccgggcgggcgctcgggcgggacatggcagcctgtacagcccggcgggccctggccgtgggcagccgctggtggtcccggtcgctgactggggcccggtggccaaggccgctctgtgcggcggccggagctggagccttctcgccagcgtcgaccacgacgacgcggaggcacctctcgtcccgaaaccgaccagagggcaaagtgttggagacagttggtgtgtttgaggtgccaaaacagaatggaaaatatgagaccgggcagcttttccttcatagcatttttggctaccgaggtgtcgtcctgtttccctggcaggccagactgtatgaccgggatgtggcttctgcagctccagaaaaagcagagaaccctgctggccatggctccaaggaggtgaaaggcaaaactcacacttactatcaggtgctgattgatgctcgtgactgcccacatatagtaagtaagcaagatggctgggcttgggggtcctctccatggaaagtcctgcatcccaatggggacaa

SEQ ID NO: 365584 - DNA, 3449 bp, Homo sapiens
tgctctgagctccggggtgggaccaggcgggccaagagggccgggacgccgcgcggggcagtgtgggactggggcggaacgccgcccggccgcgggtcgggctctgtgtcagcagccgggcgggcgctcgggcgggacatggcagcctgtacagcccggcgggccctggccgtgggcagccgctggtggtcccggtcgctgactggggcccggtggccaaggccgctctgtgcggcggccggagctggagccttctcgccagcgtcgaccacgacgacgcggaggcacctctcgtcccgaaaccgaccagagggcaaagtgttggagacagttggtgtgtttgaggtgccaaaacagaatggaaaatatgagaccgggcagcttttccttcatagcatttttggctaccgaggtgtcgtcctgtttccctggcaggccagactgtatgaccgggatgtggcttctgcagctccagaaaaagcagagaaccctgctggccatggctccaaggaggtgaaaggcaaaactcacacttactatcaggtgctgattgatgctcgtgactgcccacatatatctcagagatctcagacagaagctgtgaccttcttggctaaccatgatgacagtcgggccctctatgccatcccaggcttggactatgtcagccatgaagacatcctcccctacacctccactgatcaggttcccatccaacatgaactctttgaaagatttcttctgtatgaccagacaaaagcacctccttttgtggctcgggagacgctaagggcctggcaagagaagaatcacccctggctggagctctccgatgttcatcgggaaacaactgagaacatacgtgtcactgtcatccccttctacatgggcatgagggaagcccagaattcccacgtgtactggtggcgctactgtatccgtttggagaaccttgacagtgatgtggtacagctccgggagcggcactggaggatattcagtctctctggcaccttggagacagtgcgaggccgaggggtagtgggcagggaaccagtgttatccaaggagcagcctgcgttccagtatagcagccacgtctcgctgcaggcttccagtgggcacatgtggggcacgttccgctttgaaagacctgatggctcccactttgatgttcggattcctcccttctccctggaaagcaataaagatgagaagacaccaccctcaggccttcactggtaggccagctgaggccccaagtgcccaggcttggtcaccgggaagaacaactctcatcccacaattgctgcagaactcttctctccccatcatgggccacagtgggtctcttaatttgattgtggggttctttttgtggggaggggtggtataacttttcttcagaagacccatgtgggacacctccaaggctggcctcctcataagccctgcctacaccatgttccagtaaacctctccaccaaggaactgtgttcagctgccacaggcctggaggagtttcctggcctgtcacgtgaggtttgatcagtaaaccagtgcacgcttggccacccttgccatttctgctcccagagtctcaggctccccttctgacccagtgtgcgcccttgactgctttctttgctgcccttccagggagctgcccccctggtagggcatgtgcctgtttccctctcagcctggaggctggctggacatctcctagggtcactgtgcctctcagctagttggcgggggtgctggactggactcttgttcactttaccttctgccaaatgcagagagggaggccagtgtcagggtcggagtggcctggctcttagcactgaccgaccattgccatttctggcctcgctaggcccaggagaggagggaggcaagccagtcgggtttcctggagcaatgggtgtgccagccctcagcatgactctgccaagcatccagaccacaaatgcaggaatttggctgaggagcagctttaggtatggattgatgactaagtcaagctacttcctgagcttctctcagatttccaagagccagagatgaattgtgctgcatcttgccccaattcttaggatttcttttcctccgccactgcagtgattgttagaggtagttttcttgaattaatattaaatcacagttccagcccttgttattcttgtccttagtcctccagggggagctggggttgcagggcaacagtacagtcgcgcttacgacctggctagaacacaaggtcagatgataaacagaagcacaggaactcagcccatggccgcaagctggtcaaggcctgctcactgtaaacatggctctgtaccattgagtttaacacaattttattagaaattagtgtttgcttccatcacttatgctgagcaaccaaatattacagttatgtgataaaggaaaaattctttcctgcccaggacctgcgccatcctttaggccgaccttggtcacataccaaattcaataaaacccaatactggcctgtgttgttaacagcaggctgccaggtttctcagaaactgacaagaaaatctgaccttcatccatactttgtttacttacccctgggctgcttggagttgaaaaatgcacacagccaagagttgctttctgaatagggctggaaactttcaaagaaaacccccaaacttttaagtcacaaagtctgattaaagaagctaagatcatgtcagtgagttcaatgttagtattttccttaagaccaaggagagattttcagtcagagaagataaatgcccagtcccagactactgtgctttctcggcaaaaaagactgagacactgaggatgtgaatgtcaaagtagtaagcagggactaaaggggatggggaggtcaaaaggcaagcatcacaacacctcagtggggagctgggaatttgagtgttaaaggacctcaagagggcagctgagaaaataggccagtggtctcaggctgacgcattccagtctctgtgggaaagtcataaagccaaagcctgaatttggccaaagaagtggatttgtctttatcttgttacctcaatgagggctggaagaactagtagctgatcaccaaggtacctgacctgagagtcttagtgctgtttatacattcaagactgtgactaacataaaatgcctaattagaaagtcacatttcccctgtcccgccgtcatgtcacttcaggtccttgtgtctaaccctgggtctggcatttgcccataggctctgtggcatcagctatcataagagtagtcaagagagatgaacttgataacctgtgttctctccaaagagcagaaagtgggtactatacgtggctacgttgctttgttaggctggcagaacagtccctccctgacagcattcctttggaaaataattcagataagctgaattctggttt

SEQ ID NO: 365585 - DNA, 2466 bp, Homo sapiens
tgctctgagctccggggtgggaccaggcgggccaagagggccgggacgccgcgcggggcagtgtgggactggggcggaacgccgcccggccgcgggtcgggctctgtgtcagcagccgggcgggcgctcgggcgggacatggcagcctgtacagcccggcgggccctggccgtgggcagccgctggtggtcccggtcgctgactggggcccggtggccaaggccgctctgtgcggcggccggagctggagccttctcgccagcgtcgaccacgacgacgcggaggcacctctcgtcccgaaaccgaccagagggcaaagtgttggagacagttggtgtgtttgaggtgccaaaacagaatggaaaatatgagaccgggcagcttttccttcatagcatttttggctaccgaggtgtcgtcctgtttccctggcaggccagactgtatgaccgggatgtggcttctgcagctccagaaaaagcagagaaccctgctggccatggctccaaggaggtgaaaggcaaaactcacacttactatcaggtgctgattgatgctcgtgactgcccacatatatctcagagatctcagacagaagctgtgaccttcttggctaaccatgatgacagtcgggccctctatgccatcccaggcttggactatgtcagccatgaagacatcctcccctacacctccactgatcaggttcccatccaacatgaactctttgaaagatttcttctgtatgaccagacaaaagcacctccttttgtggctcgggagacgctaagggcctggcaagagaagaatcacccctggctggagctctccgatgttcatcgggaaacaactgagaacatacgtgtcactgtcatccccttctacatgggcatgagggaagcccagaattcccacgtgtactggtggcgctactgtatccgtttggagaaccttgacagtgatgtggtacagctccgggagcggcactggaggatattcagtctctctggcaccttggagacagtgcgaggccgaggggtagtgggcagggaaccagtgttatccaaggagcagcctgcgttccagtatagcagccacgtctcgctgcaggcttccagtgggcacatgtggggcacgttccgctttgaaagacctgatggctcccactttgatgttcggattcctcccttctccctggaaagcaataaagatgagaagacaccaccctcaggccttcactggtaggccagctgaggccccaagtgcccaggcttggtcaccgggaagaacaactctcatcccacaattgctgcagaactcttctctccccatcatgggccacagtgggtctcttaatttgattgtggggttctttttgtggggaggggtggtataacttttcttcagaagacccatgtgggacacctccaaggctggcctcctcataagccctgcctacaccatgttccagtaaacctctccaccaaggaactgtgttcagctgccacaggcctggaggagtttcctggcctgtcacgtgaggtttgatcagtaaaccagtgcacgcttggccacccttgccatttctgctcccagagtctcaggctccccttctgacccagtgtgcgcccttgactgctttctttgctgcccttccagggagctgcccccctggtagggcatgtgcctgtttccctctcagcctggaggctggctggacatctcctagggtcactgtgcctctcagctagttggcgggggtgctggactggactcttgttcactttaccttctgccaaatgcagagagggaggccagtgtcagggtcggagtggcctggctcttagcactgaccgaccattgccatttctggcctcgctaggcccaggagaggagggaggcaagccagtcgggtttcctggagcaatgggtgtgccagccctcagcatgactctgccaagcatccagaccacaaatgcaggaatttggctgaggagcagctttaggtatggattgatgactaagtcaagctacttcctgagcttctctcagatttccaagagccagagatgaattgtgctgcatcttgccccaattcttaggatttcttttcctccgccactgcagtgattgttagaggtagttttcttgaattaatattaaatcacagttccagcccttgtaaaaaaaaaaaggaagcaaagacacagacagaatgtgttctcggcggctagggccccccgggagaaggcgttgcaaaaccaacctgtggtgtggcgccccgggcggcccaaataaggctagttgaacaagggcgcaacacggggggacccacacgagaaaccccggggactaagaaccacatctggggatcttccccaaatagaaaaaacgccggggagaacacgacggcgttcttgacacacccagagaggagcgtcggacagcaaacggggccctacaaag

SEQ ID NO: 365586 - DNA, 3103 bp, Homo sapiens
  misc_feature (3077)..(3077): n is a, c, g, or t
tgctctgagctccggggtgggaccaggcgggccaagagggccgggacgccgcgcggggcagtgtgggactggggcggaacgccgcccggccgcgggtcgggctctgtgtcagcagccgggcgggcgctcgggcgggacatggcagcctgtacagcccggcgggccctggccgtgggcagccgctggtggtcccggtcgctgactggggcccggtggccaaggccgctctgtgcggcggccggagctggagccttctcgccagcgtcgaccacgacgacgcggaggcacctctcgtcccgaaaccgaccagagggcaaagtgttggagacagttggtgtgtttgaggtgccaaaacagaatggaaaatatgagaccgggcagcttttccttcatagcatttttggctaccgaggtgtcgtcctgtttccctggcaggccagactgtatgaccgggatgtggcttctgcagctccagaaaaagcagagaaccctgctggccatggctccaaggaggtgaaaggcaaaactcacacttactatcaggtgctgattgatgctcgtgactgcccacatatatctcagagatctcagacagaagctgtgaccttcttggctaaccatgatgacagtcgggccctctatgccatcccaggcttggactatgtcagccatgaagacatcctcccctacacctccactgatcaggttcccatccaacatgaactctttgaaagatttcttctgtatgaccagacaaaagcacctccttttgtggctcgggagacgctaagggcctggcaagagaagaatcacccctggctggagctctccgatgttcatcgggaaacaactgagaacatacgtgtcactgtcatccccttctacatgggcatgagggaagcccagaattcccacgtgtactggtggcgctactgtatccgtttggagaaccttgacagtgatgtggtacagctccgggagcggcactggaggatattcagtctctctggcaccttggagacagtgcgaggccgaggggtagtgggcagggaaccagtgttatccaaggagcagcctgcgttccagtatagcagccacgtctcgctgcaggcttccagtgggcacatgtggggcacgttccgctttgaaagacctgatggctcccactttgatgttcggattcctcccttctccctggaaagcaataaagatgagaagacaccaccctcaggccttcactggtaggccagctgaggccccaagtgcccaggcttggtcaccgggaagaacaactctcatcccacaattgctgcagaactcttctctccccatcatgggccacagtgggtctcttaatttgattgtggggttctttttgtggggaggggtggtataacttttcttcagaagacccatgtgggacacctccaaggctggcctcctcataagccctgcctacaccatgttccagtaaacctctccaccaaggaactgtgttcagctgccacaggcctggaggagtttcctggcctgtcacgtgaggtttgatcagtaaaccagtgcacgcttggccacccttgccatttctgctcccagagtctcaggctccccttctgacccagtgtgcgcccttgactgctttctttgctgcccttccagggagctgcccccctggtagggcatgtgcctgtttccctctcagcctggaggctggctggacatctcctagggtcactgtgcctctcagctagttggcgggggtgctggactggactcttgttcactttaccttctgccaaatgcagagagggaggccagtgtcagggtcggagtggcctggctcttagcactgaccgaccattgccatttctggcctcgctaggcccaggagaggagggaggcaagccagtcgggtttcctggagcaatgggtgtgccagccctcagcatgactctgccaagcatccagaccacaaatgcaggaatttggctgaggagcagctttaggtatggattgatgactaagtcaagctacttcctgagcttctctcagatttccaagagccagagatgaattgtgctgcatcttgccccaattcttaggatttcttttcctccgccactgcagtgattgttagaggtagttttcttgaattaatattaaatcacagttccagcccttgttattcttgtccttagtcctccagggggagctggggttgcagggcaacagtacagtcgcgcttacgacctggctagaacacaaggtcagatgataaacagaagcacaggaactcagcccatggccgcaagctggtcaaggcctgctcactgtaaacatggctctgtaccattgagtttaacacaattttattagaaattagtgtttgcttccatcacttatgctgagcaaccaaatattacagttatgtgataaaggaaaaattctttcctgcccaggacctgcgccatcctttaggccgaccttggtcacataccaaattcaataaaacccaatactggcctgtgttgttaacagcaggctgccaggtttctcagaaactgacaagaaaatctgaccttcatccatactttgtttacttacccctgggctgcttggagttgaaaaatgcacacagccaagagttgctttctgaatagggctggaaactttcaaagaaaacccccaaacttttaagtcacaaagtctgattaaagaagctaagatcatgtcagtgagttcaatgttagtattttccttaagaccaaggagagattttcagtcagagaagataaatgcccagtcccagactactgtgctttctcggcaaaaaagactgagacactgaggatgtgaatgtcaaagtagtaagcagggactaaaggggatggggaggtcaaaaggcaagcatcacaacacctcagtggggagctgggaatttgagtgttaaaggacctcaagagggcagctgagaaaataggccagtggtctcaggctgacgcattccagtctctgtgggaaagtcataaagccaaagcctgaatttggccaaagatgattttctctacttgtacctnatgcgcacgaggtaccgactgatatt

SEQ ID NO: 365587 - DNA, 2523 bp, Homo sapiens
  misc_feature (2236)..(2236): n is a, c, g, or t
  misc_feature (2523)..(2523): n is a, c, g, or t
tgctctgagctccggggtgggaccaggcgggccaagagggccgggacgccgcgcggggcagtgtgggactggggcggaacgccgcccggccgcgggtcgggctctgtgtcagcagccgggcgggcgctcgggcgggacatggcagcctgtacagcccggcgggccctggccgtgggcagccgctggtggtcccggtcgctgactggggcccggtggccaaggccgctctgtgcggcggccggagctggagccttctcgccagcgtcgaccacgacgacgcggaggcacctctcgtcccgaaaccgaccagagggcaaagtgttggagacagttggtgtgtttgaggtgccaaaacagaatggaaaatatgagaccgggcagcttttccttcatagcatttttggctaccgaggtgtcgtcctgtttccctggcaggccagactgtatgaccgggatgtggcttctgcagctccagaaaaagcagagaaccctgctggccatggctccaaggaggtgaaaggcaaaactcacacttactatcaggtgctgattgatgctcgtgactgcccacatatatctcagagatctcagacagaagctgtgaccttcttggctaaccatgatgacagtcgggccctctatgccatcccaggcttggactatgtcagccatgaagacatcctcccctacacctccactgatcaggttcccatccaacatgaactctttgaaagatttcttctgtatgaccagacaaaagcacctccttttgtggctcgggagacgctaagggcctggcaagagaagaatcacccctggctggagctctccgatgttcatcgggaaacaactgagaacatacgtgtcactgtcatccccttctacatgggcatgagggaagcccagaattcccacgtgtactggtggcgctactgtatccgtttggagaaccttgacagtgatgtggtacagctccgggagcggcactggaggatattcagtctctctggcaccttggagacagtgcgaggccgaggggtagtgggcagggaaccagtgttatccaaggagcagcctgcgttccagtatagcagccacgtctcgctgcaggcttccagtgggcacatgtggggcacgttccgctttgaaagacctgatggctcccactttgatgttcggattcctcccttctccctggaaagcaataaagatgagaagacaccaccctcaggccttcactggtaggccagctgaggccccaagtgcccaggcttggtcaccgggaagaacaactctcatcccacaattgctgcagaactcttctctccccatcatgggccacagtgggtctcttaatttgattgtggggttctttttgtggggaggggtggtataacttttcttcagaagacccatgtgggacacctccaaggctggcctcctcataagccctgcctacaccatgttccagtaaacctctccaccaaggaactgtgttcagctgccacaggcctggaggagtttcctggcctgtcacgtgaggtttgatcagtaaaccagtgcacgcttggccacccttgccatttctgctcccagagtctcaggctccccttctgacccagtgtgcgcccttgactgctttctttgctgcccttccagggagctgcccccctggtagggcatgtgcctgtttccctctcagcctggaggctggctggacatctcctagggtcactgtgcctctcagctagttggcgggggtgctggactggactcttgttcactttaccttctgccaaatgcagagagggaggccagtgtcagggtcggagtggcctggctcttagcactgaccgaccattgccatttctggcctcgctaggcccaggagaggagggaggcaagccagtcgggtttcctggagcaatgggtgtgccagccctcagcatgactctgccaagcatccagaccacaaatgcaggaatttggctgaggagcagctttaggtatggattgatgactaagtcaagctacttcctgagcttctctcagatttccaagagccagagatgaattgtgctgcatcttgccccaattcttaggatttcttttcctccgccactgcagtgattgttagaggtagttttcttgaattaatattaaatcacagttccagcccttgtaaaaaaaaaaaaaaaataagaaaaaaacaacaaaaaaaaaaaagggggggggnggcaaataaattccccgggggggccccaatgaatgtgcctcgcccatttcgttgtgtaaaaaaaagggggcccctattagaggggccattaatttatacgcaggacaccgcgcgcgtttaaaaaaccgttgctgctctggagaaacggcttctgtgggcgcttttgtgaagacgacccaacctctggcggcggaacattgtcggccacccccgaggattaaggtcgggaaataaatggttacggtgtaccgcaattctcgcgaaatgctcgtttatacctgaatacn

SEQ ID NO: 365588 - DNA, 1818 bp, Homo sapiens
tgctctgagctccggggtgggaccaggcgggccaagagggccgggacgccgcgcggggcagtgtgggactggggcggaacgccgcccggccgcgggtcgggctctgtgtcagcagccgggcgggcgctcgggcgggacatggcagcctgtacagcccggcgggccctggccgtgggcagccgctggtggtcccggtcgctgactggggcccggtggccaaggccgctctgtgcggcggccggagctggagccttctcgccagcgtcgaccacgacgacgcggaggcacctctcgtcccgaaaccgaccagagggcaaagtgttggagacagttggtgtgtttgaggtgccaaaacagaatggaaaatatgagaccgggcagcttttccttcatagcatttttggctaccgaggtgtcgtcctgtttccctggcaggccagactgtatgaccgggatgtggcttctgcagctccagaaaaagcagagaaccctgctggccatggctccaaggaggtgaaaggcaaaactcacacttactatcaggtgctgattgatgctcgtgactgcccacatatatctcagagatctcagacagaagctgtgaccttcttggctaaccatgatgacagtcgggccctctatgccatcccaggcttggactatgtcagccatgaagacatcctcccctacacctccactgatcaggttcccatccaacatgaactctttgaaagatttcttctgtatgaccagacaaaagcacctccttttgtggctcgggagacgctaagggcctggcaagagaagaatcacccctggctggagctctccgatgttcatcgggaaacaactgagaacatacgtgtcactgtcatccccttctacatgggcatgagggaagcccagaattcccacgtgtactggtggcgctactgtatccgtttggagaaccttgacagtgatgtggtacagctccgggagcggcactggaggatattcagtctctctggcaccttggagacagtgcgaggccgaggggtagtgggcagggaaccagtgttatccaaggagcagcctgcgttccagtatagcagccacgtctcgctgcaggcttccagtgggcacatgtggggcacgttccgctttgaaagacctgatggctcccactttgatgttcggattcctcccttctccctggaaagcaataaagatgagaagacaccaccctcaggccttcactggtaggccagctgaggccccaagtgcccaggcttggtcaccgggaagaacaactctcatcccacaattgctgcagaactcttctctccccatcatgggccacagtgggtctcttaatttgattgtggggttctttttgtggggaggggtggtataacttttcttcagaagacccatgtgggacacctccaaggctggcctcctcataagccctgcctacaccatgttccagtaaacctctccaccaaggaactgtgttcagctgccacaggcctggaggagtttcctggcctgtcacgtgaggtttgatcagtaaaccagtgcacgcttgccagccctcagcatgactctgccaagcatccagaccacaaatgcaggaatttggctgaggagcagctttaggtatggattgatgactaagtcaagctacttcctgagcttctctcagatttccaagagccagagatgaattgtgctgcatcttgccccaattcttaggatttcttttcctccgccactgcagtgattgttagaggtagttttcttgaattaatattaaatcacagttccagcccttgt

SEQ ID NO: 365589 - DNA, 2085 bp, Homo sapiens
ggacgcgtgggtcgacccacgcgtcgggggcggaacgccgcccggccgcgggtcgggctctgtgtcagcagccgggcgggcgctcgggcgggacatggcagcctgtacagcccggcgggccctggccgtgggcagccgctggtggtcccggtcgctgactggggcccggtggccaaggccgctctgtgcggcggccggagctggagccttctcgccagcgtcgaccacgacgacgcggaggcacctctcgtcccgaaaccgaccagagggcaaagtgttggagacagttggtgtgtttgaggtgccaaaacagaatggaaaatatgagaccgggcagcttttccttcatagcatttttggctaccgaggtgtcgtcctgtttccctggcaggccagactgtatgaccgggatgtggcttctgcagctccagaaaaagcagagaaccctgctggccatggctccaaggaggtgaaaggctctcagagatctcagacagaagctgtgaccttcttggctaaccatgatgacagtcgggccctctatgccatcccaggcttggactatgtcagccatgaagacatcctcccctacacctccactgatcaggttcccatccaacatgaactctttgaaagatttcttctgtatgaccagacaaaagcacctccttttgtggctcgggagacgctaagggcctggcaagagaagaatcacccctggctggagctctccgatgttcatcgggaaacaactgagaacatacgtgtcactgtcatccccttctacatgggcatgagggaagcccagaattcccacgtgtactggtggcgctactgtatccgtttggagaaccttgacagtgatgtggtacagctccgggagcggcactggaggatattcagtctctctggcaccttggagacagtgcgaggccgaggggtagtgggcagggaaccagtgttatccaaggagcagcctgcgttccagtatagcagccacgtctcgctgcaggcttccagtgggcacatgtggggcacgttccgctttgaaagacctgatggctcccactttgatgttcggattcctcccttctccctggaaagcaataaagatgagaagacaccaccctcaggccttcactggtaggccagctgaggccccaagtgcccaggcttggtcaccgggaagaacaactctcatcccacaattgctgcagaactcttctctccccatcatgggccacagtgggtctcttaatttgattgtggggttctttttgtggggaggggtggtataacttttcttcagaagacccatgtgggacacctccaaggctggcctcctcataagccctgcctacaccatgttccagtaaacctctccaccaaggaactgtgttcagctgccacaggcctggaggagtttcctggcctgtcacgtgaggtttgatcagtaaaccagtgcacgcttggccacccttgccatttctgctcccagagtctcaggctccccttctgacccagtgtgcgcccttgactgctttctttgctgcccttccagggagctgcccccctggtagggcatgtgcctgtttccctctcagcctggaggctggctggacatctcctagggtcactgtgcctctcagctagttggcgggggtgctggactggactcttgttcactttaccttctgccaaatgcagagagggaggccagtgtcagggtcggagtggcctggctcttagcactgaccgaccattgccatttctggcctcgctaggcccaggagaggagggaggcaagccagtcgggtttcctggagcaatgggtgtgccagccctcagcatgactctgccaagcatccagaccacaaatgcaggaatttggctgaggagcagctttaggtatggattgatgactaagtcaagctacttcctgagcttctctcagatttccaagagccagagatgaattgtgctgcatcttgccccaattcttaggatttcttttcctccgccactgcagtgattgttagaggtagttttcttgaattaatattaaatcacagttccagcccttgt

SEQ ID NO: 365590 - DNA, 1736 bp, Homo sapiens
  misc_feature (3)..(3): n is a, c, g, or t
  misc_feature (67)..(67): n is a, c, g, or t
  misc_feature (70)..(70): n is a, c, g, or t
  misc_feature (87)..(87): n is a, c, g, or t
  misc_feature (89)..(89): n is a, c, g, or t
  misc_feature (102)..(102): n is a, c, g, or t
tgnagccaactttttaccggtttttgctctccgcccagaaaagaaaaaccccgctgccttgctccangangtgaaagcaaaataaantnactttcagtgctnattaatgctcgtaactgcccacatttttctcagagatctcagacagaagctgtgaccttcttggctaaccatgatgacagtcgggccctctatgccatcccaggcttggactatgtcagccatgaagacatcctcccctacacctccactgatcaggttcccatccaacatgaactctttgaaagatttcttctgtatgaccagacaaaagcacctccttttgtggctcgggagacgctaagggcctggcaagagaagaatcacccctggctggagctctccgatgttcatcgggaaacaactgagaacatacgtgtcactgtcatccccttctacatgggcatgagggaagcccagaattcccacgtgtactggtggcgctactgtatccgtttggagaaccttgacagtgatgtggtacagctccgggagcggcactggaggatattcagtctctctggcaccttggagacagtgcgaggccgaggggtagtgggcagggaaccagtgttatccaaggagcagcctgcgttccagtatagcagccacgtctcgctgcaggcttccagtgggcacatgtggggcacgttccgctttgaaagacctgatggctcccactttgatgttcggattcctcccttctccctggaaagcaataaagatgagaagacaccaccctcaggccttcactggtaggccagctgaggccccaagtgcccaggcttggtcaccgggaagaacaactctcatcccacaattgctgcagaactcttctctccccatcatgggccacagtgggtctcttaatttgattgtggggttctttttgtggggaggggtggtataacttttcttcagaagacccatgtgggacacctccaaggctggcctcctcataagccctgcctacaccatgttccagtaaacctctccaccaaggaactgtgttcagctgccacaggcctggaggagtttcctggcctgtcacgtgaggtttgatcagtaaaccagtgcacgcttggccacccttgccatttctgctcccagagtctcaggctccccttctgacccagtgtgcgcccttgactgctttctttgctgcccttccagggagctgcccccctggtagggcatgtgcctgtttccctctcagcctggaggctggctggacatctcctagggtcactgtgcctctcagctagttggcgggggtgctggactggactcttgttcactttaccttctgccaaatgcagagagggaggccagtgtcagggtcggagtggcctggctcttagcactgaccgaccattgccatttctggcctcgctaggcccaggagaggagggaggcaagccagtcgggtttcctggagcaatgggtgtgccagccctcagcatgactctgccaagcatccagaccacaaatgcaggaatttggctgaggagcagctttaggtatggattgatgactaagtcaagctacttcctgagcttctctcagatttccaagagccagagatgaattgtgctgcatcttgccccaattcttaggatttcttttcctccgccactgcagtgattgttagaggtagttttcttgaattaatattaaatcacagttccagcccttgt

SEQ ID NO: 365591 - DNA, 1256 bp, Homo sapiens
tgctctgagctccggggtgggaccaggcgggccaagagggccgggacgccgcgcggggcagtgtgggactggggcggaacgccgcccggccgcgggtcgggctctgtgtcagcagccgggcgggcgctcgggcgggacatggcagcctgtacagcccggcgggccctggccgtgggcagccgctggtggtcccggtcgctgactggggcccggtggccaaggccgctctgtgcggcggccggagctggagccttctcgccagcgtcgaccacgacgacgcggaggcacctctcgtcccgaaaccgaccagagggcaaagtgttggagacagttggtgtgtttgaggtgccaaaacagaatggaaaatatgagaccgggcagcttttccttcatagcatttttggctaccgaggtgtcgtcctgtttccctggcaggccagactgtatgaccgggatgtggcttctgcagctccagaaaaagcagagaaccctgctggccatggctccaaggaggtgaaaggcaaaactcacacttactatcaggtgctgattgatgctcgtgactgcccacatatatctcagagatctcagacagaagctgtgaccttcttggctaaccatgatgacagtcgggccctctatgccatcccaggcttggactatgtcagccatgaagacatcctcccctacacctccactgatcaggttcccatccaacatgaactctttgaaagatttcttctgtatgaccagacaaaagcacctccttttgtggctcgggagacgctaagggcctggcaagagaagaatcacccctggctggagctctccgatgttcatcgggaaacaactgagaacatacgtgtcactgtcatccccttctacatgggcatgagggaagcccagaattcccacgtgtactggtggcgctactgtatccgtttggagaaccttgacagtgatgtggtacagctccgggagcggcactggaggatattcagtctctctggcaccttggagacagtgcgaggccgaggggtagtgggcagagacagggtctcgctgtgtcacccaggctggagtgcagtggtgcgaccatagtttactttcctgagcttctctcagatttccaagagccagagatgaattgtgctgcatcttgccccaattcttaggatttcttttcctccgccactgcagtgattgttagaggtagttttcttgaattaatattaaatcacagttccagcccttgt

SEQ ID NO: 365592 - DNA, 1341 bp, Homo sapiens
tgctctgagctccggggtgggaccaggcgggccaagagggccgggacgccgcgcggggcagtgtgggactggggcggaacgccgcccggccgcgggtcgggctctgtgtcagcagccgggcgggcgctcgggcgggacatggcagcctgtacagcccggcgggccctggccgtgggcagccgctggtggtcccggtcgctgactggggcccggtggccaaggccgctctgtgcggcggccggagctggagccttctcgccagcgtcgaccacgacgacgcggaggcacctctcgtcccgaaaccgaccagagggcaaagtgttggagacagttggtgtgtttgaggtgccaaaacagaatggaaaatatgagaccgggcagcttttccttcatagcatttttggctaccgaggtgtcgtcctgtttccctggcaggccagactgtatgaccgggatgtggcttctgcagctccagaaaaagcagagaaccctgctggccatggctccaaggaggtgaaaggcaaaactcacacttactatcaggtgctgattgatgctcgtgactgcccacatatatctcagagatctcagacagaagctgtgaccttcttggctaaccatgatgacagtcgggccctctatgccatcccaggcttggactatgtcagccatgaagacatcctcccctacacctccactgatcaggttcccatccaacatgaactctttgaaagatttcttctgtatgaccagacaaaagcacctccttttgtggctcgggagacgctaagggcctggcaagagaagaatcacccctggctggagctctccgatgttcatcgggaaacaactgagaacatacgtgtcactgtcatccccttctacatgggcatgagggaagcccagaattcccacgtgtactggtggcgctactgtatccgtttggagaaccttgacagtgatgtggtacagctccgggagcggcactggaggatattcagtctctctggcaccttggagacagtgcgaggccgaggggtagtgggcagggtgagcatccttggtctagtaattctggtcctgtgtggcaagcctgggggcttagcgcatggcttccttctcctttgttgttatagacagaggctcactttgtgaatacattgtgttgttttgggttagaaatcttaaaacaactacatgagatatgtttcttgaaacccatttcatagatgaaaagagtgagactgagaagttaaataaccagcccatggtcccatagctagtagtggcagggcctcaatttaaacccaagtgagtctgaagtcaaaacttgtgtagttt

SEQ ID NO: 365593 - DNA, 1161 bp, Homo sapiens
gcggccgcctactactgctctaattcaagcttctaacgatgtacggggacatggctctgtaccattgagtttaacacaattttattagaaattagtgtttgcttccatcacttatgctgagcaaccaaatattacagttatgtgataaaggaaaaattctttcctgcccaggacctgcgccatcctttaggccgaccttggtcacataccaaattcaataaaacccaatactggcctgtgttgttaacagcaggctgccaggtttctcagaaactgacaagaaaatctgaccttcatccatactttgtttacttacccctgggctgcttggagttgaaaaatgcacacagccaagagttgctttctgaatagggctggaaactttcaaagaaaacccccaaacttttaagtcacaaagtctgattaaagaagctaagatcatgtcagtgagttcaatgttagtattttccttaagaccaaggagagattttcagtcagagaagataaatgcccagtcccagactactgtgctttctcggcaaaaaagactgagacactgaggatgtgaatgtcaaagtagtaagcagggactaaaggggatggggaggtcaaaaggcaagcatcacaacacctcagtggggagctgggaatttgagtgttaaaggacctcaagagggcagctgagaaaataggccagtggtctcaggctgacgcattccagtctctgtgggaaagtcataaagccaaagcctgaatttggccaaagaagtggatttgtctttatcttgttacctcaatgagggctggaagaactagtagctgatcaccaaggtacctgacctgagagtcttagtgctgtttatacattcaagactgtgactaacataaaatgcctaattagaaagtcacatttcccctgtcccgccgtcatgtcacttcaggtccttgtgtctaaccctgggtctggcatttgcccataggctctgtggcatcagctatcataagagtagtcaagagagatgaacttgataacctgtgttctctccaaagagcagaaagtgggtactatacgtggctacgttgctttgttaggctggcagaacagtccctccctgacagcattcctttggaaaataattcagataagctgaattctggttt

SEQ ID NO: 365594 - DNA, 434 bp, Homo sapiens
gtggcgctactgtatccgtttggagaaccttgacagtgatgtggtacagctccgggagcggcactggaggatattcagtctctctggcaccttggagacagtgcgaggccgaggggtagtgggcagggtgagcatccttggtctagtaattctggtcctgtgtggcaagcctgggggcttagcgcatggcttccttctcctttgttgttatagacagaggctcactttgtgaatacattgtgttgttttgggttagaaatcttaaaacaactacatgagatatgtttcttgaaacccatttcatagatgaaaagagtgagactgagaagttaaataaccagcccatggtcccatagctagtagtggcagggcctcaatttaaacccaagtgagtctgaagtcaaaacttgtgtagtttttaaaactggtatagt

SEQ ID NO: 365595 - DNA, 1070 bp, Homo sapiens
  misc_feature (884)..(884): n is a, c, g, or t
  misc_feature (916)..(916): n is a, c, g, or t
  misc_feature (918)..(918): n is a, c, g, or t
  misc_feature (920)..(920): n is a, c, g, or t
ggacgcgtgggtcgacccacgcgtcgggggcggaacgccgcccggccgcgggtcgggctctgtgtcagcagccgggcgggcgctcgggcgggacatggcagcctgtacagcccggcgggccctggccgtgggcagccgctggtggtcccggtcgctgactggggcccggtggccaaggccgctctgtgcggcggccggagctggagccttctcgccagcgtcgaccacgacgacgcggaggcacctctcgtcccgaaaccgaccagagggcaaagtgttggagacagttggtgtgtttgaggtgccaaaacagaatggaaaatatgagaccgggcagcttttccttcatagcatttttggctaccgaggtgtcgtcctgtttccctggcaggccagactgtatgaccgggatgtggcttctgcagctccagaaaaagcagagaaccctgctggccatggctccaaggaggtgaaaggcaaaactcacacttactatcaggtgctgattgatgctcgtgactgcccacatatatctcagagatctcagacagaagctgtgaccttcttggctaaccatgatgacagtcgggccctctatgccatcccaggcttggactatgtcagccatgaagacatcctcccctacacctccactgatcaggttcccatccaacatgaactctttgaaagatttcttctgtatgaccagacaaaagcacctccttttgtggctcgggagacgctaagggcctggcaagagaagaatcacccctggctggagctctccgatgttcatcgggaaacaactgagaacatacgtgtcactgtcatccccttctacatgggcatgagggaagcccagaattccagtggtactggggggntactgaatcggtgggaacttgacggagtgggncngncgggagcggctgagggattcggctcgggcctgggaatggcagcccggtttggggggaggtctcgtggccacgtgggcggggcgctgattgggcaaaacgcagtgagggagaggacatcggcaggtcagagcacgaacggcgggggggaag

SEQ ID NO: 365596 - DNA, 2183 bp, Homo sapiens
tgctctgagctccggggtgggaccaggcgggccaagagggccgggacgccgcgcggggcagtgtgggactggggcggaacgccgcccggccgcgggtcgggctctgtgtcagcagccgggcgggcgctcgggcgggacatggcagcctgtacagcccggcgggccctggccgtgggcagccgctggtggtcccggtcgctgactggggcccggtggccaaggccgctctgtgcggcggccggagctggagccttctcgccagcgtcgaccacgacgacgcggaggcacctctcgtcccgaaaccgaccagagggcaaagtgttggagacagttggtgtgtttgaggtgccaaaacagaatggaaaatatgagaccgggcagcttttccttcatagcatttttggctaccgaggtgtcgtcctgtttccctggcaggccagactgtatgaccgggatgtggcttctgcagctccagaaaaagcagagaaccctgctggccatggctccaaggaggtgaaaggcaaaactcacacttactatcaggtgctgattgatgctcgtgactgcccacatatatctcagagatctcagacagaagctgtgaccttcttggctaaccatgatgacagtcgggccctctatgccatcccaggcttggactatgtcagccatgaagacatcctcccctacacctccactgatcaggttcccatccaacatgaactctttgaaagatttcttctgtatgaccagacaaaagcacctccttttgtggctcgggagacgctaagggcctggcaagagaagaatcacccctggctggagctctccgatgttcatcgggaaacaactgagaacatacgtgtcactgtcatccccttctacatgggcatgagggaagcccagaattcccacgtgtactggtggcgctactgtatccgtttggagaaccttgacagtgatgtggtacagctccgggagcggcactggaggatattcagtctctctggcaccttggagacagtgcgaggccgaggggtagtgggcagggaaccagtgttatccaaggagcagcctgcgttccagtatagcagccacgtctcgctgcaggcttccagtgggcacatgtggggcacgttccgctttgaaagacctgatggctcccactttgatgttcggattcctcccttctccctggaaagcaataaagatgagaagacaccaccctcaggccttcactggtaggccagctgaggccccaagtgcccaggcttggtcaccgggaagaacaactctcatcccacaattgctgcagaactcttctctccccatcatgggccacagtgggtctcttaatttgattgtggggttctttttgtggggaggggtggtataacttttcttcagaagacccatgtgggacacctccaaggctggcctcctcataagccctgcctacaccatgttccagtaaacctctccaccaaggaactgtgttcagctgccacaggcctggaggagtttcctggcctgtcacgtgaggtttgatcagtaaaccagtgcacgcttggccacccttgccatttctgctcccagagtctcaggctccccttctgacccagtgtgcgcccttgactgctttctttgctgcccttccagggagctgcccccctggtagggcatgtgcctgtttccctctcagcctggaggctggctggacatctcctagggtcactgtgcctctcagctagttggcgggggtgctggactggactcttgttcactttaccttctgccaaatgcagagagggaggccagtgtcagggtcggagtggcctggctcttagcactgaccgaccattgccatttctggcctcgctaggcccaggagaggagggaggcaagccagtcgggtttcctggagcaatgggtgtgccagccctcagcatgactctgccaagcatccagaccacaaatgcaggaatttggctgaggagcagctttaggtatggattgatgactaagtcaagctacttcctgagcttctctcagatttccaagagccagagatgaattgtgctgcatcttgccccaattcttaggatttcttttcctccgccactgcagtgattgttagaggtagttttcttgaattaatattaaatcacagttccagcccttgt

SEQ ID NO: 365597 - DNA, 2139 bp, Homo sapiens
ggacgcgtgggtcgacccacgcgtcgggggcggaacgccgcccggccgcgggtcgggctctgtgtcagcagccgggcgggcgctcgggcgggacatggcagcctgtacagcccggcgggccctggccgtgggcagccgctggtggtcccggtcgctgactggggcccggtggccaaggccgctctgtgcggcggccggagctggagccttctcgccagcgtcgaccacgacgacgcggaggcacctctcgtcccgaaaccgaccagagggcaaagtgttggagacagttggtgtgtttgaggtgccaaaacagaatggaaaatatgagaccgggcagcttttccttcatagcatttttggctaccgaggtgtcgtcctgtttccctggcaggccagactgtatgaccgggatgtggcttctgcagctccagaaaaagcagagaaccctgctggccatggctccaaggaggtgaaaggcaaaactcacacttactatcaggtgctgattgatgctcgtgactgcccacatatatctcagagatctcagacagaagctgtgaccttcttggctaaccatgatgacagtcgggccctctatgccatcccaggcttggactatgtcagccatgaagacatcctcccctacacctccactgatcaggttcccatccaacatgaactctttgaaagatttcttctgtatgaccagacaaaagcacctccttttgtggctcgggagacgctaagggcctggcaagagaagaatcacccctggctggagctctccgatgttcatcgggaaacaactgagaacatacgtgtcactgtcatccccttctacatgggcatgagggaagcccagaattcccacgtgtactggtggcgctactgtatccgtttggagaaccttgacagtgatgtggtacagctccgggagcggcactggaggatattcagtctctctggcaccttggagacagtgcgaggccgaggggtagtgggcagggaaccagtgttatccaaggagcagcctgcgttccagtatagcagccacgtctcgctgcaggcttccagtgggcacatgtggggcacgttccgctttgaaagacctgatggctcccactttgatgttcggattcctcccttctccctggaaagcaataaagatgagaagacaccaccctcaggccttcactggtaggccagctgaggccccaagtgcccaggcttggtcaccgggaagaacaactctcatcccacaattgctgcagaactcttctctccccatcatgggccacagtgggtctcttaatttgattgtggggttctttttgtggggaggggtggtataacttttcttcagaagacccatgtgggacacctccaaggctggcctcctcataagccctgcctacaccatgttccagtaaacctctccaccaaggaactgtgttcagctgccacaggcctggaggagtttcctggcctgtcacgtgaggtttgatcagtaaaccagtgcacgcttggccacccttgccatttctgctcccagagtctcaggctccccttctgacccagtgtgcgcccttgactgctttctttgctgcccttccagggagctgcccccctggtagggcatgtgcctgtttccctctcagcctggaggctggctggacatctcctagggtcactgtgcctctcagctagttggcgggggtgctggactggactcttgttcactttaccttctgccaaatgcagagagggaggccagtgtcagggtcggagtggcctggctcttagcactgaccgaccattgccatttctggcctcgctaggcccaggagaggagggaggcaagccagtcgggtttcctggagcaatgggtgtgccagccctcagcatgactctgccaagcatccagaccacaaatgcaggaatttggctgaggagcagctttaggtatggattgatgactaagtcaagctacttcctgagcttctctcagatttccaagagccagagatgaattgtgctgcatcttgccccaattcttaggatttcttttcctccgccactgcagtgattgttagaggtagttttcttgaattaatattaaatcacagttccagcccttgt

SEQ ID NO: 365598 - DNA, 3008 bp, Homo sapiens
  misc_feature (3008)..(3008): n is a, c, g, or t
tgctctgagctccggggtgggaccaggcgggccaagagggccgggacgccgcgcggggcagtgtgggactggggcggaacgccgcccggccgcgggtcgggctctgtgtcagcagccgggcgggcgctcgggcgggacatggcagcctgtacagcccggcgggccctggccgtgggcagccgctggtggtcccggtcgctgactggggcccggtggccaaggccgctctgtgcggcggccggagctggagccttctcgccagcgtcgaccacgacgacgcggaggcacctctcgtcccgaaaccgaccagagggcaaagtgttggagacagttggtgtgtttgaggtgccaaaacagaatggaaaatatgagaccgggcagcttttccttcatagcatttttggctaccgaggtgtcgtcctgtttccctggcaggccagactgtatgaccgggatgtggcttctgcagctccagaaaaagcagagaaccctgctggccatggctccaaggaggtgaaaggcaaaactcacacttactatcaggtgctgattgatgctcgtgactgcccacatatatctcagagatctcagacagaagctgtgaccttcttggctaaccatgatgacagtcgggccctctatgccatcccaggcttggactatgtcagccatgaagacatcctcccctacacctccactgatcaggttcccatccaacatgaactctttgaaagatttcttctgtatgaccagacaaaagcacctccttttgtggctcgggagacgctaagggcctggcaagagaagaatcacccctggctggagctctccgatgttcatcgggaaacaactgagaacatacgtgtcactgtcatccccttctacatgggcatgagggaagcccagaattcccacgtgtactggtggcgctactgtatccgtttggagaaccttgacagtgatgtggtacagctccgggagcggcactggaggatattcagtctctctggcaccttggagacagtgcgaggccgaggggtagtgggcagggaaccagtgttatccaaggagcagcctgcgttccagtatagcagccacgtctcgctgcaggcttccagtgggcacatgtggggcacgttccgctttgaaagacctgatggctcccactttgatgttcggattcctcccttctccctggaaagcaataaagatgagaagacaccaccctcaggccttcactggtaggccagctgaggccccaagtgcccaggcttggtcaccgggaagaacaactctcatcccacaattgctgcagaactcttctctccccatcatgggccacagtgggtctcttaatttgattgtggggttctttttgtggggaggggtggtataacttttcttcagaagacccatgtgggacacctccaaggctggcctcctcataagccctgcctacaccatgttccagtaaacctctccaccaaggaactgtgttcagctgccacaggcctggaggagtttcctggcctgtcacgtgaggtttgatcagtaaaccagtgcacgcttggccacccttgccatttctgctcccagagtctcaggctccccttctgacccagtgtgcgcccttgactgctttctttgctgcccttccagggagctgcccccctggtagggcatgtgcctgtttccctctcagcctggaggctggctggacatctcctagggtcactgtgcctctcagctagttggcgggggtgctggactggactcttgttcactttaccttctgccaaatgcagagagggaggccagtgtcagggtcggagtggcctggctcttagcactgaccgaccattgccatttctggcctcgctaggcccaggagaggagggaggcaagccagtcgggtttcctggagcaatgggtgtgccagccctcagcatgactctgccaagcatccagaccacaaatgcaggaatttggctgaggagcagctttaggtatggattgatgactaagtcaagctacttcctgagcttctctcagatttccaagagccagagatgaattgtgctgcatcttgccccaattcttaggatttcttttcctccgccactgcagtgattgttagaggtagttttcttgaattaatattaaatcacagttccagcccttgttattcttgtccttagtcctccagggggagctggggttgcagggcaacagtacagtcgcgcttacgacctggctagaacacaaggtcagatgataaacagaagcacaggaactcagcccatggccgcaagctggtcaaggcctgctcactgtaaacatggctctgtaccattgagtttaacacaattttattagaaattagtgtttgcttccatcacttatgctgagcaaccaaatattacagttatgtgataaaggaaaaattctttcctgcccaggacctgcgccatcctttaggccgaccttggtcacataccaaattcaataaaacccaatactggcctgtgttgttaacagcaggctgccaggtttctcagaaactgacaagaaaatctgaccttcatccatactttgtttacttacccctgggctgcttggagttgaaaaatgcacacagccaagagttgctttctgaatagggctggaaactttcaaagaaaacccccaaacttttaagtcacaaagtctgattaaagaagctaagatcatgtcaaaaaaaaaaaaaaaaaaaaaaaaaaaaaaaaaaaaaaaaaaaaaaaaaaaaaaaacaacaacaggaaaaaaaaaaaaaagagaaaaaaaaagagaccaacgacgagcaagaggaggcttcttggagagccgggctcacaacaaaccaggagaagtagcacgcaccggcgtccccataaggtcgggagcacatcaattgtgcgcaccaagagtagagatacgagcgcccaccgggagcagactactataacaacagcagggcccacgcatacagn

SEQ ID NO: 365599 - DNA, 2889 bp, Homo sapiens
tgctctgagctccggggtgggaccaggcgggccaagagggccgggacgccgcgcggggcagtgtgggactggggcggaacgccgcccggccgcgggtcgggctctgtgtcagcagccgggcgggcgctcgggcgggacatggcagcctgtacagcccggcgggccctggccgtgggcagccgctggtggtcccggtcgctgactggggcccggtggccaaggccgctctgtgcggcggccggagctggagccttctcgccagcgtcgaccacgacgacgcggaggcacctctcgtcccgaaaccgaccagagggcaaagtgttggagacagttggtgtgtttgaggtgccaaaacagaatggaaaatatgagaccgggcagcttttccttcatagcatttttggctaccgaggtgtcgtcctgtttccctggcaggccagactgtatgaccgggatgtggcttctgcagctccagaaaaagcagagaaccctgctggccatggctccaaggaggtgaaaggcaaaactcacacttactatcaggtgctgattgatgctcgtgactgcccacatatatctcagagatctcagacagaagctgtgaccttcttggctaaccatgatgacagtcgggccctctatgccatcccaggcttggactatgtcagccatgaagacatcctcccctacacctccactgatcaggttcccatccaacatgaactctttgaaagatttcttctgtatgaccagacaaaagcacctccttttgtggctcgggagacgctaagggcctggcaagagaagaatcacccctggctggagctctccgatgttcatcgggaaacaactgagaacatacgtgtcactgtcatccccttctacatgggcatgagggaagcccagaattcccacgtgtactggtggcgctactgtatccgtttggagaaccttgacagtgatgtggtacagctccgggagcggcactggaggatattcagtctctctggcaccttggagacagtgcgaggccgaggggtagtgggcagggaaccagtgttatccaaggagcagcctgcgttccagtatagcagccacgtctcgctgcaggcttccagtgggcacatgtggggcacgttccgctttgaaagacctgatggctcccactttgatgttcggattcctcccttctccctggaaagcaataaagatgagaagacaccaccctcaggccttcactggtaggccagctgaggccccaagtgcccaggcttggtcaccgggaagaacaactctcatcccacaattgctgcagaactcttctctccccatcatgggccacagtgggtctcttaatttgattgtggggttctttttgtggggaggggtggtataacttttcttcagaagacccatgtgggacacctccaaggctggcctcctcataagccctgcctacaccatgttccagtaaacctctccaccaaggaactgtgttcagctgccacaggcctggaggagtttcctggcctgtcacgtgaggtttgatcagtaaaccagtgcacgcttggccacccttgccatttctgctcccagagtctcaggctccccttctgacccagtgtgcgcccttgactgctttctttgctgcccttccagggagctgcccccctggtagggcatgtgcctgtttccctctcagcctggaggctggctggacatctcctagggtcactgtgcctctcagctagttggcgggggtgctggactggactcttgttcactttaccttctgccaaatgcagagagggaggccagtgtcagggtcggagtggcctggctcttagcactgaccgaccattgccatttctggcctcgctaggcccaggagaggagggaggcaagccagtcgggtttcctggagcaatgggtgtgccagccctcagcatgactctgccaagcatccagaccacaaatgcaggaatttggctgaggagcagctttaggtatggattgatgactaagtcaagctacttcctgagcttctctcagatttccaagagccagagatgaattgtgctgcatcttgccccaattcttaggatttcttttcctccgccactgcagtgattgttagaggtagttttcttgaattaatattaaatcacagttccagcccttgtaaaaaaaaaaaaaaaaaaaaaaaaaaaaaaaaaaaaaaaaaacaaaaaaaaaaaaaagggggaggacaaacaagaaaaaccacagagagacacccaccaacacgcccacagcaagaagagaacaagaggacccacaaaaagcacgcataaaacacacgcacaggaaaaacaaaaaaaagaaaaagacgaaaaaagcgaacacgcaaaatagaaacaacccaaaaaaagggaggcacacaaagaggagacaaaaccacaagaacaaagacgccccaacagacacaaaccacacacgcgggccacacacgggaacccatgaagaaacaccaccagcaacgcaaaacacaacagcaaaaaacaaaacaaaactacaacaggagaaacgcagacaacagcacaaaaaaaacacagccagacacaaccacgaccaaaaagaagacaagccacaccagcagaagaacaacaagggaccacacgaccagagaaaagaggccgagaaaagggacggaacaccgcgcccagagacaaggggaggagagcgcagaaaaggaaggaaagacacgacagcacagacacacagaggagaagcgagaacaaaaagcgcagaacgacgacaacagaaacacgagaggacaagacaaaaggaggcggagaaagagacaagcgcgacagccgcacagaggagagaaacgagagaagagaagaa

SEQ ID NO: 365600 - DNA, 3415 bp, Homo sapiens
tgctctgagctccggggtgggaccaggcgggccaagagggccgggacgccgcgcggggcagtgtgggactggggcggaacgccgcccggccgcgggtcgggctctgtgtcagcagccgggcgggcgctcgggcgggacatggcagcctgtacagcccggcgggccctggccgtgggcagccgctggtggtcccggtcgctgactggggcccggtggccaaggccgctctgtgcggcggccggagctggagccttctcgccagcgtcgaccacgacgacgcggaggcacctctcgtcccgaaaccgaccagagggcaaagtgttggagacagttggtgtgtttgaggtgccaaaacagaatggaaaatatgagaccgggcagcttttccttcatagcatttttggctaccgaggtgtcgtcctgtttccctggcaggccagactgtatgaccgggatgtggcttctgcagctccagaaaaagcagagaaccctgctggccatggctccaaggaggtgaaaggcaaaactcacacttactatcaggtgctgattgatgctcgtgactgcccacatatatctcagagatctcagacagaagctgtgaccttcttggctaaccatgatgacagtcgggccctctatgccatcccaggcttggactatgtcagccatgaagacatcctcccctacacctccactgatcaggttcccatccaacatgaactctttgaaagatttcttctgtatgaccagacaaaagcacctccttttgtggctcgggagacgctaagggcctggcaagagaagaatcacccctggctggagctctccgatgttcatcgggaaacaactgagaacatacgtgtcactgtcatccccttctacatgggcatgagggaagcccagaattcccacgtgtactggtggcgctactgtatccgtttggagaaccttgacagtgatgtggtacagctccgggagcggcactggaggatattcagtctctctggcaccttggagacagtgcgaggccgaggggtagtgggcagggaaccagtgttatccaaggagcagcctgcgttccagtatagcagccacgtctcgctgcaggcttccagtgggcacatgtggggcacgttccgctttgaaagacctgatggctcccactttgatgttcggattcctcccttctccctggaaagcaataaagatgagaagacaccaccctcaggccttcactggtaggccagctgaggccccaagtgcccaggcttggtcaccgggaagaacaactctcatcccacaattgctgcagaactcttctctccccatcatgggccacagtggggaggggtggtataacttttcttcagaagacccatgtgggacacctccaaggctggcctcctcataagccctgcctacaccatgttccagtaaacctctccaccaaggaactgtgttcagctgccacaggcctggaggagtttcctggcctgtcacgtgaggtttgatcagtaaaccagtgcacgcttggccacccttgccatttctgctcccagagtctcaggctccccttctgacccagtgtgcgcccttgactgctttctttgctgcccttccagggagctgcccccctggtagggcatgtgcctgtttccctctcagcctggaggctggctggacatctcctagggtcactgtgcctctcagctagttggcgggggtgctggactggactcttgttcactttaccttctgccaaatgcagagagggaggccagtgtcagggtcggagtggcctggctcttagcactgaccgaccattgccatttctggcctcgctaggcccaggagaggagggaggcaagccagtcgggtttcctggagcaatgggtgtgccagccctcagcatgactctgccaagcatccagaccacaaatgcaggaatttggctgaggagcagctttaggtatggattgatgactaagtcaagctacttcctgagcttctctcagatttccaagagccagagatgaattgtgctgcatcttgccccaattcttaggatttcttttcctccgccactgcagtgattgttagaggtagttttcttgaattaatattaaatcacagttccagcccttgttattcttgtccttagtcctccagggggagctggggttgcagggcaacagtacagtcgcgcttacgacctggctagaacacaaggtcagatgataaacagaagcacaggaactcagcccatggccgcaagctggtcaaggcctgctcactgtaaacatggctctgtaccattgagtttaacacaattttattagaaattagtgtttgcttccatcacttatgctgagcaaccaaatattacagttatgtgataaaggaaaaattctttcctgcccaggacctgcgccatcctttaggccgaccttggtcacataccaaattcaataaaacccaatactggcctgtgttgttaacagcaggctgccaggtttctcagaaactgacaagaaaatctgaccttcatccatactttgtttacttacccctgggctgcttggagttgaaaaatgcacacagccaagagttgctttctgaatagggctggaaactttcaaagaaaacccccaaacttttaagtcacaaagtctgattaaagaagctaagatcatgtcagtgagttcaatgttagtattttccttaagaccaaggagagattttcagtcagagaagataaatgcccagtcccagactactgtgctttctcggcaaaaaagactgagacactgaggatgtgaatgtcaaagtagtaagcagggactaaaggggatggggaggtcaaaaggcaagcatcacaacacctcagtggggagctgggaatttgagtgttaaaggacctcaagagggcagctgagaaaataggccagtggtctcaggctgacgcattccagtctctgtgggaaagtcataaagccaaagcctgaatttggccaaagaagtggatttgtctttatcttgttacctcaatgagggctggaagaactagtagctgatcaccaaggtacctgacctgagagtcttagtgctgtttatacattcaagactgtgactaacataaaatgcctaattagaaagtcacatttcccctgtcccgccgtcatgtcacttcaggtccttgtgtctaaccctgggtctggcatttgcccataggctctgtggcatcagctatcataagagtagtcaagagagatgaacttgataacctgtgttctctccaaagagcagaaagtgggtactatacgtggctacgttgctttgttaggctggcagaacagtccctccctgacagcattcctttggaaaataattcagataagctgaattctggttt

SEQ ID NO: 365601 - DNA, 1570 bp, Homo sapiens
tgctctgagctccggggtgggaccaggcgggccaagagggccgggacgccgcgcggggcagtgtgggactggggcggaacgccgcccggccgcgggtcgggctctgtgtcagcagccgggcgggcgctcgggcgggacatggcagcctgtacagcccggcgggccctggccgtgggcagccgctggtggtcccggtcgctgactggggcccggtggccaaggccgctctgtgcggcggccggagctggagccttctcgccagcgtcgaccacgacgacgcggaggcacctctcgtcccgaaaccgaccagagggcaaagtgttggagacagttggtgtgtttgaggtgccaaaacagaatggaaaatatgagaccgggcagcttttccttcatagcatttttggctaccgaggtgtcgtcctgtttccctggcaggccagactgtatgaccgggatgtggcttctgcagctccagaaaaagcagagaaccctgctggccatggctccaaggaggtgaaaggcaaaactcacacttactatcaggtgctgattgatgctcgtgactgcccacatatatctcagagatctcagacagaagctgtgaccttcttggctaaccatgatgacagtcgggccctctatgccatcccaggcttggactatgtcagccatgaagacatcctcccctacacctccactgatcaggttcccatccaacatgaactctttgaaagatttcttctgtatgaccagacaaaagcacctccttttgtggctcgggagacgctaagggcctggcaagagaagaatcacccctggctggagctctccgatgttcatcgggaaacaactgagaacatacgtgtcactgtcatccccttctacatgggcatgagggaagcccagaattcccacgtgtactggtggcgctactgtatccgtttggagaaccttgacagtgatgtggtacagctccgggagcggcactggaggatattcagtctctctggcaccttggagacagtgcgaggccgaggggtagtgggcagggaaccagtgttatccaaggagcagcctgcgttccagtatagcagccacgtctcgctgcaggcttccagtgggcacatgtggggcacgttccgctttgaaagacctgatggctcccactttgatgttcggattcctcccttctccctggaaagcaataaagatgagaagacaccaccctcaggccttcactggtaggccagctgaggccccaagtgcccaggcttggtcaccgggaagaacaactctcatcccacaattgctgcagaactcttctctccccatcatgggccacagtgggtctcttaatttgattgtggggttctttttgtggggaggggtggtataacttttcttcagaagacccatgtgggacacctccaaggctggcctcctcataagccctgcctacaccatgttccagtaaacctctccaccaaggaactgtgttcagctgccacaggcctggaggagtttcctggcctgtcacgtgaggtttgatcagtaaaccagtgcacgcttg

SEQ ID NO: 365602 - DNA, 2078 bp, Homo sapiens
tgctctgagctccggggtgggaccaggcgggccaagagggccgggacgccgcgcggggcagtgtgggactggggcggaacgccgcccggccgcgggtcgggctctgtgtcagcagccgggcgggcgctcgggcgggacatggcagcctgtacagcccggcgggccctggccgtgggcagccgctggtggtcccggtcgctgactggggcccggtggccaaggccgctctgtgcggcggccggagctggagccttctcgccagcgtcgaccacgacgacgcggaggcacctctcgtcccgaaaccgaccagagggcaaagtgttggagacagttggtgtgtttgaggtgccaaaacagaatggaaaatatgagaccgggcagcttttccttcatagcatttttggctaccgaggtgtcgtcctgtttccctggcaggccagactgtatgaccgggatgtggcttctgcagctccagaaaaagcagagaaccctgctggccatggctccaaggaggtgaaaggcaaaactcacacttactatcaggtgctgattgatgctcgtgactgcccacatatatctcagagatctcagacagaagctgtgaccttcttggctaaccatgatgacagtcgggccctctatgccatcccaggcttggactatgtcagccatgaagacatcctcccctacacctccactgatcaggttcccatccaacatgaactctttgaaagatttcttctgtatgaccagacaaaagcacctccttttgtggctcgggagacgctaagggcctggcaagagaagaatcacccctggctggagctctccgatgttcatcgggaaacaactgagaacatacgtgtcactgtcatccccttctacatgggcatgagggaagcccagaattcccacgtgtactggtggcgctactgtatccgtttggagaaccttgacagtgatgtggtacagctccgggagcggcactggaggatattcagtctctctggcaccttggagacagtgcgaggccgaggggtagtgggcagggaaccagtgttatccaaggagcagcctgcgttccagtatagcagccacgtctcgctgcaggcttccagtgggcacatgtggggcacgttccgctttgaaagacctgatggctcccactttgatgttcggattcctcccttctccctggaaagcaataaagatgagaagacaccaccctcaggccttcactggtaggccagctgaggccccaagtgcccaggcttggtcaccgggaagaacaactctcatcccacaattgctgcagaactcttctctccccatcatgggccacagtgggtctcttaatttgattgtggggttctttttgtggggaggggtggtataacttttcttcagaagacccatgtgggacacctccaaggctggcctcctcataagccctgcctacaccatgttccagtaaacctctccaccaaggaactgtgttcagctgccacaggcctggaggagtttcctggcctgtcacgtgaggtttgatcagtaaaccagtgcacgcttgaaaaaaaaaaaaaaaaaaaaaaaaaaaaaaaaaaaaaaaaaaggggggggcgcggactaaaaagaatactccccgagagggcgcccaaggtaaagccgggctacccagaggtttcttgtggacaaaggggggcccaataaaggagggcggcgacaataaaagagcacacaagcaggggcgcggcgggttaaacacagggtgcgcgaagccgggggaggaacaccctgtgcaacacgctggggagacccccttgcgggagaagggcagacccccttaatcctccggagggggggctgcaggcactttggggcgacgacaaattatctcataaaaagagagatttaatacggccacaaagggggaggaaattatataaaatttttaaaggggtggcatacagcggcgggggtaaacacaaaggcggagaaattatgcttggaggtgggtaaaaaaagttttgggataaccagggaatataagatttttggagaaattttttaaccaggag

SEQ ID NO: 365603 - DNA, 1600 bp, Homo sapiens
tgctctgagctccggggtgggaccaggcgggccaagagggccgggacgccgcgcggggcagtgtgggactggggcggaacgccgcccggccgcgggtcgggctctgtgtcagcagccgggcgggcgctcgggcgggacatggcagcctgtacagcccggcgggccctggccgtgggcagccgctggtggtcccggtcgctgactggggcccggtggccaaggccgctctgtgcggcggccggagctggagccttctcgccagcgtcgaccacgacgacgcggaggcacctctcgtcccgaaaccgaccagagggcaaagtgttggagacagttggtgtgtttgaggtgccaaaacagaatggaaaatatgagaccgggcagcttttccttcatagcatttttggctaccgaggtgtcgtcctgtttccctggcaggccagactgtatgaccgggatgtggcttctgcagctccagaaaaagcagagaaccctgctggccatggctccaaggaggtgaaaggcaaaactcacacttactatcaggtgctgattgatgctcgtgactgcccacatatatctcagagatctcagacagaagctgtgaccttcttggctaaccatgatgacagtcgggccctctatgccatcccaggcttggactatgtcagccatgaagacatcctcccctacacctccactgatcaggttcccatccaacatgaactctttgaaagatttcttctgtatgaccagacaaaagcacctccttttgtggctcgggagacgctaagggcctggcaagagaagaatcacccctggctggagctctccgatgttcatcgggaaacaactgagaacatacgtgtcactgtcatccccttctacatgggcatgagggaagcccagaattcccacgtgtactggtggcgctactgtatccgtttggagaaccttgacagtgatgtggtacagctccgggagcggcactggaggatattcagtctctctggcaccttggagacagtgcgaggccgaggggtagtgggcagggaaccagtgttatccaaggagcagcctgcgttccagtatagcagccacgtctcgctgcaggcttccagtgggcacatgtggggcacgttccgctttgaaagacctgatggctcccactttgatgttcggattcctcccttctccctggaaagcaataaagatgagaagacaccaccctcaggccttcactggtaggccagctgaggccccaagtgcccaggcttggtcaccgggaagaacaactctcatcccacaattgctgcagaactcttctctccccatcatgggccacagtgggtctcttaatttgattgtggggttctttttgtggggaggggtggtataacttttcttcagaagacccatgtgggacacctccaaggctggcctcctcataagccctgcctacaccatgttccagtaaacctctccaccaaggaactgtgttcagctgccacaggcctggaggagtttcctggcctgtcacgtgaggtttgatcagtaaaccagtgcacgcttggcgcggggttggctcgctaccacaagccag

SEQ ID NO: 365604 - DNA, 3313 bp, Homo sapiens
tgctctgagctccggggtgggaccaggcgggccaagagggccgggacgccgcgcggggcagtgtgggactggggcggaacgccgcccggccgcgggtcgggctctgtgtcagcagccgggcgggcgctcgggcgggacatggcagcctgtacagcccggcgggccctggccgtgggcagccgctggtggtcccggtcgctgactggggcccggtggccaaggccgctctgtgcggcggccggagctggagccttctcgccagcgtcgaccacgacgacgcggaggcacctctcgtcccgaaaccgaccagagggcaaagtgttggagacagttggtgtgtttgaggtgccaaaacagaatggaaaatatgagaccgggcagcttttccttcatagcatttttggctaccgaggtgtcgtcctgtttccctggcaggccagactgtatgaccgggatgtggcttctgcagctccagaaaaagcagagaaccctgctggccatggctccaaggaggtgaaaggcaaaactcacacttactatcaggtgctgattgatgctcgtgactgcccacatatatctcagagatctcagacagaagctgtgaccttcttggctaaccatgatgacagtcgggccctctatgccatcccaggcttggactatgtcagccatgaagacatcctcccctacacctccactgatcaggttcccatccaacatgaactctttgaaagatttcttctgtatgaccagacaaaagcacctccttttgtggctcgggagacgctaagggcctggcaagagaagaatcacccctggctggagctctccgatgttcatcgggaaacaactgagaacatacgtgtcactgtcatccccttctacatgggcatgagggaagcccagaattccgggaaccagtgttatccaaggagcagcctgcgttccagtatagcagccacgtctcgctgcaggcttccagtgggcacatgtggggcacgttccgctttgaaagacctgatggctcccactttgatgttcggattcctcccttctccctggaaagcaataaagatgagaagacaccaccctcaggccttcactggtaggccagctgaggccccaagtgcccaggcttggtcaccgggaagaacaactctcatcccacaattgctgcagaactcttctctccccatcatgggccacagtgggtctcttaatttgattgtggggttctttttgtggggaggggtggtataacttttcttcagaagacccatgtgggacacctccaaggctggcctcctcataagccctgcctacaccatgttccagtaaacctctccaccaaggaactgtgttcagctgccacaggcctggaggagtttcctggcctgtcacgtgaggtttgatcagtaaaccagtgcacgcttggccacccttgccatttctgctcccagagtctcaggctccccttctgacccagtgtgcgcccttgactgctttctttgctgcccttccagggagctgcccccctggtagggcatgtgcctgtttccctctcagcctggaggctggctggacatctcctagggtcactgtgcctctcagctagttggcgggggtgctggactggactcttgttcactttaccttctgccaaatgcagagagggaggccagtgtcagggtcggagtggcctggctcttagcactgaccgaccattgccatttctggcctcgctaggcccaggagaggagggaggcaagccagtcgggtttcctggagcaatgggtgtgccagccctcagcatgactctgccaagcatccagaccacaaatgcaggaatttggctgaggagcagctttaggtatggattgatgactaagtcaagctacttcctgagcttctctcagatttccaagagccagagatgaattgtgctgcatcttgccccaattcttaggatttcttttcctccgccactgcagtgattgttagaggtagttttcttgaattaatattaaatcacagttccagcccttgttattcttgtccttagtcctccagggggagctggggttgcagggcaacagtacagtcgcgcttacgacctggctagaacacaaggtcagatgataaacagaagcacaggaactcagcccatggccgcaagctggtcaaggcctgctcactgtaaacatggctctgtaccattgagtttaacacaattttattagaaattagtgtttgcttccatcacttatgctgagcaaccaaatattacagttatgtgataaaggaaaaattctttcctgcccaggacctgcgccatcctttaggccgaccttggtcacataccaaattcaataaaacccaatactggcctgtgttgttaacagcaggctgccaggtttctcagaaactgacaagaaaatctgaccttcatccatactttgtttacttacccctgggctgcttggagttgaaaaatgcacacagccaagagttgctttctgaatagggctggaaactttcaaagaaaacccccaaacttttaagtcacaaagtctgattaaagaagctaagatcatgtcagtgagttcaatgttagtattttccttaagaccaaggagagattttcagtcagagaagataaatgcccagtcccagactactgtgctttctcggcaaaaaagactgagacactgaggatgtgaatgtcaaagtagtaagcagggactaaaggggatggggaggtcaaaaggcaagcatcacaacacctcagtggggagctgggaatttgagtgttaaaggacctcaagagggcagctgagaaaataggccagtggtctcaggctgacgcattccagtctctgtgggaaagtcataaagccaaagcctgaatttggccaaagaagtggatttgtctttatcttgttacctcaatgagggctggaagaactagtagctgatcaccaaggtacctgacctgagagtcttagtgctgtttatacattcaagactgtgactaacataaaatgcctaattagaaagtcacatttcccctgtcccgccgtcatgtcacttcaggtccttgtgtctaaccctgggtctggcatttgcccataggctctgtggcatcagctatcataagagtagtcaagagagatgaacttgataacctgtgttctctccaaagagcagaaagtgggtactatacgtggctacgttgctttgttaggctggcagaacagtccctccctgacagcattcctttggaaaataattcagataagctgaattctggttt

SEQ ID NO: 365605 - DNA, 1114 bp, Homo sapiens
  misc_feature (928)..(928): n is a, c, g, or t
  misc_feature (960)..(960): n is a, c, g, or t
  misc_feature (962)..(962): n is a, c, g, or t
  misc_feature (964)..(964): n is a, c, g, or t
tgctctgagctccggggtgggaccaggcgggccaagagggccgggacgccgcgcggggcagtgtgggactggggcggaacgccgcccggccgcgggtcgggctctgtgtcagcagccgggcgggcgctcgggcgggacatggcagcctgtacagcccggcgggccctggccgtgggcagccgctggtggtcccggtcgctgactggggcccggtggccaaggccgctctgtgcggcggccggagctggagccttctcgccagcgtcgaccacgacgacgcggaggcacctctcgtcccgaaaccgaccagagggcaaagtgttggagacagttggtgtgtttgaggtgccaaaacagaatggaaaatatgagaccgggcagcttttccttcatagcatttttggctaccgaggtgtcgtcctgtttccctggcaggccagactgtatgaccgggatgtggcttctgcagctccagaaaaagcagagaaccctgctggccatggctccaaggaggtgaaaggcaaaactcacacttactatcaggtgctgattgatgctcgtgactgcccacatatatctcagagatctcagacagaagctgtgaccttcttggctaaccatgatgacagtcgggccctctatgccatcccaggcttggactatgtcagccatgaagacatcctcccctacacctccactgatcaggttcccatccaacatgaactctttgaaagatttcttctgtatgaccagacaaaagcacctccttttgtggctcgggagacgctaagggcctggcaagagaagaatcacccctggctggagctctccgatgttcatcgggaaacaactgagaacatacgtgtcactgtcatccccttctacatgggcatgagggaagcccagaattccagtggtactggggggntactgaatcggtgggaacttgacggagtgggncngncgggagcggctgagggattcggctcgggcctgggaatggcagcccggtttggggggaggtctcgtggccacgtgggcggggcgctgattgggcaaaacgcagtgagggagaggacatcggcaggtcagagcacgaacggcgggggggaag

SEQ ID NO: 365606 - DNA, 560 bp, Homo sapiens
gaacggctacgcggccgcggagccgggggcgggggccgggcgcgcacagaccgatctctggaaacatggctacagaacatgttaatggaaatggtactgaagagcccatggatactacttctgcagttatccattcagaaaattttcagacattgcttgatgctggtttaccacagaaagttgctgaaaaactagatgaaatttacgttgcagggctagttgcacatagtgatttagatgaaagagctattgaagctttaaaagaattcaatgaagacggtgcattggcagttcttcaacagtttaaagacagtgatctctctcatgttcagaacaaaagtgcctttttatgtggagtcatgaagacttacaggcagagagaaaaacaagggaccaaagtagcagattctagtaaaggaccagatgaggcaaaaattaaggtatgtctttctatactccctttagttttaaagtcattttaactgtttcctaattttggtaaatattccttgggtatgaaatggatgtatgttagatgttgagataattcatcaatcttt

SEQ ID NO: 365607 - DNA, 7498 bp, Homo sapiens
agagaggagccgactcggcagggactgggggaccgggccgagagtgcgagcgagcgagggagggagtgagggagcgtgcgagccagaaggggaaaggcggccactcgtgcctgagcgaccgcagaggggagtgggagcagtggggtaaaggagcggggggcgggaataagaaaggccgagagaaggcggacagaggctagtggtggtggtggtggtagggggagaaggaggagctggaggagggcaggggctgagggagtgagtgaagcggacgcgcgagggaggggagggaagggaagggaagggaagggggggtcacgcgggggcgcgcgcgcgcaccgggagcgcgctcggaggcgagtggaactggatcgggtttgctgccagcggcgtgagcttcggccgccattttacaacagctccactcgcgccggacacagggagcagcgagcacgcgtttcccgcaacccgataccatcggacaggatttctccgcctcagcccaacggggagatctctggaaacatggctacagaacatgttaatggaaatggtactgaagagcccatggatactacttctgcagttatccattcagaaaattttcagacattgcttgatgctggtttaccacagaaagttgctgaaaaactagatgaaatttacgttgcagggctagttgcacatagtgatttagatgaaagagctattgaagctttaaaagaattcaatgaagacggtgcattggcagttcttcaacagtttaaagacagtgatctctctcatgttcagaacaaaagtgcctttttatgtggagtcatgaagacttacaggcagagagaaaaacaagggaccaaagtagcagattctagtaaaggaccagatgaggcaaaaattaaggcactcttggaaagaacaggctacacacttgatgtgaccactggacagaggaagtatggaggaccacctccagattccgtttattcaggtcagcagccttctgttggcactgagatatttgtgggaaagatcccaagagatctatttgaggatgaacttgttccattatttgagaaagctggacctatatgggatcttcgtctaatgatggatccactcactggtctcaatagaggttatgcgtttgtcactttttgtacaaaagaagcagctcaggaggctgttaaactgtataataatcatgaaattcgttctggaaaacatattggtgtctgcatctcagttgccaacaataggctttttgtgggctctattcctaagagtaaaaccaaggaacagattcttgaagaatttagcaaagtaacagagggtcttacagacgtcattttataccaccaaccggatgacaagaaaaaaaacagaggcttttgctttcttgaatatgaagatcacaaaacagctgcccaggcaaggcgtaggttaatgagtggtaaagtcaaggtctgggggaatgttggaactgttgaatgggctgatcctatagaagatcctgatcctgaggttatggcaaaggtaaaagtgctgtttgtacgcaaccttgccaatactgtaacagaagagattttagaaaaggcatttagtcagtttgggaaactggaacgagtgaagaagttaaaagattatgcgttcattcattttgatgagcgagatggtgctgtcaaggctatggaagaaatgaatggcaaagacttggagggagaaaatattgaaattgtttttgccaagccaccagatcagaaaaggaaagaaagaaaagctcagaggcaagcagcaaaaaatcaaatgtatgacgattactactattatggtccacctcatatgccccctccaacaagaggtcgagggcgtggaggtagaggtggttatggatatcctccagattattatggatatgaagattattatgattattatggttatgattaccataactatcgtggtggatatgaagatccatactatggttatgaagattttcaagttggagctagaggaaggggtggtagaggagcaaggggtgctgctccatccagaggtcgtggggctgctcctccccgcggtagagccggttattcacagagaggaggtcctggatcagcaagaggcgttcgaggtgcgagaggaggtgcccaacaacaaagaggccgcgggcagggaaaaggggtcgaggccggtcctgacctgttacaatgaagactgacttgctatgtgggattacaccagaagcttgcagtggagtaatggtaaggaaatcaagcaaccttaaatatgtcggctgtataggagcatattctattgcagaagaccttcctatgaagatcatggaatcaaatacgggacattgaactaatacttggactttgatatgaatttctttaacaattttctctgcagtgcaagttattaaactaaagctactctattttcaaaatgtgttccaacagaaatccttcataactcctagcatggtatcttaataaagaataaagttcttttaaaaatctgctctaagtagatttttccccttttttaaattaaggatcccaacagtggtattttgaaatattctcttgaatttgtgcatttaaattttattgcagtggtatagatgaatgccactgatggtatccttaaattttatttctgctcaccaaggttaatcatgattgtctatatcttttttatagtgatcacttttgaattgtgttcagatatgcagtttcaggtgtaatcatcagagctggttagtcaggcattccagatagtggttcttttcagaacctttttaaaagggttggttaactacctcagtagcagaggattgaactataccctgtctgtactgtacatagaaaatctttgtagataaaagcaaggcttgttaaatatgatatgagggtaagattttaatataccaaatgtaacattcttagttgcctttagtttcagaggcttgtaagacttcctcatgaccatcataacaggccttgcttttgtcgtattttgtggctgaaaaagcagccttgcttcttcagatattgtagttatttggatgtataatagtttagcaagatgttacttttgtaagacatcagatgttcaaaaaagtgcatccgaacttgtactaaatactgcagtgtccctttataaaaagtcagactaaaactgacaattgtacagcgaacctgacatttggatattttgaagttttttcataaatcatagaaattagtatatggctgtagtttagctttttaggtaaaaggtatgtttcattagtgcatttcttcctgctgatcactgtaaacatgtgaatcagctttccatttcttatgcaggtcatgataacttgtagagtagagtacaatcatttgtgctatgtttttaattttctaaagcaccttgatgacagtgagtgtccagtggtgaagcatcctctattgaaccaccctcaaaaatttttttgccaagtcctaagttgatagcttaaagtaaaaagtgaaaattatagtttcattaggacttggtgtaaagaaatcccctccccccttccccaaagggatactgcagttatatcacatacccaataggcaccacgatgaagatcagagcttatacttaattaaggttttatacacaccagttccccagtaaatgcaaatttaacaagaaaatcagacatgtcatatgttcaaaatgctcatggcaaacaatcattttgcattcctgcaaataaaattgttttatactgtaagctggaggcgagtgtaacttatttttgtaataaagtttttattttttttatgtgtcattaatataaatgtgtgttagtgtagaaatcttctggtttaaaaacttagaattgcacacatttcagtatgtttatttgtacttacataattttagaatagtggttgccaatagcctgtatgtttcacattaattggttttttgttatctaaataaatcattttagtatgttgtatgtcagttactgggatagctgggacatagagtgtaatttaaaatttgtcaataagtattcattggaatatatgtaaatgtgccttgccggttattgaaacttatctacaaaatgagtatggggtgacaaaaattagttcctggtgcttaatgaaactttctgccactgattttatatattaccccgtgcttttttaaagtacatctctctcaaaacttagtgtaagtttgagggctacacaaaacatttacatttcattctaacataatgaatataataggttgtggaaagtgggtaaactaaatgtagccttcagtaaaattgaatctcagtgtaatccttggtgctggcatttctcagttccgaggagttaaatgatcccatctaagaggtcattgccatgcctattggcactttactgtcatagcatttttaagggacactgtcaaggtgtttaagttctcagaattacttgttgggattttaggacaggtttgtttacttaaagtaagaactgcattgtcaaagttgaaagaggaacacttttgtgagttcacaaatgtgttcttaagaaaacattaaaatatggagctctgggttttcaagactatttggcattcttaatttggggacttgggagggaaactgataaaaagaaattgaagaattgatggttatacttaaagaagggtaatgtaaacagtggtgatgaaatatatacacatcaagtgaaattacttgacagtgttcatttgaatgactttgaattcaagccattataattacttttaaaattaaatatcatttgcactgttctgataatgggtgcagtttttgagcaatataatcagagctaaatatgcatgtagtgattagtgatgtgaacaattaacgttctgagaagaaatactaactgtggtattttcaaacttaaatttctgtagtaaaatcagtatcaaagtcttatcagatcaaggaaaaacaggcaatgcatataaacatacttttgaatgttgtgtggcctataaagcaataatgcaatttatatggaatgtcatgggatatgagaaatggaaatgcaaaaataactaatcctttagtaaaaatgtcaacatgttaaagggggaatgttaactaatgtaggttattgctatttgtgatttgtttatgggttcttggctttgacagcttcaaagaatggacagtgataagttaaaagaaattttgtatattgtcaaggaaagggtcttaaatccgagtcaagtcccttccttggggtaaaaaatgtattcttaaagcattctgatgttaaaaagaaaacttaagttatctaaccaaaacagacgcaagattttgtttctgcagactacttggcaatcaaaagtgatcataaatttaggttatcagttttcagaaagttgctttgtgagaaaattttgttagatatattctcccaagcatgctttttgtggaaggttttcagccattgccactgaatcagatgttaaaaatgaagggaaaattgagtgtgcacacacacaactgttgtacactcatgattgcagtttttagcttaagaaacttttctaccagttactgtgaatctgacttaaaatgtaaagtttcctcatgataaaataggaacaacatagaaatggattgatggggtgatctgagttattgtatataaaagtttttaaagaatagaatgaacatcaagctagataggcaaaaattgacacattcagaacagcttttttgactgcgaagccaaaagttgtcagaaacagcaaaagatcccttattattacagagtattttacgtagtctctattttaaggagagaaattaaatagaagggcttcatgcatttaggggagggtgctaaaacttctcaagttcgtcaaacttacaggaatacccaccatgatcattttctctctaattatgtataccacaaaattttcatctggccataggaattcactggtgggtgtaaaattaatgactaaagaaattaagtgacaaatacataaaagaaacagacttgtggggatattgttttaaggtgtattaattactcagtgatgataccactcaatagggcatgccactacttttcttaagatgctaattatgaagcagtgctcacaggcattttttaactagcaaattagtagatggacttttggggtctgtcactttttaaaagtatttaagacttaaattctattagcaccacagtctgccttcagtaatacacctaaaatatttttcaggaccagaagcattcagtttgaaaatttgcagatgcaaaccagtattattactaacgctctgggtcaaagattaggtttttaatattaacagtagtctggtaaatatttagaagtctggcattgagaaacaaaagcttgtacctgactagtatttttatttaaaaaaattagttctgttagcttatttaaattgtgttttatttatccgtagaatttatatttatttcattcctttcatctcactgaaaactgtctgcaggccctttgatttggattagatgtgtgaagtactgtcttttgccaaaaacctcaaattacctgttcttttcaacgtagtgggtttgtgcttgtttggagatcagttcaaaaactatctgtactatctgtactgcctctgatgttaagattttatgtatagcataaggaagctagctctgactatattttcctaagaataaagacctatttttgtagcatgtcttaggatctccaggagtccaagaattattgtgggtgtcctccaattcatcactcttcacttaacagcttttaagtagacacttggaatctttagaggtctgtcgccctttgattatccatacattcgaagtaactagccaatggtgaaaaattcctcaagatatcctcagttgcaatcacattactggaagatgaatagaataaatgtattaggctggtcttaatttttgatggaaatattctgttgtcccgtacttgccattggatttgataaagttagtggtaatttggaaagaatcggggacttgccaatatatttgtgggttttagcttatacccctaggatttcttggttgcgggacgagcagttttggccacttccatcaggacaagactttttaggtcacttagtgcaggttttagtttctattttggattaacaacatttatattgattatcgaaaagaagctttcatcatttcagaacagtcctggaagtttgactttgagtgtgggagaagtcctaataaaccattttggaaattagtgtctccaagtgttacagcttcctaaaatgggtttctaacacagtgggatcaaaataaggttattttaggataatatactgtaaacttaattgactgtctgattttctactttgtctataaagtggcttacaacaggttctaatctagaaaggagttataaaggttatctgtaatgtttatgaatt

SEQ ID NO: 365608 - DNA, 7444 bp, Homo sapiens
agagaggagccgactcggcagggactgggggaccgggccgagagtgcgagcgagcgagggagggagtgagggagcgtgcgagccagaaggggaaaggcggccactcgtgcctgagcgaccgcagaggggagtgggagcagtggggtaaaggagcggggggcgggaataagaaaggccgagagaaggcggacagaggctagtggtggtggtggtggtagggggagaaggaggagctggaggagggcaggggctgagggagtgagtgaagcggacgcgcgagggaggggagggaagggaagggaagggaagggggggtcacgcgggggcgcgcgcgcgcaccgggagcgcgctcggaggcgagtggaactggatcgggtttgctgccagcggcgtgagcttcggccgccattttacaacagctccactcgcgccggacacagggagcagcgagcacgcgtttcccgcaacccgataccatcggacaggatttctccgcctcagcccaacggggagatctctggaaacatggctacagaacatgttaatggaaatggtactgaagagcccatggatactacttctgcagttatccattcagaaaattttcagacattgcttgatgctggtttaccacagaaagttgctgaaaaactagatgaaatttacgttgcagggctagttgcacatagtgatttagatgaaagagctattgaagctttaaaagaattcaatgaagacggtgcattggcagttcttcaacagtttaaagacagtgatctctctcatgttcagaacaaaagtgcctttttatgtggagtcatgaagacttacaggcagagagaaaaacaagggaccaaagtagcagattctagtaaaggaccagatgaggcaaaaattaaggcactcttggaaagaacaggctacacacttgatgtgaccactggacagaggaagtatggaggaccacctccagattccgtttattcaggtcagcagccttctgttggcactgagatatttgtgggaaagatcccaagagatctatttgaggatgaacttgttccattatttgagaaagctggacctatatgggatcttcgtctaatgatggatccactcactggtctcaatagaggttatgcgtttgtcactttttgtacaaaagaagcagctcaggaggctgttaaactgtataataatcatgaaattcgttctggaaaacatattggtgtctgcatctcagttgccaacaataggctttttgtgggctctattcctaagagtaaaaccaaggaacagattcttgaagaatttagcaaagtaacagagggtcttacagacgtcattttataccaccaaccggatgacaagaaaaaaaacagaggcttttgctttcttgaatatgaagatcacaaaacagctgcccaggcaaggcgtaggttaatgagtggtaaagtcaaggtctgggggaatgttggaactgttgaatgggctgatcctatagaagatcctgatcctgaggttatggcaaaggtaaaagtgctgtttgtacgcaaccttgccaatactgtaacagaagagattttagaaaaggcatttagtcagtttgggaaactggaacgagtgaagaagttaaaagattatgcgttcattcattttgatgagcgagatggtgctgtcaaggctatggaagaaatgaatggcaaagacttggagggagaaaatattgaaattgtttttgccaagccaccagatcagaaaaggaaagaaagaaaagctcagaggcaagcagcaaaaaatcaaatgtatgacgattactactattatggtccacctcatatgccccctccaacaagaggtcgagggcgtggaggtagaggtggttatggatatcctccagattattatggatatgaagattattatgattattatggttatgattaccataactatcgtggtggatatgaagatccatactatggttatgaagattttcaagttggagctagaggaaggggtggtagaggagcaaggggtgctgctccatccagaggtcgtggggctgctcctccccgcggtagagccggttattcacagagaggaggtcctggatcacagggaaaaggggtcgaggccggtcctgacctgttacaatgaagactgacttgctatgtgggattacaccagaagcttgcagtggagtaatggtaaggaaatcaagcaaccttaaatatgtcggctgtataggagcatattctattgcagaagaccttcctatgaagatcatggaatcaaatacgggacattgaactaatacttggactttgatatgaatttctttaacaattttctctgcagtgcaagttattaaactaaagctactctattttcaaaatgtgttccaacagaaatccttcataactcctagcatggtatcttaataaagaataaagttcttttaaaaatctgctctaagtagatttttccccttttttaaattaaggatcccaacagtggtattttgaaatattctcttgaatttgtgcatttaaattttattgcagtggtatagatgaatgccactgatggtatccttaaattttatttctgctcaccaaggttaatcatgattgtctatatcttttttatagtgatcacttttgaattgtgttcagatatgcagtttcaggtgtaatcatcagagctggttagtcaggcattccagatagtggttcttttcagaacctttttaaaagggttggttaactacctcagtagcagaggattgaactataccctgtctgtactgtacatagaaaatctttgtagataaaagcaaggcttgttaaatatgatatgagggtaagattttaatataccaaatgtaacattcttagttgcctttagtttcagaggcttgtaagacttcctcatgaccatcataacaggccttgcttttgtcgtattttgtggctgaaaaagcagccttgcttcttcagatattgtagttatttggatgtataatagtttagcaagatgttacttttgtaagacatcagatgttcaaaaaagtgcatccgaacttgtactaaatactgcagtgtccctttataaaaagtcagactaaaactgacaattgtacagcgaacctgacatttggatattttgaagttttttcataaatcatagaaattagtatatggctgtagtttagctttttaggtaaaaggtatgtttcattagtgcatttcttcctgctgatcactgtaaacatgtgaatcagctttccatttcttatgcaggtcatgataacttgtagagtagagtacaatcatttgtgctatgtttttaattttctaaagcaccttgatgacagtgagtgtccagtggtgaagcatcctctattgaaccaccctcaaaaatttttttgccaagtcctaagttgatagcttaaagtaaaaagtgaaaattatagtttcattaggacttggtgtaaagaaatcccctccccccttccccaaagggatactgcagttatatcacatacccaataggcaccacgatgaagatcagagcttatacttaattaaggttttatacacaccagttccccagtaaatgcaaatttaacaagaaaatcagacatgtcatatgttcaaaatgctcatggcaaacaatcattttgcattcctgcaaataaaattgttttatactgtaagctggaggcgagtgtaacttatttttgtaataaagtttttattttttttatgtgtcattaatataaatgtgtgttagtgtagaaatcttctggtttaaaaacttagaattgcacacatttcagtatgtttatttgtacttacataattttagaatagtggttgccaatagcctgtatgtttcacattaattggttttttgttatctaaataaatcattttagtatgttgtatgtcagttactgggatagctgggacatagagtgtaatttaaaatttgtcaataagtattcattggaatatatgtaaatgtgccttgccggttattgaaacttatctacaaaatgagtatggggtgacaaaaattagttcctggtgcttaatgaaactttctgccactgattttatatattaccccgtgcttttttaaagtacatctctctcaaaacttagtgtaagtttgagggctacacaaaacatttacatttcattctaacataatgaatataataggttgtggaaagtgggtaaactaaatgtagccttcagtaaaattgaatctcagtgtaatccttggtgctggcatttctcagttccgaggagttaaatgatcccatctaagaggtcattgccatgcctattggcactttactgtcatagcatttttaagggacactgtcaaggtgtttaagttctcagaattacttgttgggattttaggacaggtttgtttacttaaagtaagaactgcattgtcaaagttgaaagaggaacacttttgtgagttcacaaatgtgttcttaagaaaacattaaaatatggagctctgggttttcaagactatttggcattcttaatttggggacttgggagggaaactgataaaaagaaattgaagaattgatggttatacttaaagaagggtaatgtaaacagtggtgatgaaatatatacacatcaagtgaaattacttgacagtgttcatttgaatgactttgaattcaagccattataattacttttaaaattaaatatcatttgcactgttctgataatgggtgcagtttttgagcaatataatcagagctaaatatgcatgtagtgattagtgatgtgaacaattaacgttctgagaagaaatactaactgtggtattttcaaacttaaatttctgtagtaaaatcagtatcaaagtcttatcagatcaaggaaaaacaggcaatgcatataaacatacttttgaatgttgtgtggcctataaagcaataatgcaatttatatggaatgtcatgggatatgagaaatggaaatgcaaaaataactaatcctttagtaaaaatgtcaacatgttaaagggggaatgttaactaatgtaggttattgctatttgtgatttgtttatgggttcttggctttgacagcttcaaagaatggacagtgataagttaaaagaaattttgtatattgtcaaggaaagggtcttaaatccgagtcaagtcccttccttggggtaaaaaatgtattcttaaagcattctgatgttaaaaagaaaacttaagttatctaaccaaaacagacgcaagattttgtttctgcagactacttggcaatcaaaagtgatcataaatttaggttatcagttttcagaaagttgctttgtgagaaaattttgttagatatattctcccaagcatgctttttgtggaaggttttcagccattgccactgaatcagatgttaaaaatgaagggaaaattgagtgtgcacacacacaactgttgtacactcatgattgcagtttttagcttaagaaacttttctaccagttactgtgaatctgacttaaaatgtaaagtttcctcatgataaaataggaacaacatagaaatggattgatggggtgatctgagttattgtatataaaagtttttaaagaatagaatgaacatcaagctagataggcaaaaattgacacattcagaacagcttttttgactgcgaagccaaaagttgtcagaaacagcaaaagatcccttattattacagagtattttacgtagtctctattttaaggagagaaattaaatagaagggcttcatgcatttaggggagggtgctaaaacttctcaagttcgtcaaacttacaggaatacccaccatgatcattttctctctaattatgtataccacaaaattttcatctggccataggaattcactggtgggtgtaaaattaatgactaaagaaattaagtgacaaatacataaaagaaacagacttgtggggatattgttttaaggtgtattaattactcagtgatgataccactcaatagggcatgccactacttttcttaagatgctaattatgaagcagtgctcacaggcattttttaactagcaaattagtagatggacttttggggtctgtcactttttaaaagtatttaagacttaaattctattagcaccacagtctgccttcagtaatacacctaaaatatttttcaggaccagaagcattcagtttgaaaatttgcagatgcaaaccagtattattactaacgctctgggtcaaagattaggtttttaatattaacagtagtctggtaaatatttagaagtctggcattgagaaacaaaagcttgtacctgactagtatttttatttaaaaaaattagttctgttagcttatttaaattgtgttttatttatccgtagaatttatatttatttcattcctttcatctcactgaaaactgtctgcaggccctttgatttggattagatgtgtgaagtactgtcttttgccaaaaacctcaaattacctgttcttttcaacgtagtgggtttgtgcttgtttggagatcagttcaaaaactatctgtactatctgtactgcctctgatgttaagattttatgtatagcataaggaagctagctctgactatattttcctaagaataaagacctatttttgtagcatgtcttaggatctccaggagtccaagaattattgtgggtgtcctccaattcatcactcttcacttaacagcttttaagtagacacttggaatctttagaggtctgtcgccctttgattatccatacattcgaagtaactagccaatggtgaaaaattcctcaagatatcctcagttgcaatcacattactggaagatgaatagaataaatgtattaggctggtcttaatttttgatggaaatattctgttgtcccgtacttgccattggatttgataaagttagtggtaatttggaaagaatcggggacttgccaatatatttgtgggttttagcttatacccctaggatttcttggttgcgggacgagcagttttggccacttccatcaggacaagactttttaggtcacttagtgcaggttttagtttctattttggattaacaacatttatattgattatcgaaaagaagctttcatcatttcagaacagtcctggaagtttgactttgagtgtgggagaagtcctaataaaccattttggaaattagtgtctccaagtgttacagcttcctaaaatgggtttctaacacagtgggatcaaaataaggttattttaggataatatactgtaaacttaattgactgtctgattttctactttgtctataaagtggcttacaacaggttctaatctagaaaggagttataaaggttatctgtaatgtttatgaatt

SEQ ID NO: 365609 - DNA, 7131 bp, Homo sapiens
agagaggagccgactcggcagggactgggggaccgggccgagagtgcgagcgagcgagggagggagtgagggagcgtgcgagccagaaggggaaaggcggccactcgtgcctgagcgaccgcagaggggagtgggagcagtggggtaaaggagcggggggcgggaataagaaaggccgagagaaggcggacagaggctagtggtggtggtggtggtagggggagaaggaggagctggaggagggcaggggctgagggagtgagtgaagcggacgcgcgagggaggggagggaagggaagggaagggaagggggggtcacgcgggggcgcgcgcgcgcaccgggagcgcgctcggaggcgagtggaactggatcgggtttgctgccagcggcgtgagcttcggccgccattttacaacagctccactcgcgccggacacagggagcagcgagcacgcgtttcccgcaacccgataccatcggacaggatttctccgcctcagcccaacggggagatctctggaaacatggctacagaacatgttaatggaaatggtactgaagagcccatggatactacttctgcagttatccattcagaaaattttcagacattgcttgatgctggtttaccacagaaagttgctgaaaaactagatgaaatttacgttgcagggctagttgcacatagtgatttagatgaaagagctattgaagctttaaaagaattcaatgaagacggtgcattggcagttcttcaacagtttaaagacagtgatctctctcatgttcagaacaaaagtgcctttttatgtggagtcatgaagacttacaggcagagagaaaaacaagggaccaaagtagcagattctagtaaaggaccagatgaggcaaaaattaaggcactcttggaaagaacaggctacacacttgatgtgaccactggacagaggaagtatggaggaccacctccagattccgtttattcaggtcagcagccttctgttggcactgagatatttgtgggaaagatcccaagagatctatttgaggatgaacttgttccattatttgagaaagctggacctatatgggatcttcgtctaatgatggatccactcactggtctcaatagaggttatgcgtttgtcactttttgtacaaaagaagcagctcaggaggctgttaaactgtataataatcatgaaattcgttctggaaaacatattggtgtctgcatctcagttgccaacaataggctttttgtgggctctattcctaagagtaaaaccaaggaacagattcttgaagaatttagcaaagtaacagagggtcttacagacgtcattttataccaccaaccggatgacaagaaaaaaaacagaggcttttgctttcttgaatatgaagatcacaaaacagctgcccaggcaaggcgtaggttaatgagtggtaaagtcaaggtctgggggaatgttggaactgttgaatgggctgatcctatagaagatcctgatcctgaggttatggcaaaggtaaaagtgctgtttgtacgcaaccttgccaatactgtaacagaagagattttagaaaaggcatttagtcagtttgggaaactggaacgagtgaagaagttaaaagattatgcgttcattcattttgatgagcgagatggtgctgtcaaggctatggaagaaatgaatggcaaagacttggagggagaaaatattgaaattgtttttgccaagccaccagatcagaaaaggaaagaaagaaaagctcagaggcaagcagcaaaaaatcaaatcagggaaaaggggtcgaggccggtcctgacctgttacaatgaagactgacttgctatgtgggattacaccagaagcttgcagtggagtaatggtaaggaaatcaagcaaccttaaatatgtcggctgtataggagcatattctattgcagaagaccttcctatgaagatcatggaatcaaatacgggacattgaactaatacttggactttgatatgaatttctttaacaattttctctgcagtgcaagttattaaactaaagctactctattttcaaaatgtgttccaacagaaatccttcataactcctagcatggtatcttaataaagaataaagttcttttaaaaatctgctctaagtagatttttccccttttttaaattaaggatcccaacagtggtattttgaaatattctcttgaatttgtgcatttaaattttattgcagtggtatagatgaatgccactgatggtatccttaaattttatttctgctcaccaaggttaatcatgattgtctatatcttttttatagtgatcacttttgaattgtgttcagatatgcagtttcaggtgtaatcatcagagctggttagtcaggcattccagatagtggttcttttcagaacctttttaaaagggttggttaactacctcagtagcagaggattgaactataccctgtctgtactgtacatagaaaatctttgtagataaaagcaaggcttgttaaatatgatatgagggtaagattttaatataccaaatgtaacattcttagttgcctttagtttcagaggcttgtaagacttcctcatgaccatcataacaggccttgcttttgtcgtattttgtggctgaaaaagcagccttgcttcttcagatattgtagttatttggatgtataatagtttagcaagatgttacttttgtaagacatcagatgttcaaaaaagtgcatccgaacttgtactaaatactgcagtgtccctttataaaaagtcagactaaaactgacaattgtacagcgaacctgacatttggatattttgaagttttttcataaatcatagaaattagtatatggctgtagtttagctttttaggtaaaaggtatgtttcattagtgcatttcttcctgctgatcactgtaaacatgtgaatcagctttccatttcttatgcaggtcatgataacttgtagagtagagtacaatcatttgtgctatgtttttaattttctaaagcaccttgatgacagtgagtgtccagtggtgaagcatcctctattgaaccaccctcaaaaatttttttgccaagtcctaagttgatagcttaaagtaaaaagtgaaaattatagtttcattaggacttggtgtaaagaaatcccctccccccttccccaaagggatactgcagttatatcacatacccaataggcaccacgatgaagatcagagcttatacttaattaaggttttatacacaccagttccccagtaaatgcaaatttaacaagaaaatcagacatgtcatatgttcaaaatgctcatggcaaacaatcattttgcattcctgcaaataaaattgttttatactgtaagctggaggcgagtgtaacttatttttgtaataaagtttttattttttttatgtgtcattaatataaatgtgtgttagtgtagaaatcttctggtttaaaaacttagaattgcacacatttcagtatgtttatttgtacttacataattttagaatagtggttgccaatagcctgtatgtttcacattaattggttttttgttatctaaataaatcattttagtatgttgtatgtcagttactgggatagctgggacatagagtgtaatttaaaatttgtcaataagtattcattggaatatatgtaaatgtgccttgccggttattgaaacttatctacaaaatgagtatggggtgacaaaaattagttcctggtgcttaatgaaactttctgccactgattttatatattaccccgtgcttttttaaagtacatctctctcaaaacttagtgtaagtttgagggctacacaaaacatttacatttcattctaacataatgaatataataggttgtggaaagtgggtaaactaaatgtagccttcagtaaaattgaatctcagtgtaatccttggtgctggcatttctcagttccgaggagttaaatgatcccatctaagaggtcattgccatgcctattggcactttactgtcatagcatttttaagggacactgtcaaggtgtttaagttctcagaattacttgttgggattttaggacaggtttgtttacttaaagtaagaactgcattgtcaaagttgaaagaggaacacttttgtgagttcacaaatgtgttcttaagaaaacattaaaatatggagctctgggttttcaagactatttggcattcttaatttggggacttgggagggaaactgataaaaagaaattgaagaattgatggttatacttaaagaagggtaatgtaaacagtggtgatgaaatatatacacatcaagtgaaattacttgacagtgttcatttgaatgactttgaattcaagccattataattacttttaaaattaaatatcatttgcactgttctgataatgggtgcagtttttgagcaatataatcagagctaaatatgcatgtagtgattagtgatgtgaacaattaacgttctgagaagaaatactaactgtggtattttcaaacttaaatttctgtagtaaaatcagtatcaaagtcttatcagatcaaggaaaaacaggcaatgcatataaacatacttttgaatgttgtgtggcctataaagcaataatgcaatttatatggaatgtcatgggatatgagaaatggaaatgcaaaaataactaatcctttagtaaaaatgtcaacatgttaaagggggaatgttaactaatgtaggttattgctatttgtgatttgtttatgggttcttggctttgacagcttcaaagaatggacagtgataagttaaaagaaattttgtatattgtcaaggaaagggtcttaaatccgagtcaagtcccttccttggggtaaaaaatgtattcttaaagcattctgatgttaaaaagaaaacttaagttatctaaccaaaacagacgcaagattttgtttctgcagactacttggcaatcaaaagtgatcataaatttaggttatcagttttcagaaagttgctttgtgagaaaattttgttagatatattctcccaagcatgctttttgtggaaggttttcagccattgccactgaatcagatgttaaaaatgaagggaaaattgagtgtgcacacacacaactgttgtacactcatgattgcagtttttagcttaagaaacttttctaccagttactgtgaatctgacttaaaatgtaaagtttcctcatgataaaataggaacaacatagaaatggattgatggggtgatctgagttattgtatataaaagtttttaaagaatagaatgaacatcaagctagataggcaaaaattgacacattcagaacagcttttttgactgcgaagccaaaagttgtcagaaacagcaaaagatcccttattattacagagtattttacgtagtctctattttaaggagagaaattaaatagaagggcttcatgcatttaggggagggtgctaaaacttctcaagttcgtcaaacttacaggaatacccaccatgatcattttctctctaattatgtataccacaaaattttcatctggccataggaattcactggtgggtgtaaaattaatgactaaagaaattaagtgacaaatacataaaagaaacagacttgtggggatattgttttaaggtgtattaattactcagtgatgataccactcaatagggcatgccactacttttcttaagatgctaattatgaagcagtgctcacaggcattttttaactagcaaattagtagatggacttttggggtctgtcactttttaaaagtatttaagacttaaattctattagcaccacagtctgccttcagtaatacacctaaaatatttttcaggaccagaagcattcagtttgaaaatttgcagatgcaaaccagtattattactaacgctctgggtcaaagattaggtttttaatattaacagtagtctggtaaatatttagaagtctggcattgagaaacaaaagcttgtacctgactagtatttttatttaaaaaaattagttctgttagcttatttaaattgtgttttatttatccgtagaatttatatttatttcattcctttcatctcactgaaaactgtctgcaggccctttgatttggattagatgtgtgaagtactgtcttttgccaaaaacctcaaattacctgttcttttcaacgtagtgggtttgtgcttgtttggagatcagttcaaaaactatctgtactatctgtactgcctctgatgttaagattttatgtatagcataaggaagctagctctgactatattttcctaagaataaagacctatttttgtagcatgtcttaggatctccaggagtccaagaattattgtgggtgtcctccaattcatcactcttcacttaacagcttttaagtagacacttggaatctttagaggtctgtcgccctttgattatccatacattcgaagtaactagccaatggtgaaaaattcctcaagatatcctcagttgcaatcacattactggaagatgaatagaataaatgtattaggctggtcttaatttttgatggaaatattctgttgtcccgtacttgccattggatttgataaagttagtggtaatttggaaagaatcggggacttgccaatatatttgtgggttttagcttatacccctaggatttcttggttgcgggacgagcagttttggccacttccatcaggacaagactttttaggtcacttagtgcaggttttagtttctattttggattaacaacatttatattgattatcgaaaagaagctttcatcatttcagaacagtcctggaagtttgactttgagtgtgggagaagtcctaataaaccattttggaaattagtgtctccaagtgttacagcttcctaaaatgggtttctaacacagtgggatcaaaataaggttattttaggataatatactgtaaacttaattgactgtctgattttctactttgtctataaagtggcttacaacaggttctaatctagaaaggagttataaaggttatctgtaatgtttatgaatt

SEQ ID NO: 365610 - DNA, 7038 bp, Homo sapiens
gaacggctacgcggccgcggagccgggggcgggggccgggcgcgcacagaccgatctctggaaacatggctacagaacatgttaatggaaatggtactgaagagcccatggatactacttctgcagttatccattcagaaaattttcagacattgcttgatgctggtttaccacagaaagttgctgaaaaactagatgaaatttacgttgcagggctagttgcacatagtgatttagatgaaagagctattgaagctttaaaagaattcaatgaagacggtgcattggcagttcttcaacagtttaaagacagtgatctctctcatgttcagaacaaaagtgcctttttatgtggagtcatgaagacttacaggcagagagaaaaacaagggaccaaagtagcagattctagtaaaggaccagatgaggcaaaaattaaggcactcttggaaagaacaggctacacacttgatgtgaccactggacagaggaagtatggaggaccacctccagattccgtttattcaggtcagcagccttctgttggcactgagatatttgtgggaaagatcccaagagatctatttgaggatgaacttgttccattatttgagaaagctggacctatatgggatcttcgtctaatgatggatccactcactggtctcaatagaggttatgcgtttgtcactttttgtacaaaagaagcagctcaggaggctgttaaactgtataataatcatgaaattcgttctggaaaacatattggtgtctgcatctcagttgccaacaataggctttttgtgggctctattcctaagagtaaaaccaaggaacagattcttgaagaatttagcaaagtaacagagggtcttacagacgtcattttataccaccaaccggatgacaagaaaaaaaacagaggcttttgctttcttgaatatgaagatcacaaaacagctgcccaggcaaggcgtaggttaatgagtggtaaagtcaaggtctgggggaatgttggaactgttgaatgggctgatcctatagaagatcctgatcctgaggttatggcaaaggtaaaagtgctgtttgtacgcaaccttgccaatactgtaacagaagagattttagaaaaggcatttagtcagtttgggaaactggaacgagtgaagaagttaaaagattatgcgttcattcattttgatgagcgagatggtgctgtcaaggctatggaagaaatgaatggcaaagacttggagggagaaaatattgaaattgtttttgccaagccaccagatcagaaaaggaaagaaagaaaagctcagaggcaagcagcaaaaaatcaaatgtatgacgattactactattatggtccacctcatatgccccctccaacaagaggtcgagggcgtggaggtagaggtggttatggatatcctccagattattatggatatgaagattattatgattattatggttatgattaccataactatcgtggtggatatgaagatccatactatggttatgaagattttcaagttggagctagaggaaggggtggtagaggagcaaggggtgctgctccatccagaggtcgtggggctgctcctccccgcggtagagccggttattcacagagaggaggtcctggatcagcaagaggcgttcgaggtgcgagaggaggtgcccaacaacaaagaggccgcgggcagggaaaaggggtcgaggccggtcctgacctgttacaatgaagactgacttgctatgtgggattacaccagaagcttgcagtggagtaatggtaaggaaatcaagcaaccttaaatatgtcggctgtataggagcatattctattgcagaagaccttcctatgaagatcatggaatcaaatacgggacattgaactaatacttggactttgatatgaatttctttaacaattttctctgcagtgcaagttattaaactaaagctactctattttcaaaatgtgttccaacagaaatccttcataactcctagcatggtatcttaataaagaataaagttcttttaaaaatctgctctaagtagatttttccccttttttaaattaaggatcccaacagtggtattttgaaatattctcttgaatttgtgcatttaaattttattgcagtggtatagatgaatgccactgatggtatccttaaattttatttctgctcaccaaggttaatcatgattgtctatatcttttttatagtgatcacttttgaattgtgttcagatatgcagtttcaggtgtaatcatcagagctggttagtcaggcattccagatagtggttcttttcagaacctttttaaaagggttggttaactacctcagtagcagaggattgaactataccctgtctgtactgtacatagaaaatctttgtagataaaagcaaggcttgttaaatatgatatgagggtaagattttaatataccaaatgtaacattcttagttgcctttagtttcagaggcttgtaagacttcctcatgaccatcataacaggccttgcttttgtcgtattttgtggctgaaaaagcagccttgcttcttcagatattgtagttatttggatgtataatagtttagcaagatgttacttttgtaagacatcagatgttcaaaaaagtgcatccgaacttgtactaaatactgcagtgtccctttataaaaagtcagactaaaactgacaattgtacagcgaacctgacatttggatattttgaagttttttcataaatcatagaaattagtatatggctgtagtttagctttttaggtaaaaggtatgtttcattagtgcatttcttcctgctgatcactgtaaacatgtgaatcagctttccatttcttatgcaggtcatgataacttgtagagtagagtacaatcatttgtgctatgtttttaattttctaaagcaccttgatgacagtgagtgtccagtggtgaagcatcctctattgaaccaccctcaaaaatttttttgccaagtcctaagttgatagcttaaagtaaaaagtgaaaattatagtttcattaggacttggtgtaaagaaatcccctccccccttccccaaagggatactgcagttatatcacatacccaataggcaccacgatgaagatcagagcttatacttaattaaggttttatacacaccagttccccagtaaatgcaaatttaacaagaaaatcagacatgtcatatgttcaaaatgctcatggcaaacaatcattttgcattcctgcaaataaaattgttttatactgtaagctggaggcgagtgtaacttatttttgtaataaagtttttattttttttatgtgtcattaatataaatgtgtgttagtgtagaaatcttctggtttaaaaacttagaattgcacacatttcagtatgtttatttgtacttacataattttagaatagtggttgccaatagcctgtatgtttcacattaattggttttttgttatctaaataaatcattttagtatgttgtatgtcagttactgggatagctgggacatagagtgtaatttaaaatttgtcaataagtattcattggaatatatgtaaatgtgccttgccggttattgaaacttatctacaaaatgagtatggggtgacaaaaattagttcctggtgcttaatgaaactttctgccactgattttatatattaccccgtgcttttttaaagtacatctctctcaaaacttagtgtaagtttgagggctacacaaaacatttacatttcattctaacataatgaatataataggttgtggaaagtgggtaaactaaatgtagccttcagtaaaattgaatctcagtgtaatccttggtgctggcatttctcagttccgaggagttaaatgatcccatctaagaggtcattgccatgcctattggcactttactgtcatagcatttttaagggacactgtcaaggtgtttaagttctcagaattacttgttgggattttaggacaggtttgtttacttaaagtaagaactgcattgtcaaagttgaaagaggaacacttttgtgagttcacaaatgtgttcttaagaaaacattaaaatatggagctctgggttttcaagactatttggcattcttaatttggggacttgggagggaaactgataaaaagaaattgaagaattgatggttatacttaaagaagggtaatgtaaacagtggtgatgaaatatatacacatcaagtgaaattacttgacagtgttcatttgaatgactttgaattcaagccattataattacttttaaaattaaatatcatttgcactgttctgataatgggtgcagtttttgagcaatataatcagagctaaatatgcatgtagtgattagtgatgtgaacaattaacgttctgagaagaaatactaactgtggtattttcaaacttaaatttctgtagtaaaatcagtatcaaagtcttatcagatcaaggaaaaacaggcaatgcatataaacatacttttgaatgttgtgtggcctataaagcaataatgcaatttatatggaatgtcatgggatatgagaaatggaaatgcaaaaataactaatcctttagtaaaaatgtcaacatgttaaagggggaatgttaactaatgtaggttattgctatttgtgatttgtttatgggttcttggctttgacagcttcaaagaatggacagtgataagttaaaagaaattttgtatattgtcaaggaaagggtcttaaatccgagtcaagtcccttccttggggtaaaaaatgtattcttaaagcattctgatgttaaaaagaaaacttaagttatctaaccaaaacagacgcaagattttgtttctgcagactacttggcaatcaaaagtgatcataaatttaggttatcagttttcagaaagttgctttgtgagaaaattttgttagatatattctcccaagcatgctttttgtggaaggttttcagccattgccactgaatcagatgttaaaaatgaagggaaaattgagtgtgcacacacacaactgttgtacactcatgattgcagtttttagcttaagaaacttttctaccagttactgtgaatctgacttaaaatgtaaagtttcctcatgataaaataggaacaacatagaaatggattgatggggtgatctgagttattgtatataaaagtttttaaagaatagaatgaacatcaagctagataggcaaaaattgacacattcagaacagcttttttgactgcgaagccaaaagttgtcagaaacagcaaaagatcccttattattacagagtattttacgtagtctctattttaaggagagaaattaaatagaagggcttcatgcatttaggggagggtgctaaaacttctcaagttcgtcaaacttacaggaatacccaccatgatcattttctctctaattatgtataccacaaaattttcatctggccataggaattcactggtgggtgtaaaattaatgactaaagaaattaagtgacaaatacataaaagaaacagacttgtggggatattgttttaaggtgtattaattactcagtgatgataccactcaatagggcatgccactacttttcttaagatgctaattatgaagcagtgctcacaggcattttttaactagcaaattagtagatggacttttggggtctgtcactttttaaaagtatttaagacttaaattctattagcaccacagtctgccttcagtaatacacctaaaatatttttcaggaccagaagcattcagtttgaaaatttgcagatgcaaaccagtattattactaacgctctgggtcaaagattaggtttttaatattaacagtagtctggtaaatatttagaagtctggcattgagaaacaaaagcttgtacctgactagtatttttatttaaaaaaattagttctgttagcttatttaaattgtgttttatttatccgtagaatttatatttatttcattcctttcatctcactgaaaactgtctgcaggccctttgatttggattagatgtgtgaagtactgtcttttgccaaaaacctcaaattacctgttcttttcaacgtagtgggtttgtgcttgtttggagatcagttcaaaaactatctgtactatctgtactgcctctgatgttaagattttatgtatagcataaggaagctagctctgactatattttcctaagaataaagacctatttttgtagcatgtcttaggatctccaggagtccaagaattattgtgggtgtcctccaattcatcactcttcacttaacagcttttaagtagacacttggaatctttagaggtctgtcgccctttgattatccatacattcgaagtaactagccaatggtgaaaaattcctcaagatatcctcagttgcaatcacattactggaagatgaatagaataaatgtattaggctggtcttaatttttgatggaaatattctgttgtcccgtacttgccattggatttgataaagttagtggtaatttggaaagaatcggggacttgccaatatatttgtgggttttagcttatacccctaggatttcttggttgcgggacgagcagttttggccacttccatcaggacaagactttttaggtcacttagtgcaggttttagtttctattttggattaacaacatttatattgattatcgaaaagaagctttcatcatttcagaacagtcctggaagtttgactttgagtgtgggagaagtcctaataaaccattttggaaattagtgtctccaagtgttacagcttcctaaaatgggtttctaacacagtgggatcaaaataaggttattttaggataatatactgtaaacttaattgactgtctgattttctactttgtctataaagtggcttacaacaggttctaatctagaaaggagttataaaggttatctgtaatgtttatgaatt

SEQ ID NO: 365611 - DNA, 7338 bp, Homo sapiens
agagaggagccgactcggcagggactgggggaccgggccgagagtgcgagcgagcgagggagggagtgagggagcgtgcgagccagaaggggaaaggcggccactcgtgcctgagcgaccgcagaggggagtgggagcagtggggtaaaggagcggggggcgggaataagaaaggccgagagaaggcggacagaggctagtggtggtggtggtggtagggggagaaggaggagctggaggagggcaggggctgagggagtgagtgaagcggacgcgcgagggaggggagggaagggaagggaagggaagggggggtcacgcgggggcgcgcgcgcgcaccgggagcgcgctcggaggcgagtggaactggatcgggtttgctgccagcggcgtgagcttcggccgccattttacaacagctccactcgcgccggacacagggagcagcgagcacgcgtttcccgcaacccgataccatcggacaggatttctccgcctcagcccaacggggagggctagttgcacatagtgatttagatgaaagagctattgaagctttaaaagaattcaatgaagacggtgcattggcagttcttcaacagtttaaagacagtgatctctctcatgttcagaacaaaagtgcctttttatgtggagtcatgaagacttacaggcagagagaaaaacaagggaccaaagtagcagattctagtaaaggaccagatgaggcaaaaattaaggcactcttggaaagaacaggctacacacttgatgtgaccactggacagaggaagtatggaggaccacctccagattccgtttattcaggtcagcagccttctgttggcactgagatatttgtgggaaagatcccaagagatctatttgaggatgaacttgttccattatttgagaaagctggacctatatgggatcttcgtctaatgatggatccactcactggtctcaatagaggttatgcgtttgtcactttttgtacaaaagaagcagctcaggaggctgttaaactgtataataatcatgaaattcgttctggaaaacatattggtgtctgcatctcagttgccaacaataggctttttgtgggctctattcctaagagtaaaaccaaggaacagattcttgaagaatttagcaaagtaacagagggtcttacagacgtcattttataccaccaaccggatgacaagaaaaaaaacagaggcttttgctttcttgaatatgaagatcacaaaacagctgcccaggcaaggcgtaggttaatgagtggtaaagtcaaggtctgggggaatgttggaactgttgaatgggctgatcctatagaagatcctgatcctgaggttatggcaaaggtaaaagtgctgtttgtacgcaaccttgccaatactgtaacagaagagattttagaaaaggcatttagtcagtttgggaaactggaacgagtgaagaagttaaaagattatgcgttcattcattttgatgagcgagatggtgctgtcaaggctatggaagaaatgaatggcaaagacttggagggagaaaatattgaaattgtttttgccaagccaccagatcagaaaaggaaagaaagaaaagctcagaggcaagcagcaaaaaatcaaatgtatgacgattactactattatggtccacctcatatgccccctccaacaagaggtcgagggcgtggaggtagaggtggttatggatatcctccagattattatggatatgaagattattatgattattatggttatgattaccataactatcgtggtggatatgaagatccatactatggttatgaagattttcaagttggagctagaggaaggggtggtagaggagcaaggggtgctgctccatccagaggtcgtggggctgctcctccccgcggtagagccggttattcacagagaggaggtcctggatcagcaagaggcgttcgaggtgcgagaggaggtgcccaacaacaaagaggccgcgggcagggaaaaggggtcgaggccggtcctgacctgttacaatgaagactgacttgctatgtgggattacaccagaagcttgcagtggagtaatggtaaggaaatcaagcaaccttaaatatgtcggctgtataggagcatattctattgcagaagaccttcctatgaagatcatggaatcaaatacgggacattgaactaatacttggactttgatatgaatttctttaacaattttctctgcagtgcaagttattaaactaaagctactctattttcaaaatgtgttccaacagaaatccttcataactcctagcatggtatcttaataaagaataaagttcttttaaaaatctgctctaagtagatttttccccttttttaaattaaggatcccaacagtggtattttgaaatattctcttgaatttgtgcatttaaattttattgcagtggtatagatgaatgccactgatggtatccttaaattttatttctgctcaccaaggttaatcatgattgtctatatcttttttatagtgatcacttttgaattgtgttcagatatgcagtttcaggtgtaatcatcagagctggttagtcaggcattccagatagtggttcttttcagaacctttttaaaagggttggttaactacctcagtagcagaggattgaactataccctgtctgtactgtacatagaaaatctttgtagataaaagcaaggcttgttaaatatgatatgagggtaagattttaatataccaaatgtaacattcttagttgcctttagtttcagaggcttgtaagacttcctcatgaccatcataacaggccttgcttttgtcgtattttgtggctgaaaaagcagccttgcttcttcagatattgtagttatttggatgtataatagtttagcaagatgttacttttgtaagacatcagatgttcaaaaaagtgcatccgaacttgtactaaatactgcagtgtccctttataaaaagtcagactaaaactgacaattgtacagcgaacctgacatttggatattttgaagttttttcataaatcatagaaattagtatatggctgtagtttagctttttaggtaaaaggtatgtttcattagtgcatttcttcctgctgatcactgtaaacatgtgaatcagctttccatttcttatgcaggtcatgataacttgtagagtagagtacaatcatttgtgctatgtttttaattttctaaagcaccttgatgacagtgagtgtccagtggtgaagcatcctctattgaaccaccctcaaaaatttttttgccaagtcctaagttgatagcttaaagtaaaaagtgaaaattatagtttcattaggacttggtgtaaagaaatcccctccccccttccccaaagggatactgcagttatatcacatacccaataggcaccacgatgaagatcagagcttatacttaattaaggttttatacacaccagttccccagtaaatgcaaatttaacaagaaaatcagacatgtcatatgttcaaaatgctcatggcaaacaatcattttgcattcctgcaaataaaattgttttatactgtaagctggaggcgagtgtaacttatttttgtaataaagtttttattttttttatgtgtcattaatataaatgtgtgttagtgtagaaatcttctggtttaaaaacttagaattgcacacatttcagtatgtttatttgtacttacataattttagaatagtggttgccaatagcctgtatgtttcacattaattggttttttgttatctaaataaatcattttagtatgttgtatgtcagttactgggatagctgggacatagagtgtaatttaaaatttgtcaataagtattcattggaatatatgtaaatgtgccttgccggttattgaaacttatctacaaaatgagtatggggtgacaaaaattagttcctggtgcttaatgaaactttctgccactgattttatatattaccccgtgcttttttaaagtacatctctctcaaaacttagtgtaagtttgagggctacacaaaacatttacatttcattctaacataatgaatataataggttgtggaaagtgggtaaactaaatgtagccttcagtaaaattgaatctcagtgtaatccttggtgctggcatttctcagttccgaggagttaaatgatcccatctaagaggtcattgccatgcctattggcactttactgtcatagcatttttaagggacactgtcaaggtgtttaagttctcagaattacttgttgggattttaggacaggtttgtttacttaaagtaagaactgcattgtcaaagttgaaagaggaacacttttgtgagttcacaaatgtgttcttaagaaaacattaaaatatggagctctgggttttcaagactatttggcattcttaatttggggacttgggagggaaactgataaaaagaaattgaagaattgatggttatacttaaagaagggtaatgtaaacagtggtgatgaaatatatacacatcaagtgaaattacttgacagtgttcatttgaatgactttgaattcaagccattataattacttttaaaattaaatatcatttgcactgttctgataatgggtgcagtttttgagcaatataatcagagctaaatatgcatgtagtgattagtgatgtgaacaattaacgttctgagaagaaatactaactgtggtattttcaaacttaaatttctgtagtaaaatcagtatcaaagtcttatcagatcaaggaaaaacaggcaatgcatataaacatacttttgaatgttgtgtggcctataaagcaataatgcaatttatatggaatgtcatgggatatgagaaatggaaatgcaaaaataactaatcctttagtaaaaatgtcaacatgttaaagggggaatgttaactaatgtaggttattgctatttgtgatttgtttatgggttcttggctttgacagcttcaaagaatggacagtgataagttaaaagaaattttgtatattgtcaaggaaagggtcttaaatccgagtcaagtcccttccttggggtaaaaaatgtattcttaaagcattctgatgttaaaaagaaaacttaagttatctaaccaaaacagacgcaagattttgtttctgcagactacttggcaatcaaaagtgatcataaatttaggttatcagttttcagaaagttgctttgtgagaaaattttgttagatatattctcccaagcatgctttttgtggaaggttttcagccattgccactgaatcagatgttaaaaatgaagggaaaattgagtgtgcacacacacaactgttgtacactcatgattgcagtttttagcttaagaaacttttctaccagttactgtgaatctgacttaaaatgtaaagtttcctcatgataaaataggaacaacatagaaatggattgatggggtgatctgagttattgtatataaaagtttttaaagaatagaatgaacatcaagctagataggcaaaaattgacacattcagaacagcttttttgactgcgaagccaaaagttgtcagaaacagcaaaagatcccttattattacagagtattttacgtagtctctattttaaggagagaaattaaatagaagggcttcatgcatttaggggagggtgctaaaacttctcaagttcgtcaaacttacaggaatacccaccatgatcattttctctctaattatgtataccacaaaattttcatctggccataggaattcactggtgggtgtaaaattaatgactaaagaaattaagtgacaaatacataaaagaaacagacttgtggggatattgttttaaggtgtattaattactcagtgatgataccactcaatagggcatgccactacttttcttaagatgctaattatgaagcagtgctcacaggcattttttaactagcaaattagtagatggacttttggggtctgtcactttttaaaagtatttaagacttaaattctattagcaccacagtctgccttcagtaatacacctaaaatatttttcaggaccagaagcattcagtttgaaaatttgcagatgcaaaccagtattattactaacgctctgggtcaaagattaggtttttaatattaacagtagtctggtaaatatttagaagtctggcattgagaaacaaaagcttgtacctgactagtatttttatttaaaaaaattagttctgttagcttatttaaattgtgttttatttatccgtagaatttatatttatttcattcctttcatctcactgaaaactgtctgcaggccctttgatttggattagatgtgtgaagtactgtcttttgccaaaaacctcaaattacctgttcttttcaacgtagtgggtttgtgcttgtttggagatcagttcaaaaactatctgtactatctgtactgcctctgatgttaagattttatgtatagcataaggaagctagctctgactatattttcctaagaataaagacctatttttgtagcatgtcttaggatctccaggagtccaagaattattgtgggtgtcctccaattcatcactcttcacttaacagcttttaagtagacacttggaatctttagaggtctgtcgccctttgattatccatacattcgaagtaactagccaatggtgaaaaattcctcaagatatcctcagttgcaatcacattactggaagatgaatagaataaatgtattaggctggtcttaatttttgatggaaatattctgttgtcccgtacttgccattggatttgataaagttagtggtaatttggaaagaatcggggacttgccaatatatttgtgggttttagcttatacccctaggatttcttggttgcgggacgagcagttttggccacttccatcaggacaagactttttaggtcacttagtgcaggttttagtttctattttggattaacaacatttatattgattatcgaaaagaagctttcatcatttcagaacagtcctggaagtttgactttgagtgtgggagaagtcctaataaaccattttggaaattagtgtctccaagtgttacagcttcctaaaatgggtttctaacacagtgggatcaaaataaggttattttaggataatatactgtaaacttaattgactgtctgattttctactttgtctataaagtggcttacaacaggttctaatctagaaaggagttataaaggttatctgtaatgtttatgaatt

SEQ ID NO: 365612 - DNA, 3054 bp, Homo sapiens
agagaggagccgactcggcagggactgggggaccgggccgagagtgcgagcgagcgagggagggagtgagggagcgtgcgagccagaaggggaaaggcggccactcgtgcctgagcgaccgcagaggggagtgggagcagtggggtaaaggagcggggggcgggaataagaaaggccgagagaaggcggacagaggctagtggtggtggtggtggtagggggagaaggaggagctggaggagggcaggggctgagggagtgagtgaagcggacgcgcgagggaggggagggaagggaagggaagggaagggggggtcacgcgggggcgcgcgcgcgcaccgggagcgcgctcggaggcgagtggaactggatcgggtttgctgccagcggcgtgagcttcggccgccattttacaacagctccactcgcgccggacacagggagcagcgagcacgcgtttcccgcaacccgataccatcggacaggatttctccgcctcagcccaacggggagatctctggaaacatggctacagaacatgttaatggaaatggtactgaagagcccatggatactacttctgcagttatccattcagaaaattttcagacattgcttgatgctggtttaccacagaaagttgctgaaaaactagatgaaatttacgttgcagggctagttgcacatagtgatttagatgaaagagctattgaagctttaaaagaattcaatgaagacggtgcattggcagttcttcaacagtttaaagacagtgatctctctcatgttcagaacaaaagtgcctttttatgtggagtcatgaagacttacaggcagagagaaaaacaagggaccaaagtagcagattctagtaaaggaccagatgaggcaaaaattaaggcactcttggaaagaacaggctacacacttgatgtgaccactggacagaggaagtatggaggaccacctccagattccgtttattcaggtcagcagccttctgttggcactgagatatttgtgggaaagatcccaagagatctatttgaggatgaacttgttccattatttgagaaagctggacctatatgggatcttcgtctaatgatggatccactcactggtctcaatagaggttatgcgtttgtcactttttgtacaaaagaagcagctcaggaggctgttaaactgtataataatcatgaaattcgttctggaaaacatattggtgtctgcatctcagttgccaacaataggctttttgtgggctctattcctaagagtaaaaccaaggaacagattcttgaagaatttagcaaagtaacagagggtcttacagacgtcattttataccaccaaccggatgacaagaaaaaaaacagaggcttttgctttcttgaatatgaagatcacaaaacagctgcccaggcaaggcgtaggttaatgagtggtaaagtcaaggtctgggggaatgttggaactgttgaatgggctgatcctatagaagatcctgatcctgaggttatggcaaaggtaaaagtgctgtttgtacgcaaccttgccaatactgtaacagaagagattttagaaaaggcatttagtcagtttgggaaactggaacgagtgaagaagttaaaagattatgcgttcattcattttgatgagcgagatggtgctgtcaaggctatggaagaaatgaatggcaaagacttggagggagaaaatattgaaattgtttttgccaagccaccagatcagaaaaggaaagaaagaaaagctcagaggcaagcagcaaaaaatcaaatgtatgacgattactactattatggtccacctcatatgccccctccaacaagaggtcgagggcgtggaggtagaggtggttatggatatcctccagattattatggatatgaagattattatgattattatggttatgattaccataactatcgtggtggatatgaagatccatactatggttatgaagattttcaagttggagctagaggaaggggtggtagaggagcaaggggtgctgctccatccagaggtcgtggggctgctcctccccgcggtagagccggttattcacagagaggaggtcctggatcagcaagaggcgttcgaggtgcgagaggaggtgcccaacaacaaagaggccgcggggtacgtggtgcgaggggtggccgcggtggaaatgtaggaggaaagcgcaaagctgatgggtacaaccagccagattccaagcggcgccagaccaataatcagaactggggctcccaacccattgctcagcaaccgctccaaggtggtgatcattctggtaactatggttacaaatctgaaaaccaggagttttatcaggatacttttgggcaacagtggaagtagaaacagtagggcctctgtaaaattggagactgataggttgatcagaaactcaccctaaatctgaacgggtgccgctataatttgtgacatctggcaagatttccctttatgtatatattttaacaatccgcttggacacgaacaaagccacacttctaactgcttctggcgaactgattttatttttaatttttttcaataaagatattcttagatactgaaagaaatagttaatgagtttgcatttgtgcttgagaaaatttggctcaagtccatttggctgtagtgtcaacgatgtttccagtagtgtttagatttggtgtcttcaaaggtagttgattaaaaccaagtgtgtctttaatatcttgtatcagaataactttgtatgttaccaacttaaattgctagaataaggtaaattgatacacaactgctatttttaatttagaactttgacctaatttgggttttcaaaaccattttggctacttgtattctttatgctgttgtttatttcaataaaaaattcacacctaaatgtatacttactaaaattgtgtttacaattcgtttttcacaaaatttcctgcaaatttggttcaaattgtatagcatgtcaaggccaattaaagggttttgtgccttgttaaaaaaagt

SEQ ID NO: 365613 - DNA, 7393 bp, Homo sapiens
agagaggagccgactcggcagggactgggggaccgggccgagagtgcgagcgagcgagggagggagtgagggagcgtgcgagccagaaggggaaaggcggccactcgtgcctgagcgaccgcagaggggagtgggagcagtggggtaaaggagcggggggcgggaataagaaaggccgagagaaggcggacagaggctagtggtggtggtggtggtagggggagaaggaggagctggaggagggcaggggctgagggagtgagtgaagcggacgcgcgagggaggggagggaagggaagggaagggaagggggggtcacgcgggggcgcgcgcgcgcaccgggagcgcgctcggaggcgagtggaactggatcgggtttgctgccagcggcgtgagcttcggccgccattttacaacagctccactcgcgccggacacagggagcagcgagcacgcgtttcccgcaacccgataccatcggacaggatttctccgcctcagcccaacggggagatctctggaaacatggctacagaacatgttaatggaaatggtactgaagagcccatggatactacttctgcagttatccattcagaaaattttcagacattgcttgatgctggtttaccacagaaagttgctgaaaaactagatgaaatttacgttgcagggctagttgcacatagtgatttagatgaaagagctattgaagctttaaaagaattcaatgaagacggtgcattggcagttcttcaacagtttaaagacagtgatctctctcatgttcagaacaaaagtgcctttttatgtggagtcatgaagacttacaggcagagagaaaaacaagggaccaaagtagcagattctagtaaaggaccagatgaggcaaaaattaaggcactcttggaaagaacaggctacacacttgatgtgaccactggacagaggaagtatggaggaccacctccagattccgtttattcaggtcagcagccttctgttggcactgagatatttgtgggaaagatcccaagagatctatttgaggatgaacttgttccattatttgagaaagctggacctatatgggatcttcgtctaatgatggatccactcactggtctcaatagaggttatgcgtttgtcactttttgtacaaaagaagcagctcaggaggctgttaaactgtataataatcatgaaattcgttctggaaaacatattggtgtctgcatctcagttgccaacaataggctttttgtgggctctattcctaagagtaaaaccaaggaacagattcttgaagaatttagcaaagtaacagagggtcttacagacgtcattttataccaccaaccggatgacaagaaaaaaaacagaggcttttgctttcttgaatatgaagatcacaaaacagctgcccaggtaaaagtgctgtttgtacgcaaccttgccaatactgtaacagaagagattttagaaaaggcatttagtcagtttgggaaactggaacgagtgaagaagttaaaagattatgcgttcattcattttgatgagcgagatggtgctgtcaaggctatggaagaaatgaatggcaaagacttggagggagaaaatattgaaattgtttttgccaagccaccagatcagaaaaggaaagaaagaaaagctcagaggcaagcagcaaaaaatcaaatgtatgacgattactactattatggtccacctcatatgccccctccaacaagaggtcgagggcgtggaggtagaggtggttatggatatcctccagattattatggatatgaagattattatgattattatggttatgattaccataactatcgtggtggatatgaagatccatactatggttatgaagattttcaagttggagctagaggaaggggtggtagaggagcaaggggtgctgctccatccagaggtcgtggggctgctcctccccgcggtagagccggttattcacagagaggaggtcctggatcagcaagaggcgttcgaggtgcgagaggaggtgcccaacaacaaagaggccgcgggcagggaaaaggggtcgaggccggtcctgacctgttacaatgaagactgacttgctatgtgggattacaccagaagcttgcagtggagtaatggtaaggaaatcaagcaaccttaaatatgtcggctgtataggagcatattctattgcagaagaccttcctatgaagatcatggaatcaaatacgggacattgaactaatacttggactttgatatgaatttctttaacaattttctctgcagtgcaagttattaaactaaagctactctattttcaaaatgtgttccaacagaaatccttcataactcctagcatggtatcttaataaagaataaagttcttttaaaaatctgctctaagtagatttttccccttttttaaattaaggatcccaacagtggtattttgaaatattctcttgaatttgtgcatttaaattttattgcagtggtatagatgaatgccactgatggtatccttaaattttatttctgctcaccaaggttaatcatgattgtctatatcttttttatagtgatcacttttgaattgtgttcagatatgcagtttcaggtgtaatcatcagagctggttagtcaggcattccagatagtggttcttttcagaacctttttaaaagggttggttaactacctcagtagcagaggattgaactataccctgtctgtactgtacatagaaaatctttgtagataaaagcaaggcttgttaaatatgatatgagggtaagattttaatataccaaatgtaacattcttagttgcctttagtttcagaggcttgtaagacttcctcatgaccatcataacaggccttgcttttgtcgtattttgtggctgaaaaagcagccttgcttcttcagatattgtagttatttggatgtataatagtttagcaagatgttacttttgtaagacatcagatgttcaaaaaagtgcatccgaacttgtactaaatactgcagtgtccctttataaaaagtcagactaaaactgacaattgtacagcgaacctgacatttggatattttgaagttttttcataaatcatagaaattagtatatggctgtagtttagctttttaggtaaaaggtatgtttcattagtgcatttcttcctgctgatcactgtaaacatgtgaatcagctttccatttcttatgcaggtcatgataacttgtagagtagagtacaatcatttgtgctatgtttttaattttctaaagcaccttgatgacagtgagtgtccagtggtgaagcatcctctattgaaccaccctcaaaaatttttttgccaagtcctaagttgatagcttaaagtaaaaagtgaaaattatagtttcattaggacttggtgtaaagaaatcccctccccccttccccaaagggatactgcagttatatcacatacccaataggcaccacgatgaagatcagagcttatacttaattaaggttttatacacaccagttccccagtaaatgcaaatttaacaagaaaatcagacatgtcatatgttcaaaatgctcatggcaaacaatcattttgcattcctgcaaataaaattgttttatactgtaagctggaggcgagtgtaacttatttttgtaataaagtttttattttttttatgtgtcattaatataaatgtgtgttagtgtagaaatcttctggtttaaaaacttagaattgcacacatttcagtatgtttatttgtacttacataattttagaatagtggttgccaatagcctgtatgtttcacattaattggttttttgttatctaaataaatcattttagtatgttgtatgtcagttactgggatagctgggacatagagtgtaatttaaaatttgtcaataagtattcattggaatatatgtaaatgtgccttgccggttattgaaacttatctacaaaatgagtatggggtgacaaaaattagttcctggtgcttaatgaaactttctgccactgattttatatattaccccgtgcttttttaaagtacatctctctcaaaacttagtgtaagtttgagggctacacaaaacatttacatttcattctaacataatgaatataataggttgtggaaagtgggtaaactaaatgtagccttcagtaaaattgaatctcagtgtaatccttggtgctggcatttctcagttccgaggagttaaatgatcccatctaagaggtcattgccatgcctattggcactttactgtcatagcatttttaagggacactgtcaaggtgtttaagttctcagaattacttgttgggattttaggacaggtttgtttacttaaagtaagaactgcattgtcaaagttgaaagaggaacacttttgtgagttcacaaatgtgttcttaagaaaacattaaaatatggagctctgggttttcaagactatttggcattcttaatttggggacttgggagggaaactgataaaaagaaattgaagaattgatggttatacttaaagaagggtaatgtaaacagtggtgatgaaatatatacacatcaagtgaaattacttgacagtgttcatttgaatgactttgaattcaagccattataattacttttaaaattaaatatcatttgcactgttctgataatgggtgcagtttttgagcaatataatcagagctaaatatgcatgtagtgattagtgatgtgaacaattaacgttctgagaagaaatactaactgtggtattttcaaacttaaatttctgtagtaaaatcagtatcaaagtcttatcagatcaaggaaaaacaggcaatgcatataaacatacttttgaatgttgtgtggcctataaagcaataatgcaatttatatggaatgtcatgggatatgagaaatggaaatgcaaaaataactaatcctttagtaaaaatgtcaacatgttaaagggggaatgttaactaatgtaggttattgctatttgtgatttgtttatgggttcttggctttgacagcttcaaagaatggacagtgataagttaaaagaaattttgtatattgtcaaggaaagggtcttaaatccgagtcaagtcccttccttggggtaaaaaatgtattcttaaagcattctgatgttaaaaagaaaacttaagttatctaaccaaaacagacgcaagattttgtttctgcagactacttggcaatcaaaagtgatcataaatttaggttatcagttttcagaaagttgctttgtgagaaaattttgttagatatattctcccaagcatgctttttgtggaaggttttcagccattgccactgaatcagatgttaaaaatgaagggaaaattgagtgtgcacacacacaactgttgtacactcatgattgcagtttttagcttaagaaacttttctaccagttactgtgaatctgacttaaaatgtaaagtttcctcatgataaaataggaacaacatagaaatggattgatggggtgatctgagttattgtatataaaagtttttaaagaatagaatgaacatcaagctagataggcaaaaattgacacattcagaacagcttttttgactgcgaagccaaaagttgtcagaaacagcaaaagatcccttattattacagagtattttacgtagtctctattttaaggagagaaattaaatagaagggcttcatgcatttaggggagggtgctaaaacttctcaagttcgtcaaacttacaggaatacccaccatgatcattttctctctaattatgtataccacaaaattttcatctggccataggaattcactggtgggtgtaaaattaatgactaaagaaattaagtgacaaatacataaaagaaacagacttgtggggatattgttttaaggtgtattaattactcagtgatgataccactcaatagggcatgccactacttttcttaagatgctaattatgaagcagtgctcacaggcattttttaactagcaaattagtagatggacttttggggtctgtcactttttaaaagtatttaagacttaaattctattagcaccacagtctgccttcagtaatacacctaaaatatttttcaggaccagaagcattcagtttgaaaatttgcagatgcaaaccagtattattactaacgctctgggtcaaagattaggtttttaatattaacagtagtctggtaaatatttagaagtctggcattgagaaacaaaagcttgtacctgactagtatttttatttaaaaaaattagttctgttagcttatttaaattgtgttttatttatccgtagaatttatatttatttcattcctttcatctcactgaaaactgtctgcaggccctttgatttggattagatgtgtgaagtactgtcttttgccaaaaacctcaaattacctgttcttttcaacgtagtgggtttgtgcttgtttggagatcagttcaaaaactatctgtactatctgtactgcctctgatgttaagattttatgtatagcataaggaagctagctctgactatattttcctaagaataaagacctatttttgtagcatgtcttaggatctccaggagtccaagaattattgtgggtgtcctccaattcatcactcttcacttaacagcttttaagtagacacttggaatctttagaggtctgtcgccctttgattatccatacattcgaagtaactagccaatggtgaaaaattcctcaagatatcctcagttgcaatcacattactggaagatgaatagaataaatgtattaggctggtcttaatttttgatggaaatattctgttgtcccgtacttgccattggatttgataaagttagtggtaatttggaaagaatcggggacttgccaatatatttgtgggttttagcttatacccctaggatttcttggttgcgggacgagcagttttggccacttccatcaggacaagactttttaggtcacttagtgcaggttttagtttctattttggattaacaacatttatattgattatcgaaaagaagctttcatcatttcagaacagtcctggaagtttgactttgagtgtgggagaagtcctaataaaccattttggaaattagtgtctccaagtgttacagcttcctaaaatgggtttctaacacagtgggatcaaaataaggttattttaggataatatactgtaaacttaattgactgtctgattttctactttgtctataaagtggcttacaacaggttctaatctagaaaggagttataaaggttatctgtaatgtttatgaatt

SEQ ID NO: 365614 - DNA, 4264 bp, Homo sapiens
agagaggagccgactcggcagggactgggggaccgggccgagagtgcgagcgagcgagggagggagtgagggagcgtgcgagccagaaggggaaaggcggccactcgtgcctgagcgaccgcagaggggagtgggagcagtggggtaaaggagcggggggcgggaataagaaaggccgagagaaggcggacagaggctagtggtggtggtggtggtagggggagaaggaggagctggaggagggcaggggctgagggagtgagtgaagcggacgcgcgagggaggggagggaagggaagggaagggaagggggggtcacgcgggggcgcgcgcgcgcaccgggagcgcgctcggaggcgagtggaactggatcgggtttgctgccagcggcgtgagcttcggccgccattttacaacagctccactcgcgccggacacagggagcagcgagcacgcgtttcccgcaacccgataccatcggacaggatttctccgcctcagcccaacggggagatctctggaaacatggctacagaacatgttaatggaaatggtactgaagagcccatggatactacttctgcagttatccattcagaaaattttcagacattgcttgatgctggtttaccacagaaagttgctgaaaaactagatgaaatttacgttgcagggctagttgcacatagtgatttagatgaaagagctattgaagctttaaaagaattcaatgaagacggtgcattggcagttcttcaacagtttaaagacagtgatctctctcatgttcagaacaaaagtgcctttttatgtggagtcatgaagacttacaggcagagagaaaaacaagggaccaaagtagcagattctagtaaaggaccagatgaggcaaaaattaaggcactcttggaaagaacaggctacacacttgatgtgaccactggacagaggaagtatggaggaccacctccagattccgtttattcaggtcagcagccttctgttggcactgagatatttgtgggaaagatcccaagagatctatttgaggatgaacttgttccattatttgagaaagctggacctatatgggatcttcgtctaatgatggatccactcactggtctcaatagaggttatgcgtttgtcactttttgtacaaaagaagcagctcaggaggctgttaaactgtataataatcatgaaattcgttctggaaaacatattggtgtctgcatctcagttgccaacaataggctttttgtgggctctattcctaagagtaaaaccaaggaacagattcttgaagaatttagcaaagtaacagagggtcttacagacgtcattttataccaccaaccggatgacaagaaaaaaaacagaggcttttgctttcttgaatatgaagatcacaaaacagctgcccaggcaaggcgtaggttaatgagtggtaaagtcaaggtctgggggaatgttggaactgttgaatgggctgatcctatagaagatcctgatcctgaggttatggcaaaggtaaaagtgctgtttgtacgcaaccttgccaatactgtaacagaagagattttagaaaaggcatttagtcagtttgggaaactggaacgagtgaagaagttaaaagattatgcgttcattcattttgatgagcgagatggtgctgtcaaggctatggaagaaatgaatggcaaagacttggagggagaaaatattgaaattgtttttgccaagccaccagatcagaaaaggaaagaaagaaaagctcagaggcaagcagcaaaaaatcaaatgtatgacgattactactattatggtccacctcatatgccccctccaacaagaggtcgagggcgtggaggtagaggtggttatggatatcctccagattattatggatatgaagattattatgattattatggttatgattaccataactatcgtggtggatatgaagatccatactatggttatgaagattttcaagttggagctagaggaaggggtggtagaggagcaaggggtgctgctccatccagaggtcgtggggctgctcctccccgcggtagagccggttattcacagagaggaggtcctggatcagcaagaggcgttcgaggtgcgagaggaggtgcccaacaacaaagaggccgcgggcagggaaaaggggtcgaggccggtcctgacctgttacaatgaagactgacttgctatgtgggattacaccagaagcttgcagtggagtaatggtaaggaaatcaagcaaccttaaatatgtcggctgtataggagcatattctattgcagaagaccttcctatgaagatcatggaatcaaatacgggacattgaactaatacttggactttgatatgaatttctttaacaattttctctgcagtgcaagttattaaactaaagctactctattttcaaaatgtgttccaacagaaatccttcataactcctagcatggtatcttaataaagaataaagttcttttaaaaatctgctctaagtagatttttccccttttttaaattaaggatcccaacagtggtattttgaaatattctcttgaatttgtgcatttaaattttattgcagtggtatagatgaatgccactgatggtatccttaaattttatttctgctcaccaaggttaatcatgattgtctatatcttttttatagtgatcacttttgaattgtgttcagatatgcagtttcaggtgtaatcatcagagctggttagtcaggcattccagatagtggttcttttcagaacctttttaaaagggttggttaactacctcagtagcagaggattgaactataccctgtctgtactgtacatagaaaatctttgtagataaaagcaaggcttgttaaatatgatatgagggtaagattttaatataccaaatgtaacattcttagttgcctttagtttcagaggcttgtaagacttcctcatgaccatcataacaggccttgcttttgtcgtattttgtggctgaaaaagcagccttgcttcttcagatattgtagttatttggatgtataatagtttagcaagatgttacttttgtaagacatcagatgttcaaaaaagtgcatccgaacttgtactaaatactgcagtgtccctttataaaaagtcagactaaaactgacaattgtacagcgaacctgacatttggatattttgaagttttttcataaatcatagaaattagtatatggctgtagtttagctttttaggtaaaaggtatgtttcattagtgcatttcttcctgctgatcactgtaaacatgtgaatcagctttccatttcttatgcaggtcatgataacttgtagagtagagtacaatcatttgtgctatgtttttaattttctaaagcaccttgatgacagtgagtgtccagtggtgaagcatcctctattgaaccaccctcaaaaatttttttgccaagtcctaagttgatagcttaaagtaaaaagtgaaaattatagtttcattaggacttggtgtaaagaaatcccctccccccttccccaaagggatactgcagttatatcacatacccaataggcaccacgatgaagatcagagcttatacttaattaaggttttatacacaccagttccccagtaaatgcaaatttaacaagaaaatcagacatgtcatatgttcaaaatgctcatggcaaacaatcattttgcattcctgcaaataaaattgttttatactgtaagctggaggcgagtgtaacttatttttgtaataaagtttttaattgacagtgaacatgctgatggtacatgtaaaacaagaagagttgaagaagatatgtgaagaacaatgtattattcctacatagaaataattgatcccattatttggtgtcatgtagtatgtgaatatttattcttaaacgtgactactacatttctacataagaaataccctaccagctgcctacaagcagttcagaatgcctagtgccgcggtggtcctactgtgaataattttcagctactttaaaattatattgtacgttcctcaagcatgtcatatcctctccctagtagagtatctatattactagttactgatgtacctgaaggcaagtctgatgaatttctaggatggtaccatattcttgtcatcttgccgattacattataagtgttggactagaatacgatgtactagtagtatagaatataactagattattatg

SEQ ID NO: 365615 - DNA, 3948 bp, Homo sapiens
agagaggagccgactcggcagggactgggggaccgggccgagagtgcgagcgagcgagggagggagtgagggagcgtgcgagccagaaggggaaaggcggccactcgtgcctgagcgaccgcagaggggagtgggagcagtggggtaaaggagcggggggcgggaataagaaaggccgagagaaggcggacagaggctagtggtggtggtggtggtagggggagaaggaggagctggaggagggcaggggctgagggagtgagtgaagcggacgcgcgagggaggggagggaagggaagggaagggaagggggggtcacgcgggggcgcgcgcgcgcaccgggagcgcgctcggaggcgagtggaactggatcgggtttgctgccagcggcgtgagcttcggccgccattttacaacagctccactcgcgccggacacagggagcagcgagcacgcgtttcccgcaacccgataccatcggacaggatttctccgcctcagcccaacggggagatctctggaaacatggctacagaacatgttaatggaaatggtactgaagagcccatggatactacttctgcagttatccattcagaaaattttcagacattgcttgatgctggtttaccacagaaagttgctgaaaaactagatgaaatttacgttgcagggctagttgcacatagtgatttagatgaaagagctattgaagctttaaaagaattcaatgaagacggtgcattggcagttcttcaacagtttaaagacagtgatctctctcatgttcagaacaaaagtgcctttttatgtggagtcatgaagacttacaggcagagagaaaaacaagggaccaaagtagcagattctagtaaaggaccagatgaggcaaaaattaaggcactcttggaaagaacaggctacacacttgatgtgaccactggacagaggaagtatggaggaccacctccagattccgtttattcaggtcagcagccttctgttggcactgagatatttgtgggaaagatcccaagagatctatttgaggatgaacttgttccattatttgagaaagctggacctatatgggatcttcgtctaatgatggatccactcactggtctcaatagaggttatgcgtttgtcactttttgtacaaaagaagcagctcaggaggctgttaaactgtataataatcatgaaattcgttctggaaaacatattggtgtctgcatctcagttgccaacaataggctttttgtgggctctattcctaagagtaaaaccaaggaacagattcttgaagaatttagcaaagtaacagagggtcttacagacgtcattttataccaccaaccggatgacaagaaaaaaaacagaggcttttgctttcttgaatatgaagatcacaaaacagctgcccaggcaaggcgtaggttaatgagtggtaaagtcaaggtctgggggaatgttggaactgttgaatgggctgatcctatagaagatcctgatcctgaggttatggcaaaggtaaaagtgctgtttgtacgcaaccttgccaatactgtaacagaagagattttagaaaaggcatttagtcagtttgggaaactggaacgagtgaagaagttaaaagattatgcgttcattcattttgatgagcgagatggtgctgtcaaggctatggaagaaatgaatggcaaagacttggagggagaaaatattgaaattgtttttgccaagccaccagatcagaaaaggaaagaaagaaaagctcagaggcaagcagcaaaaaatcaaatgtatgacgattactactattatggtccacctcatatgccccctccaacaagaggtcgagggcgtggaggtagaggtggttatggatatcctccagattattatggatatgaagattattatgattattatggttatgattaccataactatcgtggtggatatgaagatccatactatggttatgaagattttcaagttggagctagaggaaggggtggtagaggagcaaggggtgctgctccatccagaggtcgtggggctgctcctccccgcggtagagccggttattcacagagaggaggtcctggatcagcaagaggcgttcgaggtgcgagaggaggtgcccaacaacaaagaggccgcgggcagggaaaaggggtcgaggccggtcctgacctgttacaatgaagactgacttgctatgtgggattacaccagaagcttgcagtggagtaatggtaaggaaatcaagcaaccttaaatatgtcggctgtataggagcatattctattgcagaagaccttcctatgaagatcatggaatcaaatacgggacattgaactaatacttggactttgatatgaatttctttaacaattttctctgcagtgcaagttattaaactaaagctactctattttcaaaatgtgttccaacagaaatccttcataactcctagcatggtatcttaataaagaataaagttcttttaaaaatctgctctaagtagatttttccccttttttaaattaaggatcccaacagtggtattttgaaatattctcttgaatttgtgcatttaaattttattgcagtggtatagatgaatgccactgatggtatccttaaattttatttctgctcaccaaggttaatcatgattgtctatatcttttttatagtgatcacttttgaattgtgttcagatatgcagtttcaggtgtaatcatcagagctggttagtcaggcattccagatagtggttcttttcagaacctttttaaaagggttggttaactacctcagtagcagaggattgaactataccctgtctgtactgtacatagaaaatctttgtagataaaagcaaggcttgttaaatatgatatgagggtaagattttaatataccaaatgtaacattcttagttgcctttagtttcagaggcttgtaagacttcctcatgaccatcataacaggccttgcttttgtcgtattttgtggctgaaaaagcagccttgcttcttcagatattgtagttatttggatgtataatagtttagcaagatgttacttttgtaagacatcagatgttcaaaaaagtgcatccgaacttgtactaaatactgcagtgtccctttataaaaagtcagactaaaactgacaattgtacagcgaacctgacatttggatattttgaagttttttcataaatcatagaaattagtatatggctgtagtttagctttttaggtaaaaggtatgtttcattagtgcatttcttcctgctgatcactgtaaacatgtgaatcagctttccatttcttatgcaggtcatgataacttgtagagtagagtacaatcatttgtgctatgtttttaattttctaaagcaccttgatgacagtgagtgtccagtggtgaagcatcctctattgaaccaccctcaaaaatttttttgccaagtcctaagttgatagcttaaagtaaaaagtgaaaattatagtttcattaggacttggtgtaaagaaatcccctccccccttccccaaagggatactgcagttatatcacatacccaataggcaccacgatgaagatcagagcttatacttaattaaggttttatacacaccagttccccagtaaatgcaaatttaacaagaaaatcagacatgtcatatgttcaaaatgctcatggcaaacaatcattttgcattcctgcaaataaaattgttttatactgtaagctggaggcgagtgtaacttatttttgtaataaagtttttacggtactgtttctctagtgtgtcaagcaatactagagtgtgctgttagatgtatgccatgctccggattgtgaaacgtagaaatgcacacacatcagtaggtatattggtatctttacataatctcttacgt

SEQ ID NO: 365616 - DNA, 3774 bp, Homo sapiens
agagaggagccgactcggcagggactgggggaccgggccgagagtgcgagcgagcgagggagggagtgagggagcgtgcgagccagaaggggaaaggcggccactcgtgcctgagcgaccgcagaggggagtgggagcagtggggtaaaggagcggggggcgggaataagaaaggccgagagaaggcggacagaggctagtggtggtggtggtggtagggggagaaggaggagctggaggagggcaggggctgagggagtgagtgaagcggacgcgcgagggaggggagggaagggaagggaagggaagggggggtcacgcgggggcgcgcgcgcgcaccgggagcgcgctcggaggcgagtggaactggatcgggtttgctgccagcggcgtgagcttcggccgccattttacaacagctccactcgcgccggacacagggagcagcgagcacgcgtttcccgcaacccgataccatcggacaggatttctccgcctcagcccaacggggagatctctggaaacatggctacagaacatgttaatggaaatggtactgaagagcccatggatactacttctgcagttatccattcagaaaattttcagacattgcttgatgctggtttaccacagaaagttgctgaaaaactagatgaaatttacgttgcagggctagttgcacatagtgatttagatgaaagagctattgaagctttaaaagaattcaatgaagacggtgcattggcagttcttcaacagtttaaagacagtgatctctctcatgttcagaacaaaagtgcctttttatgtggagtcatgaagacttacaggcagagagaaaaacaagggaccaaagtagcagattctagtaaaggaccagatgaggcaaaaattaaggcactcttggaaagaacaggctacacacttgatgtgaccactggacagaggaagtatggaggaccacctccagattccgtttattcaggtcagcagccttctgttggcactgagatatttgtgggaaagatcccaagagatctatttgaggatgaacttgttccattatttgagaaagctggacctatatgggatcttcgtctaatgatggatccactcactggtctcaatagaggttatgcgtttgtcactttttgtacaaaagaagcagctcaggaggctgttaaactgtataataatcatgaaattcgttctggaaaacatattggtgtctgcatctcagttgccaacaataggctttttgtgggctctattcctaagagtaaaaccaaggaacagattcttgaagaatttagcaaagtaacagagggtcttacagacgtcattttataccaccaaccggatgacaagaaaaaaaacagaggcttttgctttcttgaatatgaagatcacaaaacagctgcccaggcaaggcgtaggttaatgagtggtaaagtcaaggtctgggggaatgttggaactgttgaatgggctgatcctatagaagatcctgatcctgaggttatggcaaaggtaaaagtgctgtttgtacgcaaccttgccaatactgtaacagaagagattttagaaaaggcatttagtcagtttgggaaactggaacgagtgaagaagttaaaagattatgcgttcattcattttgatgagcgagatggtgctgtcaaggctatggaagaaatgaatggcaaagacttggagggagaaaatattgaaattgtttttgccaagccaccagatcagaaaaggaaagaaagaaaagctcagaggcaagcagcaaaaaatcaaatgtatgacgattactactattatggtccacctcatatgccccctccaacaagaggtcgagggcgtggaggtagaggtggttatggatatcctccagattattatggatatgaagattattatgattattatggttatgattaccataactatcgtggtggatatgaagatccatactatggttatgaagattttcaagttggagctagaggaaggggtggtagaggagcaaggggtgctgctccatccagaggtcgtggggctgctcctccccgcggtagagccggttattcacagagaggaggtcctggatcagcaagaggcgttcgaggtgcgagaggaggtgcccaacaacaaagaggccgcgggcagggaaaaggggtcgaggccggtcctgacctgttacaatgaagactgacttgctatgtgggattacaccagaagcttgcagtggagtaatggtaaggaaatcaagcaaccttaaatatgtcggctgtataggagcatattctattgcagaagaccttcctatgaagatcatggaatcaaatacgggacattgaactaatacttggactttgatatgaatttctttaacaattttctctgcagtgcaagttattaaactaaagctactctattttcaaaatgtgttccaacagaaatccttcataactcctagcatggtatcttaataaagaataaagttcttttaaaaatctgctctaagtagatttttccccttttttaaattaaggatcccaacagtggtattttgaaatattctcttgaatttgtgcatttaaattttattgcagtggtatagatgaatgccactgatggtatccttaaattttatttctgctcaccaaggttaatcatgattgtctatatcttttttatagtgatcacttttgaattgtgttcagatatgcagtttcaggtgtaatcatcagagctggttagtcaggcattccagatagtggttcttttcagaacctttttaaaagggttggttaactacctcagtagcagaggattgaactataccctgtctgtactgtacatagaaaatctttgtagataaaagcaaggcttgttaaatatgatatgagggtaagattttaatataccaaatgtaacattcttagttgcctttagtttcagaggcttgtaagacttcctcatgaccatcataacaggccttgcttttgtcgtattttgtggctgaaaaagcagccttgcttcttcagatattgtagttatttggatgtataatagtttagcaagatgttacttttgtaagacatcagatgttcaaaaaagtgcatccgaacttgtactaaatactgcagtgtccctttataaaaagtcagactaaaactgacaattgtacagcgaacctgacatttggatattttgaagttttttcataaatcatagaaattagtatatggctgtagtttagctttttaggtaaaaggtatgtttcattagtgcatttcttcctgctgatcactgtaaacatgtgaatcagctttccatttcttatgcaggtcatgataacttgtagagtagagtacaatcatttgtgctatgtttttaattttctaaagcaccttgatgacagtgagtgtccagtggtgaagcatcctctattgaaccaccctcaaaaatttttttgccaagtcctaagttgatagcttaaagtaaaaagtgaaaattatagtttcattaggacttggtgtaaagaaatcccctccccccttccccaaagggatactgcagttatatcacatacccaataggcaccacgatgaagatcagagcttatacttaattaaggttttatacacaccagttccccagtaaatgcaaatttaacaagaaaatcagacatgtcatatgttcaaaatgctcatggcaaacaatcattttgcattcctgcaaataaaattgttttatactgta

SEQ ID NO: 365617 - DNA, 6763 bp, Homo sapiens
gcgtggtcgcggccgaggtacgcggggtttaaagacagtgatctctctcatgttcagaacaaaagtgcctttttatgtggagtcatgaagacttacaggcagagagaaaaacaagggaccaaagtagcagattctagtaaaggaccagatgaggcaaaaattaaggcactcttggaaagaacaggctacacacttgatgtgaccactggacagaggaagtatggaggaccacctccagattccgtttattcaggtcagcagccttctgttggcactgagatatttgtgggaaagatcccaagagatctatttgaggatgaacttgttccattatttgagaaagctggacctatatgggatcttcgtctaatgatggatccactcactggtctcaatagaggttatgcgtttgtcactttttgtacaaaagaagcagctcaggaggctgttaaactgtataataatcatgaaattcgttctggaaaacatattggtgtctgcatctcagttgccaacaataggctttttgtgggctctattcctaagagtaaaaccaaggaacagattcttgaagaatttagcaaagtaacagagggtcttacagacgtcattttataccaccaaccggatgacaagaaaaaaaacagaggcttttgctttcttgaatatgaagatcacaaaacagctgcccaggcaaggcgtaggttaatgagtggtaaagtcaaggtctgggggaatgttggaactgttgaatgggctgatcctatagaagatcctgatcctgaggttatggcaaaggtaaaagtgctgtttgtacgcaaccttgccaatactgtaacagaagagattttagaaaaggcatttagtcagtttgggaaactggaacgagtgaagaagttaaaagattatgcgttcattcattttgatgagcgagatggtgctgtcaaggctatggaagaaatgaatggcaaagacttggagggagaaaatattgaaattgtttttgccaagccaccagatcagaaaaggaaagaaagaaaagctcagaggcaagcagcaaaaaatcaaatgtatgacgattactactattatggtccacctcatatgccccctccaacaagaggtcgagggcgtggaggtagaggtggttatggatatcctccagattattatggatatgaagattattatgattattatggttatgattaccataactatcgtggtggatatgaagatccatactatggttatgaagattttcaagttggagctagaggaaggggtggtagaggagcaaggggtgctgctccatccagaggtcgtggggctgctcctccccgcggtagagccggttattcacagagaggaggtcctggatcagcaagaggcgttcgaggtgcgagaggaggtgcccaacaacaaagaggccgcgggcagggaaaaggggtcgaggccggtcctgacctgttacaatgaagactgacttgctatgtgggattacaccagaagcttgcagtggagtaatggtaaggaaatcaagcaaccttaaatatgtcggctgtataggagcatattctattgcagaagaccttcctatgaagatcatggaatcaaatacgggacattgaactaatacttggactttgatatgaatttctttaacaattttctctgcagtgcaagttattaaactaaagctactctattttcaaaatgtgttccaacagaaatccttcataactcctagcatggtatcttaataaagaataaagttcttttaaaaatctgctctaagtagatttttccccttttttaaattaaggatcccaacagtggtattttgaaatattctcttgaatttgtgcatttaaattttattgcagtggtatagatgaatgccactgatggtatccttaaattttatttctgctcaccaaggttaatcatgattgtctatatcttttttatagtgatcacttttgaattgtgttcagatatgcagtttcaggtgtaatcatcagagctggttagtcaggcattccagatagtggttcttttcagaacctttttaaaagggttggttaactacctcagtagcagaggattgaactataccctgtctgtactgtacatagaaaatctttgtagataaaagcaaggcttgttaaatatgatatgagggtaagattttaatataccaaatgtaacattcttagttgcctttagtttcagaggcttgtaagacttcctcatgaccatcataacaggccttgcttttgtcgtattttgtggctgaaaaagcagccttgcttcttcagatattgtagttatttggatgtataatagtttagcaagatgttacttttgtaagacatcagatgttcaaaaaagtgcatccgaacttgtactaaatactgcagtgtccctttataaaaagtcagactaaaactgacaattgtacagcgaacctgacatttggatattttgaagttttttcataaatcatagaaattagtatatggctgtagtttagctttttaggtaaaaggtatgtttcattagtgcatttcttcctgctgatcactgtaaacatgtgaatcagctttccatttcttatgcaggtcatgataacttgtagagtagagtacaatcatttgtgctatgtttttaattttctaaagcaccttgatgacagtgagtgtccagtggtgaagcatcctctattgaaccaccctcaaaaatttttttgccaagtcctaagttgatagcttaaagtaaaaagtgaaaattatagtttcattaggacttggtgtaaagaaatcccctccccccttccccaaagggatactgcagttatatcacatacccaataggcaccacgatgaagatcagagcttatacttaattaaggttttatacacaccagttccccagtaaatgcaaatttaacaagaaaatcagacatgtcatatgttcaaaatgctcatggcaaacaatcattttgcattcctgcaaataaaattgttttatactgtaagctggaggcgagtgtaacttatttttgtaataaagtttttattttttttatgtgtcattaatataaatgtgtgttagtgtagaaatcttctggtttaaaaacttagaattgcacacatttcagtatgtttatttgtacttacataattttagaatagtggttgccaatagcctgtatgtttcacattaattggttttttgttatctaaataaatcattttagtatgttgtatgtcagttactgggatagctgggacatagagtgtaatttaaaatttgtcaataagtattcattggaatatatgtaaatgtgccttgccggttattgaaacttatctacaaaatgagtatggggtgacaaaaattagttcctggtgcttaatgaaactttctgccactgattttatatattaccccgtgcttttttaaagtacatctctctcaaaacttagtgtaagtttgagggctacacaaaacatttacatttcattctaacataatgaatataataggttgtggaaagtgggtaaactaaatgtagccttcagtaaaattgaatctcagtgtaatccttggtgctggcatttctcagttccgaggagttaaatgatcccatctaagaggtcattgccatgcctattggcactttactgtcatagcatttttaagggacactgtcaaggtgtttaagttctcagaattacttgttgggattttaggacaggtttgtttacttaaagtaagaactgcattgtcaaagttgaaagaggaacacttttgtgagttcacaaatgtgttcttaagaaaacattaaaatatggagctctgggttttcaagactatttggcattcttaatttggggacttgggagggaaactgataaaaagaaattgaagaattgatggttatacttaaagaagggtaatgtaaacagtggtgatgaaatatatacacatcaagtgaaattacttgacagtgttcatttgaatgactttgaattcaagccattataattacttttaaaattaaatatcatttgcactgttctgataatgggtgcagtttttgagcaatataatcagagctaaatatgcatgtagtgattagtgatgtgaacaattaacgttctgagaagaaatactaactgtggtattttcaaacttaaatttctgtagtaaaatcagtatcaaagtcttatcagatcaaggaaaaacaggcaatgcatataaacatacttttgaatgttgtgtggcctataaagcaataatgcaatttatatggaatgtcatgggatatgagaaatggaaatgcaaaaataactaatcctttagtaaaaatgtcaacatgttaaagggggaatgttaactaatgtaggttattgctatttgtgatttgtttatgggttcttggctttgacagcttcaaagaatggacagtgataagttaaaagaaattttgtatattgtcaaggaaagggtcttaaatccgagtcaagtcccttccttggggtaaaaaatgtattcttaaagcattctgatgttaaaaagaaaacttaagttatctaaccaaaacagacgcaagattttgtttctgcagactacttggcaatcaaaagtgatcataaatttaggttatcagttttcagaaagttgctttgtgagaaaattttgttagatatattctcccaagcatgctttttgtggaaggttttcagccattgccactgaatcagatgttaaaaatgaagggaaaattgagtgtgcacacacacaactgttgtacactcatgattgcagtttttagcttaagaaacttttctaccagttactgtgaatctgacttaaaatgtaaagtttcctcatgataaaataggaacaacatagaaatggattgatggggtgatctgagttattgtatataaaagtttttaaagaatagaatgaacatcaagctagataggcaaaaattgacacattcagaacagcttttttgactgcgaagccaaaagttgtcagaaacagcaaaagatcccttattattacagagtattttacgtagtctctattttaaggagagaaattaaatagaagggcttcatgcatttaggggagggtgctaaaacttctcaagttcgtcaaacttacaggaatacccaccatgatcattttctctctaattatgtataccacaaaattttcatctggccataggaattcactggtgggtgtaaaattaatgactaaagaaattaagtgacaaatacataaaagaaacagacttgtggggatattgttttaaggtgtattaattactcagtgatgataccactcaatagggcatgccactacttttcttaagatgctaattatgaagcagtgctcacaggcattttttaactagcaaattagtagatggacttttggggtctgtcactttttaaaagtatttaagacttaaattctattagcaccacagtctgccttcagtaatacacctaaaatatttttcaggaccagaagcattcagtttgaaaatttgcagatgcaaaccagtattattactaacgctctgggtcaaagattaggtttttaatattaacagtagtctggtaaatatttagaagtctggcattgagaaacaaaagcttgtacctgactagtatttttatttaaaaaaattagttctgttagcttatttaaattgtgttttatttatccgtagaatttatatttatttcattcctttcatctcactgaaaactgtctgcaggccctttgatttggattagatgtgtgaagtactgtcttttgccaaaaacctcaaattacctgttcttttcaacgtagtgggtttgtgcttgtttggagatcagttcaaaaactatctgtactatctgtactgcctctgatgttaagattttatgtatagcataaggaagctagctctgactatattttcctaagaataaagacctatttttgtagcatgtcttaggatctccaggagtccaagaattattgtgggtgtcctccaattcatcactcttcacttaacagcttttaagtagacacttggaatctttagaggtctgtcgccctttgattatccatacattcgaagtaactagccaatggtgaaaaattcctcaagatatcctcagttgcaatcacattactggaagatgaatagaataaatgtattaggctggtcttaatttttgatggaaatattctgttgtcccgtacttgccattggatttgataaagttagtggtaatttggaaagaatcggggacttgccaatatatttgtgggttttagcttatacccctaggatttcttggttgcgggacgagcagttttggccacttccatcaggacaagactttttaggtcacttagtgcaggttttagtttctattttggattaacaacatttatattgattatcgaaaagaagctttcatcatttcagaacagtcctggaagtttgactttgagtgtgggagaagtcctaataaaccattttggaaattagtgtctccaagtgttacagcttcctaaaatgggtttctaacacagtgggatcaaaataaggttattttaggataatatactgtaaacttaattgactgtctgattttctactttgtctataaagtggcttacaacaggttctaatctagaaaggagttataaaggttatctgtaatgtttatgaatt

SEQ ID NO: 365618 - DNA, 7312 bp, Homo sapiens
agagaggagccgactcggcagggactgggggaccgggccgagagtgcgagcgagcgagggagggagtgagggagcgtgcgagccagaaggggaaaggcggccactcgtgcctgagcgaccgcagaggggagtgggagcagtggggtaaaggagcggggggcgggaataagaaaggccgagagaaggcggacagaggctagtggtggtggtggtggtagggggagaaggaggagctggaggagggcaggggctgagggagtgagtgaagcggacgcgcgagggaggggagggaagggaagggaagggaagggggggtcacgcgggggcgcgcgcgcgcaccgggagcgcgctcggaggcgagtggaactggatcgggtttgctgccagcggcgtgagcttcggccgccattttacaacagctccactcgcgccggacacagggagcagcgagcacgcgtttcccgcaacccgataccatcggacaggatttctccgcctcagcccaacggggagggctagttgcacatagtgatttagatgaaagagctattgaagctttaaaagaattcaatgaagacggtgcattggcagttcttcaacagtttaaagacagtgatctctctcatgttcagaacaaaagtgcctttttatgtggagtcatgaagacttacaggcagagagaaaaacaagggaccaaagtagcagattctagtaaaggaccagatgaggcaaaaattaaggcactcttggaaagaacaggctacacacttgatgtgaccactggacagaggaagtatggaggaccacctccagattccgtttattcagatatttgtgggaaagatcccaagagatctatttgaggatgaacttgttccattatttgagaaagctggacctatatgggatcttcgtctaatgatggatccactcactggtctcaatagaggttatgcgtttgtcactttttgtacaaaagaagcagctcaggaggctgttaaactgtataataatcatgaaattcgttctggaaaacatattggtgtctgcatctcagttgccaacaataggctttttgtgggctctattcctaagagtaaaaccaaggaacagattcttgaagaatttagcaaagtaacagagggtcttacagacgtcattttataccaccaaccggatgacaagaaaaaaaacagaggcttttgctttcttgaatatgaagatcacaaaacagctgcccaggcaaggcgtaggttaatgagtggtaaagtcaaggtctgggggaatgttggaactgttgaatgggctgatcctatagaagatcctgatcctgaggttatggcaaaggtaaaagtgctgtttgtacgcaaccttgccaatactgtaacagaagagattttagaaaaggcatttagtcagtttgggaaactggaacgagtgaagaagttaaaagattatgcgttcattcattttgatgagcgagatggtgctgtcaaggctatggaagaaatgaatggcaaagacttggagggagaaaatattgaaattgtttttgccaagccaccagatcagaaaaggaaagaaagaaaagctcagaggcaagcagcaaaaaatcaaatgtatgacgattactactattatggtccacctcatatgccccctccaacaagaggtcgagggcgtggaggtagaggtggttatggatatcctccagattattatggatatgaagattattatgattattatggttatgattaccataactatcgtggtggatatgaagatccatactatggttatgaagattttcaagttggagctagaggaaggggtggtagaggagcaaggggtgctgctccatccagaggtcgtggggctgctcctccccgcggtagagccggttattcacagagaggaggtcctggatcagcaagaggcgttcgaggtgcgagaggaggtgcccaacaacaaagaggccgcgggcagggaaaaggggtcgaggccggtcctgacctgttacaatgaagactgacttgctatgtgggattacaccagaagcttgcagtggagtaatggtaaggaaatcaagcaaccttaaatatgtcggctgtataggagcatattctattgcagaagaccttcctatgaagatcatggaatcaaatacgggacattgaactaatacttggactttgatatgaatttctttaacaattttctctgcagtgcaagttattaaactaaagctactctattttcaaaatgtgttccaacagaaatccttcataactcctagcatggtatcttaataaagaataaagttcttttaaaaatctgctctaagtagatttttccccttttttaaattaaggatcccaacagtggtattttgaaatattctcttgaatttgtgcatttaaattttattgcagtggtatagatgaatgccactgatggtatccttaaattttatttctgctcaccaaggttaatcatgattgtctatatcttttttatagtgatcacttttgaattgtgttcagatatgcagtttcaggtgtaatcatcagagctggttagtcaggcattccagatagtggttcttttcagaacctttttaaaagggttggttaactacctcagtagcagaggattgaactataccctgtctgtactgtacatagaaaatctttgtagataaaagcaaggcttgttaaatatgatatgagggtaagattttaatataccaaatgtaacattcttagttgcctttagtttcagaggcttgtaagacttcctcatgaccatcataacaggccttgcttttgtcgtattttgtggctgaaaaagcagccttgcttcttcagatattgtagttatttggatgtataatagtttagcaagatgttacttttgtaagacatcagatgttcaaaaaagtgcatccgaacttgtactaaatactgcagtgtccctttataaaaagtcagactaaaactgacaattgtacagcgaacctgacatttggatattttgaagttttttcataaatcatagaaattagtatatggctgtagtttagctttttaggtaaaaggtatgtttcattagtgcatttcttcctgctgatcactgtaaacatgtgaatcagctttccatttcttatgcaggtcatgataacttgtagagtagagtacaatcatttgtgctatgtttttaattttctaaagcaccttgatgacagtgagtgtccagtggtgaagcatcctctattgaaccaccctcaaaaatttttttgccaagtcctaagttgatagcttaaagtaaaaagtgaaaattatagtttcattaggacttggtgtaaagaaatcccctccccccttccccaaagggatactgcagttatatcacatacccaataggcaccacgatgaagatcagagcttatacttaattaaggttttatacacaccagttccccagtaaatgcaaatttaacaagaaaatcagacatgtcatatgttcaaaatgctcatggcaaacaatcattttgcattcctgcaaataaaattgttttatactgtaagctggaggcgagtgtaacttatttttgtaataaagtttttattttttttatgtgtcattaatataaatgtgtgttagtgtagaaatcttctggtttaaaaacttagaattgcacacatttcagtatgtttatttgtacttacataattttagaatagtggttgccaatagcctgtatgtttcacattaattggttttttgttatctaaataaatcattttagtatgttgtatgtcagttactgggatagctgggacatagagtgtaatttaaaatttgtcaataagtattcattggaatatatgtaaatgtgccttgccggttattgaaacttatctacaaaatgagtatggggtgacaaaaattagttcctggtgcttaatgaaactttctgccactgattttatatattaccccgtgcttttttaaagtacatctctctcaaaacttagtgtaagtttgagggctacacaaaacatttacatttcattctaacataatgaatataataggttgtggaaagtgggtaaactaaatgtagccttcagtaaaattgaatctcagtgtaatccttggtgctggcatttctcagttccgaggagttaaatgatcccatctaagaggtcattgccatgcctattggcactttactgtcatagcatttttaagggacactgtcaaggtgtttaagttctcagaattacttgttgggattttaggacaggtttgtttacttaaagtaagaactgcattgtcaaagttgaaagaggaacacttttgtgagttcacaaatgtgttcttaagaaaacattaaaatatggagctctgggttttcaagactatttggcattcttaatttggggacttgggagggaaactgataaaaagaaattgaagaattgatggttatacttaaagaagggtaatgtaaacagtggtgatgaaatatatacacatcaagtgaaattacttgacagtgttcatttgaatgactttgaattcaagccattataattacttttaaaattaaatatcatttgcactgttctgataatgggtgcagtttttgagcaatataatcagagctaaatatgcatgtagtgattagtgatgtgaacaattaacgttctgagaagaaatactaactgtggtattttcaaacttaaatttctgtagtaaaatcagtatcaaagtcttatcagatcaaggaaaaacaggcaatgcatataaacatacttttgaatgttgtgtggcctataaagcaataatgcaatttatatggaatgtcatgggatatgagaaatggaaatgcaaaaataactaatcctttagtaaaaatgtcaacatgttaaagggggaatgttaactaatgtaggttattgctatttgtgatttgtttatgggttcttggctttgacagcttcaaagaatggacagtgataagttaaaagaaattttgtatattgtcaaggaaagggtcttaaatccgagtcaagtcccttccttggggtaaaaaatgtattcttaaagcattctgatgttaaaaagaaaacttaagttatctaaccaaaacagacgcaagattttgtttctgcagactacttggcaatcaaaagtgatcataaatttaggttatcagttttcagaaagttgctttgtgagaaaattttgttagatatattctcccaagcatgctttttgtggaaggttttcagccattgccactgaatcagatgttaaaaatgaagggaaaattgagtgtgcacacacacaactgttgtacactcatgattgcagtttttagcttaagaaacttttctaccagttactgtgaatctgacttaaaatgtaaagtttcctcatgataaaataggaacaacatagaaatggattgatggggtgatctgagttattgtatataaaagtttttaaagaatagaatgaacatcaagctagataggcaaaaattgacacattcagaacagcttttttgactgcgaagccaaaagttgtcagaaacagcaaaagatcccttattattacagagtattttacgtagtctctattttaaggagagaaattaaatagaagggcttcatgcatttaggggagggtgctaaaacttctcaagttcgtcaaacttacaggaatacccaccatgatcattttctctctaattatgtataccacaaaattttcatctggccataggaattcactggtgggtgtaaaattaatgactaaagaaattaagtgacaaatacataaaagaaacagacttgtggggatattgttttaaggtgtattaattactcagtgatgataccactcaatagggcatgccactacttttcttaagatgctaattatgaagcagtgctcacaggcattttttaactagcaaattagtagatggacttttggggtctgtcactttttaaaagtatttaagacttaaattctattagcaccacagtctgccttcagtaatacacctaaaatatttttcaggaccagaagcattcagtttgaaaatttgcagatgcaaaccagtattattactaacgctctgggtcaaagattaggtttttaatattaacagtagtctggtaaatatttagaagtctggcattgagaaacaaaagcttgtacctgactagtatttttatttaaaaaaattagttctgttagcttatttaaattgtgttttatttatccgtagaatttatatttatttcattcctttcatctcactgaaaactgtctgcaggccctttgatttggattagatgtgtgaagtactgtcttttgccaaaaacctcaaattacctgttcttttcaacgtagtgggtttgtgcttgtttggagatcagttcaaaaactatctgtactatctgtactgcctctgatgttaagattttatgtatagcataaggaagctagctctgactatattttcctaagaataaagacctatttttgtagcatgtcttaggatctccaggagtccaagaattattgtgggtgtcctccaattcatcactcttcacttaacagcttttaagtagacacttggaatctttagaggtctgtcgccctttgattatccatacattcgaagtaactagccaatggtgaaaaattcctcaagatatcctcagttgcaatcacattactggaagatgaatagaataaatgtattaggctggtcttaatttttgatggaaatattctgttgtcccgtacttgccattggatttgataaagttagtggtaatttggaaagaatcggggacttgccaatatatttgtgggttttagcttatacccctaggatttcttggttgcgggacgagcagttttggccacttccatcaggacaagactttttaggtcacttagtgcaggttttagtttctattttggattaacaacatttatattgattatcgaaaagaagctttcatcatttcagaacagtcctggaagtttgactttgagtgtgggagaagtcctaataaaccattttggaaattagtgtctccaagtgttacagcttcctaaaatgggtttctaacacagtgggatcaaaataaggttattttaggataatatactgtaaacttaattgactgtctgattttctactttgtctataaagtggcttacaacaggttctaatctagaaaggagttataaaggttatctgtaatgtttatgaatt

SEQ ID NO: 365619 - DNA, 6421 bp, Homo sapiens
  misc_feature (32)..(32): n is a, c, g, or t
  misc_feature (44)..(44): n is a, c, g, or t
tgatataaaccactgctttaatattgtaaacntaaatgtccaantataatgaccaacttatctaataatgaaaactgcagtagcagaactattaagcagatctttataattaacttatgaagactatttaacatagaaaaatatttatatgtaaaaaacacagacccaaattacatattctctataagtatatggttaaaaaacctgcaagaaaatatacctaaatgctaatgttcattgcattcagatgatagaattatggattttatccatagatttttcttctagattttatagtttttaaaaattatgatgccccttatatttatattgggaaatatacatttaaacaaactattatttggctaccatgctaatattcacaaccatgtggcactagcctaaaataaacttttcagaagaaactaaattattctatctaaatattctgggaaacgtttaagtgatattggaatctctatcaaaatttccacaccagagtgaagaaagacaaattagatgtgggatgaaagttgttctcactgataagtgagagctaaatgatgagaacacatggacacataaagggcaacaacacacactggggctatggaagaaatgaatggcaaagacttggagggagaaaatattgaaattgtttttgccaagccaccagatcagaaaaggaaagaaagaaaagctcagaggcaagcagcaaaaaatcaaatgtatgacgattactactattatggtccacctcatatgccccctccaacaagaggtcgagggcgtggaggtagaggtggttatggatatcctccagattattatggatatgaagattattatgattattatggttatgattaccataactatcgtggtggatatgaagatccatactatggttatgaagattttcaagttggagctagaggaaggggtggtagaggagcaaggggtgctgctccatccagaggtcgtggggctgctcctccccgcggtagagccggttattcacagagaggaggtcctggatcagcaagaggcgttcgaggtgcgagaggaggtgcccaacaacaaagaggccgcgggcagggaaaaggggtcgaggccggtcctgacctgttacaatgaagactgacttgctatgtgggattacaccagaagcttgcagtggagtaatggtaaggaaatcaagcaaccttaaatatgtcggctgtataggagcatattctattgcagaagaccttcctatgaagatcatggaatcaaatacgggacattgaactaatacttggactttgatatgaatttctttaacaattttctctgcagtgcaagttattaaactaaagctactctattttcaaaatgtgttccaacagaaatccttcataactcctagcatggtatcttaataaagaataaagttcttttaaaaatctgctctaagtagatttttccccttttttaaattaaggatcccaacagtggtattttgaaatattctcttgaatttgtgcatttaaattttattgcagtggtatagatgaatgccactgatggtatccttaaattttatttctgctcaccaaggttaatcatgattgtctatatcttttttatagtgatcacttttgaattgtgttcagatatgcagtttcaggtgtaatcatcagagctggttagtcaggcattccagatagtggttcttttcagaacctttttaaaagggttggttaactacctcagtagcagaggattgaactataccctgtctgtactgtacatagaaaatctttgtagataaaagcaaggcttgttaaatatgatatgagggtaagattttaatataccaaatgtaacattcttagttgcctttagtttcagaggcttgtaagacttcctcatgaccatcataacaggccttgcttttgtcgtattttgtggctgaaaaagcagccttgcttcttcagatattgtagttatttggatgtataatagtttagcaagatgttacttttgtaagacatcagatgttcaaaaaagtgcatccgaacttgtactaaatactgcagtgtccctttataaaaagtcagactaaaactgacaattgtacagcgaacctgacatttggatattttgaagttttttcataaatcatagaaattagtatatggctgtagtttagctttttaggtaaaaggtatgtttcattagtgcatttcttcctgctgatcactgtaaacatgtgaatcagctttccatttcttatgcaggtcatgataacttgtagagtagagtacaatcatttgtgctatgtttttaattttctaaagcaccttgatgacagtgagtgtccagtggtgaagcatcctctattgaaccaccctcaaaaatttttttgccaagtcctaagttgatagcttaaagtaaaaagtgaaaattatagtttcattaggacttggtgtaaagaaatcccctccccccttccccaaagggatactgcagttatatcacatacccaataggcaccacgatgaagatcagagcttatacttaattaaggttttatacacaccagttccccagtaaatgcaaatttaacaagaaaatcagacatgtcatatgttcaaaatgctcatggcaaacaatcattttgcattcctgcaaataaaattgttttatactgtaagctggaggcgagtgtaacttatttttgtaataaagtttttattttttttatgtgtcattaatataaatgtgtgttagtgtagaaatcttctggtttaaaaacttagaattgcacacatttcagtatgtttatttgtacttacataattttagaatagtggttgccaatagcctgtatgtttcacattaattggttttttgttatctaaataaatcattttagtatgttgtatgtcagttactgggatagctgggacatagagtgtaatttaaaatttgtcaataagtattcattggaatatatgtaaatgtgccttgccggttattgaaacttatctacaaaatgagtatggggtgacaaaaattagttcctggtgcttaatgaaactttctgccactgattttatatattaccccgtgcttttttaaagtacatctctctcaaaacttagtgtaagtttgagggctacacaaaacatttacatttcattctaacataatgaatataataggttgtggaaagtgggtaaactaaatgtagccttcagtaaaattgaatctcagtgtaatccttggtgctggcatttctcagttccgaggagttaaatgatcccatctaagaggtcattgccatgcctattggcactttactgtcatagcatttttaagggacactgtcaaggtgtttaagttctcagaattacttgttgggattttaggacaggtttgtttacttaaagtaagaactgcattgtcaaagttgaaagaggaacacttttgtgagttcacaaatgtgttcttaagaaaacattaaaatatggagctctgggttttcaagactatttggcattcttaatttggggacttgggagggaaactgataaaaagaaattgaagaattgatggttatacttaaagaagggtaatgtaaacagtggtgatgaaatatatacacatcaagtgaaattacttgacagtgttcatttgaatgactttgaattcaagccattataattacttttaaaattaaatatcatttgcactgttctgataatgggtgcagtttttgagcaatataatcagagctaaatatgcatgtagtgattagtgatgtgaacaattaacgttctgagaagaaatactaactgtggtattttcaaacttaaatttctgtagtaaaatcagtatcaaagtcttatcagatcaaggaaaaacaggcaatgcatataaacatacttttgaatgttgtgtggcctataaagcaataatgcaatttatatggaatgtcatgggatatgagaaatggaaatgcaaaaataactaatcctttagtaaaaatgtcaacatgttaaagggggaatgttaactaatgtaggttattgctatttgtgatttgtttatgggttcttggctttgacagcttcaaagaatggacagtgataagttaaaagaaattttgtatattgtcaaggaaagggtcttaaatccgagtcaagtcccttccttggggtaaaaaatgtattcttaaagcattctgatgttaaaaagaaaacttaagttatctaaccaaaacagacgcaagattttgtttctgcagactacttggcaatcaaaagtgatcataaatttaggttatcagttttcagaaagttgctttgtgagaaaattttgttagatatattctcccaagcatgctttttgtggaaggttttcagccattgccactgaatcagatgttaaaaatgaagggaaaattgagtgtgcacacacacaactgttgtacactcatgattgcagtttttagcttaagaaacttttctaccagttactgtgaatctgacttaaaatgtaaagtttcctcatgataaaataggaacaacatagaaatggattgatggggtgatctgagttattgtatataaaagtttttaaagaatagaatgaacatcaagctagataggcaaaaattgacacattcagaacagcttttttgactgcgaagccaaaagttgtcagaaacagcaaaagatcccttattattacagagtattttacgtagtctctattttaaggagagaaattaaatagaagggcttcatgcatttaggggagggtgctaaaacttctcaagttcgtcaaacttacaggaatacccaccatgatcattttctctctaattatgtataccacaaaattttcatctggccataggaattcactggtgggtgtaaaattaatgactaaagaaattaagtgacaaatacataaaagaaacagacttgtggggatattgttttaaggtgtattaattactcagtgatgataccactcaatagggcatgccactacttttcttaagatgctaattatgaagcagtgctcacaggcattttttaactagcaaattagtagatggacttttggggtctgtcactttttaaaagtatttaagacttaaattctattagcaccacagtctgccttcagtaatacacctaaaatatttttcaggaccagaagcattcagtttgaaaatttgcagatgcaaaccagtattattactaacgctctgggtcaaagattaggtttttaatattaacagtagtctggtaaatatttagaagtctggcattgagaaacaaaagcttgtacctgactagtatttttatttaaaaaaattagttctgttagcttatttaaattgtgttttatttatccgtagaatttatatttatttcattcctttcatctcactgaaaactgtctgcaggccctttgatttggattagatgtgtgaagtactgtcttttgccaaaaacctcaaattacctgttcttttcaacgtagtgggtttgtgcttgtttggagatcagttcaaaaactatctgtactatctgtactgcctctgatgttaagattttatgtatagcataaggaagctagctctgactatattttcctaagaataaagacctatttttgtagcatgtcttaggatctccaggagtccaagaattattgtgggtgtcctccaattcatcactcttcacttaacagcttttaagtagacacttggaatctttagaggtctgtcgccctttgattatccatacattcgaagtaactagccaatggtgaaaaattcctcaagatatcctcagttgcaatcacattactggaagatgaatagaataaatgtattaggctggtcttaatttttgatggaaatattctgttgtcccgtacttgccattggatttgataaagttagtggtaatttggaaagaatcggggacttgccaatatatttgtgggttttagcttatacccctaggatttcttggttgcgggacgagcagttttggccacttccatcaggacaagactttttaggtcacttagtgcaggttttagtttctattttggattaacaacatttatattgattatcgaaaagaagctttcatcatttcagaacagtcctggaagtttgactttgagtgtgggagaagtcctaataaaccattttggaaattagtgtctccaagtgttacagcttcctaaaatgggtttctaacacagtgggatcaaaataaggttattttaggataatatactgtaaacttaattgactgtctgattttctactttgtctataaagtggcttacaacaggttctaatctagaaaggagttataaaggttatctgtaatgtttatgaatt

SEQ ID NO: 365620 - DNA, 5743 bp, Homo sapiens
gcacgaggagagagagagagagagagagaaagagcagcaaaaaatcaaatgtatgacgattactactattatggtccacctcatatgccccctccaacaagaggtcgagggcgtggaggtagaggtggttatggatatcctccagattattatggatatgaagattattatgattattatggttatgattaccataactatcgtggtggatatgaagatccatactatggttatgaagattttcaagttggagctagaggaaggggtggtagaggagcaaggggtgctgctccatccagaggtcgtggggctgctcctccccgcggtagagccggttattcacagagaggaggtcctggatcagcaagaggcgttcgaggtgcgagaggaggtgcccaacaacaaagaggccgcgggcagggaaaaggggtcgaggccggtcctgacctgttacaatgaagactgacttgctatgtgggattacaccagaagcttgcagtggagtaatggtaaggaaatcaagcaaccttaaatatgtcggctgtataggagcatattctattgcagaagaccttcctatgaagatcatggaatcaaatacgggacattgaactaatacttggactttgatatgaatttctttaacaattttctctgcagtgcaagttattaaactaaagctactctattttcaaaatgtgttccaacagaaatccttcataactcctagcatggtatcttaataaagaataaagttcttttaaaaatctgctctaagtagatttttccccttttttaaattaaggatcccaacagtggtattttgaaatattctcttgaatttgtgcatttaaattttattgcagtggtatagatgaatgccactgatggtatccttaaattttatttctgctcaccaaggttaatcatgattgtctatatcttttttatagtgatcacttttgaattgtgttcagatatgcagtttcaggtgtaatcatcagagctggttagtcaggcattccagatagtggttcttttcagaacctttttaaaagggttggttaactacctcagtagcagaggattgaactataccctgtctgtactgtacatagaaaatctttgtagataaaagcaaggcttgttaaatatgatatgagggtaagattttaatataccaaatgtaacattcttagttgcctttagtttcagaggcttgtaagacttcctcatgaccatcataacaggccttgcttttgtcgtattttgtggctgaaaaagcagccttgcttcttcagatattgtagttatttggatgtataatagtttagcaagatgttacttttgtaagacatcagatgttcaaaaaagtgcatccgaacttgtactaaatactgcagtgtccctttataaaaagtcagactaaaactgacaattgtacagcgaacctgacatttggatattttgaagttttttcataaatcatagaaattagtatatggctgtagtttagctttttaggtaaaaggtatgtttcattagtgcatttcttcctgctgatcactgtaaacatgtgaatcagctttccatttcttatgcaggtcatgataacttgtagagtagagtacaatcatttgtgctatgtttttaattttctaaagcaccttgatgacagtgagtgtccagtggtgaagcatcctctattgaaccaccctcaaaaatttttttgccaagtcctaagttgatagcttaaagtaaaaagtgaaaattatagtttcattaggacttggtgtaaagaaatcccctccccccttccccaaagggatactgcagttatatcacatacccaataggcaccacgatgaagatcagagcttatacttaattaaggttttatacacaccagttccccagtaaatgcaaatttaacaagaaaatcagacatgtcatatgttcaaaatgctcatggcaaacaatcattttgcattcctgcaaataaaattgttttatactgtaagctggaggcgagtgtaacttatttttgtaataaagtttttattttttttatgtgtcattaatataaatgtgtgttagtgtagaaatcttctggtttaaaaacttagaattgcacacatttcagtatgtttatttgtacttacataattttagaatagtggttgccaatagcctgtatgtttcacattaattggttttttgttatctaaataaatcattttagtatgttgtatgtcagttactgggatagctgggacatagagtgtaatttaaaatttgtcaataagtattcattggaatatatgtaaatgtgccttgccggttattgaaacttatctacaaaatgagtatggggtgacaaaaattagttcctggtgcttaatgaaactttctgccactgattttatatattaccccgtgcttttttaaagtacatctctctcaaaacttagtgtaagtttgagggctacacaaaacatttacatttcattctaacataatgaatataataggttgtggaaagtgggtaaactaaatgtagccttcagtaaaattgaatctcagtgtaatccttggtgctggcatttctcagttccgaggagttaaatgatcccatctaagaggtcattgccatgcctattggcactttactgtcatagcatttttaagggacactgtcaaggtgtttaagttctcagaattacttgttgggattttaggacaggtttgtttacttaaagtaagaactgcattgtcaaagttgaaagaggaacacttttgtgagttcacaaatgtgttcttaagaaaacattaaaatatggagctctgggttttcaagactatttggcattcttaatttggggacttgggagggaaactgataaaaagaaattgaagaattgatggttatacttaaagaagggtaatgtaaacagtggtgatgaaatatatacacatcaagtgaaattacttgacagtgttcatttgaatgactttgaattcaagccattataattacttttaaaattaaatatcatttgcactgttctgataatgggtgcagtttttgagcaatataatcagagctaaatatgcatgtagtgattagtgatgtgaacaattaacgttctgagaagaaatactaactgtggtattttcaaacttaaatttctgtagtaaaatcagtatcaaagtcttatcagatcaaggaaaaacaggcaatgcatataaacatacttttgaatgttgtgtggcctataaagcaataatgcaatttatatggaatgtcatgggatatgagaaatggaaatgcaaaaataactaatcctttagtaaaaatgtcaacatgttaaagggggaatgttaactaatgtaggttattgctatttgtgatttgtttatgggttcttggctttgacagcttcaaagaatggacagtgataagttaaaagaaattttgtatattgtcaaggaaagggtcttaaatccgagtcaagtcccttccttggggtaaaaaatgtattcttaaagcattctgatgttaaaaagaaaacttaagttatctaaccaaaacagacgcaagattttgtttctgcagactacttggcaatcaaaagtgatcataaatttaggttatcagttttcagaaagttgctttgtgagaaaattttgttagatatattctcccaagcatgctttttgtggaaggttttcagccattgccactgaatcagatgttaaaaatgaagggaaaattgagtgtgcacacacacaactgttgtacactcatgattgcagtttttagcttaagaaacttttctaccagttactgtgaatctgacttaaaatgtaaagtttcctcatgataaaataggaacaacatagaaatggattgatggggtgatctgagttattgtatataaaagtttttaaagaatagaatgaacatcaagctagataggcaaaaattgacacattcagaacagcttttttgactgcgaagccaaaagttgtcagaaacagcaaaagatcccttattattacagagtattttacgtagtctctattttaaggagagaaattaaatagaagggcttcatgcatttaggggagggtgctaaaacttctcaagttcgtcaaacttacaggaatacccaccatgatcattttctctctaattatgtataccacaaaattttcatctggccataggaattcactggtgggtgtaaaattaatgactaaagaaattaagtgacaaatacataaaagaaacagacttgtggggatattgttttaaggtgtattaattactcagtgatgataccactcaatagggcatgccactacttttcttaagatgctaattatgaagcagtgctcacaggcattttttaactagcaaattagtagatggacttttggggtctgtcactttttaaaagtatttaagacttaaattctattagcaccacagtctgccttcagtaatacacctaaaatatttttcaggaccagaagcattcagtttgaaaatttgcagatgcaaaccagtattattactaacgctctgggtcaaagattaggtttttaatattaacagtagtctggtaaatatttagaagtctggcattgagaaacaaaagcttgtacctgactagtatttttatttaaaaaaattagttctgttagcttatttaaattgtgttttatttatccgtagaatttatatttatttcattcctttcatctcactgaaaactgtctgcaggccctttgatttggattagatgtgtgaagtactgtcttttgccaaaaacctcaaattacctgttcttttcaacgtagtgggtttgtgcttgtttggagatcagttcaaaaactatctgtactatctgtactgcctctgatgttaagattttatgtatagcataaggaagctagctctgactatattttcctaagaataaagacctatttttgtagcatgtcttaggatctccaggagtccaagaattattgtgggtgtcctccaattcatcactcttcacttaacagcttttaagtagacacttggaatctttagaggtctgtcgccctttgattatccatacattcgaagtaactagccaatggtgaaaaattcctcaagatatcctcagttgcaatcacattactggaagatgaatagaataaatgtattaggctggtcttaatttttgatggaaatattctgttgtcccgtacttgccattggatttgataaagttagtggtaatttggaaagaatcggggacttgccaatatatttgtgggttttagcttatacccctaggatttcttggttgcgggacgagcagttttggccacttccatcaggacaagactttttaggtcacttagtgcaggttttagtttctattttggattaacaacatttatattgattatcgaaaagaagctttcatcatttcagaacagtcctggaagtttgactttgagtgtgggagaagtcctaataaaccattttggaaattagtgtctccaagtgttacagcttcctaaaatgggtttctaacacagtgggatcaaaataaggttattttaggataatatactgtaaacttaattgactgtctgattttctactttgtctataaagtggcttacaacaggttctaatctagaaaggagttataaaggttatctgtaatgtttatgaatt

SEQ ID NO: 365621 - DNA, 2660 bp, Homo sapiens
agagaggagccgactcggcagggactgggggaccgggccgagagtgcgagcgagcgagggagggagtgagggagcgtgcgagccagaaggggaaaggcggccactcgtgcctgagcgaccgcagaggggagtgggagcagtggggtaaaggagcggggggcgggaataagaaaggccgagagaaggcggacagaggctagtggtggtggtggtggtagggggagaaggaggagctggaggagggcaggggctgagggagtgagtgaagcggacgcgcgagggaggggagggaagggaagggaagggaagggggggtcacgcgggggcgcgcgcgcgcaccgggagcgcgctcggaggcgagtggaactggatcgggtttgctgccagcggcgtgagcttcggccgccattttacaacagctccactcgcgccggacacagggagcagcgagcacgcgtttcccgcaacccgataccatcggacaggatttctccgcctcagcccaacggggagatctctggaaacatggctacagaacatgttaatggaaatggtactgaagagcccatggatactacttctgcagttatccattcagaaaattttcagacattgcttgatgctggtttaccacagaaagttgctgaaaaactagatgaaatttacgttgcagggctagttgcacatagtgatttagatgaaagagctattgaagctttaaaagaattcaatgaagacggtgcattggcagttcttcaacagtttaaagacagtgatctctctcatgttcagaacaaaagtgcctttttatgtggagtcatgaagacttacaggcagagagaaaaacaagggaccaaagtagcagattctagtaaaggaccagatgaggcaaaaattaaggcactcttggaaagaacaggctacacacttgatgtgaccactggacagaggaagtatggaggaccacctccagattccgtttattcaggtcagcagccttctgttggcactgagatatttgtgggaaagatcccaagagatctatttgaggatgaacttgttccattatttgagaaagctggacctatatgggatcttcgtctaatgatggatccactcactggtctcaatagaggttatgcgtttgtcactttttgtacaaaagaagcagctcaggaggctgttaaactgtataataatcatgaaattcgttctggaaaacatattggtgtctgcatctcagttgccaacaataggctttttgtgggctctattcctaagagtaaaaccaaggaacagattcttgaagaatttagcaaagtaacagagggtcttacagacgtcattttataccaccaaccggatgacaagaaaaaaaacagaggcttttgctttcttgaatatgaagatcacaaaacagctgcccaggcaaggcgtaggttaatgagtggtaaagtcaaggtctgggggaatgttggaactgttgaatgggctgatcctatagaagatcctgatcctgaggttatggcaaaggtaaaagtgctgtttgtacgcaaccttgccaatactgtaacagaagagattttagaaaaggcatttagtcagtttgggaaactggaacgagtgaagaagttaaaagattatgcgttcattcattttgatgagcgagatggtgctgtcaaggctatggaagaaatgaatggcaaagacttggagggagaaaatattgaaattgtttttgccaagccaccagatcagaaaaggaaagaaagaaaagctcagaggcaagcagcaaaaaatcaaatgtatgacgattactactattatggtccacctcatatgccccctccaacaagaggtcgagggcgtggaggtagaggtggttatggatatcctccagattattatggatatgaagattattatgattattatggttatgattaccataactatcgtggtggatatgaagatccatactatggttatgaagattttcaagttggagctagaggaaggggtggtagaggagcaaggggtgctgctccatccagaggtcgtggggctgctcctccccgcggtagagccggttattcacagagaggaggtcctggatcagcaagaggcgttcgaggtgcgagaggaggtgcccaacaacaaagaggccgcggggtacgtggtgcgaggggtggccgcggtggaaatgtaggaggaaagcgcaaagctgatgggtacaaccagccagattccaagcggcgccagaccaataatcagaactggggctcccaacccattgctcagcaaccgctccaagcagggaaaaggggtcgaggccggtcctgacctgttacaatgaagactgacttgctatgtgggattacaccagaagcttgcagtggagtaatggtaaggaaatcaagcaaccttaaatatgtcggctgtataggagcatattctattgcagaagaccttcctatgaagatcatggaatcaaatacgggacattgaactaatacttggactttgatatgaatttctttaacaattttctctgcagtgcaagttattaaactaaagctactctattttcaaaatgtgttccaacagaaatccttcataactcctagcatggtatcttaataaagaataaagttctttta

SEQ ID NO: 365622 - DNA, 4757 bp, Homo sapiens
ggtcgactataccctgtctgtactgtacatagttcaatcctctgctactgaggtagttaacctttttaaaagggttggttaactacctcagtagcagaggattgaactataccctgtctgtactgtacatagaaaatctttgtagataaaagcaaggcttgttaaatatgatatgagggtaagattttaatataccaaatgtaacattcttagttgcctttagtttcagaggcttgtaagacttcctcatgaccatcataacaggccttgcttttgtcgtattttgtggctgaaaaagcagccttgcttcttcagatattgtagttatttggatgtataatagtttagcaagatgttacttttgtaagacatcagatgttcaaaaaagtgcatccgaacttgtactaaatactgcagtgtccctttataaaaagtcagactaaaactgacaattgtacagcgaacctgacatttggatattttgaagttttttcataaatcatagaaattagtatatggctgtagtttagctttttaggtaaaaggtatgtttcattagtgcatttcttcctgctgatcactgtaaacatgtgaatcagctttccatttcttatgcaggtcatgataacttgtagagtagagtacaatcatttgtgctatgtttttaattttctaaagcaccttgatgacagtgagtgtccagtggtgaagcatcctctattgaaccaccctcaaaaatttttttgccaagtcctaagttgatagcttaaagtaaaaagtgaaaattatagtttcattaggacttggtgtaaagaaatcccctccccccttccccaaagggatactgcagttatatcacatacccaataggcaccacgatgaagatcagagcttatacttaattaaggttttatacacaccagttccccagtaaatgcaaatttaacaagaaaatcagacatgtcatatgttcaaaatgctcatggcaaacaatcattttgcattcctgcaaataaaattgttttatactgtaagctggaggcgagtgtaacttatttttgtaataaagtttttattttttttatgtgtcattaatataaatgtgtgttagtgtagaaatcttctggtttaaaaacttagaattgcacacatttcagtatgtttatttgtacttacataattttagaatagtggttgccaatagcctgtatgtttcacattaattggttttttgttatctaaataaatcattttagtatgttgtatgtcagttactgggatagctgggacatagagtgtaatttaaaatttgtcaataagtattcattggaatatatgtaaatgtgccttgccggttattgaaacttatctacaaaatgagtatggggtgacaaaaattagttcctggtgcttaatgaaactttctgccactgattttatatattaccccgtgcttttttaaagtacatctctctcaaaacttagtgtaagtttgagggctacacaaaacatttacatttcattctaacataatgaatataataggttgtggaaagtgggtaaactaaatgtagccttcagtaaaattgaatctcagtgtaatccttggtgctggcatttctcagttccgaggagttaaatgatcccatctaagaggtcattgccatgcctattggcactttactgtcatagcatttttaagggacactgtcaaggtgtttaagttctcagaattacttgttgggattttaggacaggtttgtttacttaaagtaagaactgcattgtcaaagttgaaagaggaacacttttgtgagttcacaaatgtgttcttaagaaaacattaaaatatggagctctgggttttcaagactatttggcattcttaatttggggacttgggagggaaactgataaaaagaaattgaagaattgatggttatacttaaagaagggtaatgtaaacagtggtgatgaaatatatacacatcaagtgaaattacttgacagtgttcatttgaatgactttgaattcaagccattataattacttttaaaattaaatatcatttgcactgttctgataatgggtgcagtttttgagcaatataatcagagctaaatatgcatgtagtgattagtgatgtgaacaattaacgttctgagaagaaatactaactgtggtattttcaaacttaaatttctgtagtaaaatcagtatcaaagtcttatcagatcaaggaaaaacaggcaatgcatataaacatacttttgaatgttgtgtggcctataaagcaataatgcaatttatatggaatgtcatgggatatgagaaatggaaatgcaaaaataactaatcctttagtaaaaatgtcaacatgttaaagggggaatgttaactaatgtaggttattgctatttgtgatttgtttatgggttcttggctttgacagcttcaaagaatggacagtgataagttaaaagaaattttgtatattgtcaaggaaagggtcttaaatccgagtcaagtcccttccttggggtaaaaaatgtattcttaaagcattctgatgttaaaaagaaaacttaagttatctaaccaaaacagacgcaagattttgtttctgcagactacttggcaatcaaaagtgatcataaatttaggttatcagttttcagaaagttgctttgtgagaaaattttgttagatatattctcccaagcatgctttttgtggaaggttttcagccattgccactgaatcagatgttaaaaatgaagggaaaattgagtgtgcacacacacaactgttgtacactcatgattgcagtttttagcttaagaaacttttctaccagttactgtgaatctgacttaaaatgtaaagtttcctcatgataaaataggaacaacatagaaatggattgatggggtgatctgagttattgtatataaaagtttttaaagaatagaatgaacatcaagctagataggcaaaaattgacacattcagaacagcttttttgactgcgaagccaaaagttgtcagaaacagcaaaagatcccttattattacagagtattttacgtagtctctattttaaggagagaaattaaatagaagggcttcatgcatttaggggagggtgctaaaacttctcaagttcgtcaaacttacaggaatacccaccatgatcattttctctctaattatgtataccacaaaattttcatctggccataggaattcactggtgggtgtaaaattaatgactaaagaaattaagtgacaaatacataaaagaaacagacttgtggggatattgttttaaggtgtattaattactcagtgatgataccactcaatagggcatgccactacttttcttaagatgctaattatgaagcagtgctcacaggcattttttaactagcaaattagtagatggacttttggggtctgtcactttttaaaagtatttaagacttaaattctattagcaccacagtctgccttcagtaatacacctaaaatatttttcaggaccagaagcattcagtttgaaaatttgcagatgcaaaccagtattattactaacgctctgggtcaaagattaggtttttaatattaacagtagtctggtaaatatttagaagtctggcattgagaaacaaaagcttgtacctgactagtatttttatttaaaaaaattagttctgttagcttatttaaattgtgttttatttatccgtagaatttatatttatttcattcctttcatctcactgaaaactgtctgcaggccctttgatttggattagatgtgtgaagtactgtcttttgccaaaaacctcaaattacctgttcttttcaacgtagtgggtttgtgcttgtttggagatcagttcaaaaactatctgtactatctgtactgcctctgatgttaagattttatgtatagcataaggaagctagctctgactatattttcctaagaataaagacctatttttgtagcatgtcttaggatctccaggagtccaagaattattgtgggtgtcctccaattcatcactcttcacttaacagcttttaagtagacacttggaatctttagaggtctgtcgccctttgattatccatacattcgaagtaactagccaatggtgaaaaattcctcaagatatcctcagttgcaatcacattactggaagatgaatagaataaatgtattaggctggtcttaatttttgatggaaatattctgttgtcccgtacttgccattggatttgataaagttagtggtaatttggaaagaatcggggacttgccaatatatttgtgggttttagcttatacccctaggatttcttggttgcgggacgagcagttttggccacttccatcaggacaagactttttaggtcacttagtgcaggttttagtttctattttggattaacaacatttatattgattatcgaaaagaagctttcatcatttcagaacagtcctggaagtttgactttgagtgtgggagaagtcctaataaaccattttggaaattagtgtctccaagtgttacagcttcctaaaatgggtttctaacacagtgggatcaaaataaggttattttaggataatatactgtaaacttaattgactgtctgattttctactttgtctataaagtggcttacaacaggttctaatctagaaaggagttataaaggttatctgtaatgtttatgaatt

SEQ ID NO: 365623 - DNA, 1645 bp, Homo sapiens
agagaggagccgactcggcagggactgggggaccgggccgagagtgcgagcgagcgagggagggagtgagggagcgtgcgagccagaaggggaaaggcggccactcgtgcctgagcgaccgcagaggggagtgggagcagtggggtaaaggagcggggggcgggaataagaaaggccgagagaaggcggacagaggctagtggtggtggtggtggtagggggagaaggaggagctggaggagggcaggggctgagggagtgagtgaagcggacgcgcgagggaggggagggaagggaagggaagggaagggggggtcacgcgggggcgcgcgcgcgcaccgggagcgcgctcggaggcgagtggaactggatcgggtttgctgccagcggcgtgagcttcggccgccattttacaacagctccactcgcgccggacacagggagcagcgagcacgcgtttcccgcaacccgataccatcggacaggatttctccgcctcagcccaacggggagatctctggaaacatggctacagaacatgttaatggaaatggtactgaagagcccatggatactacttctgcagttatccattcagaaaattttcagacattgcttgatgctggtttaccacagaaagttgctgaaaaactagatgaaatttacgttgcagggctagttgcacatagtgatttagatgaaagagctattgaagctttaaaagaattcaatgaagacggtgcattggcagttcttcaacagtttaaagacagtgatctctctcatgttcagaacaaaagtgcctttttatgtggagtcatgaagacttacaggcagagagaaaaacaagggaccaaagtagcagattctagtaaaggaccagatgaggcaaaaattaaggcactcttggaaagaacaggctacacacttgatgtgaccactggacagaggaagtatggaggaccacctccagattccgtttattcaggtcagcagccttctgttggcactgagatatttgtgggaaagatcccaagagatctatttgaggatgaacttgttccattatttgagaaagctggacctatatgggatcttcgtctaatgatggatccactcactggtctcaatagaggttatgcgtttgtcactttttgtacaaaagaagcagctcaggaggctgttaaactgtataataatcatgaaattcgttctggaaaacatattggtgtctgcatctcagttgccaacaataggctttttgtgggctctattcctaagagtaaaaccaaggaacagattcttgaagaatttagcaaagtaacagagggtcttacagacgtcattttataccaccaaccggatgacaagaaaaaaaacagaggcttttgctttcttgaatatgaagatcacaaaacagctgcccaggtaaaagtgctgtttgtacgcaaccttgccaatactgtaacagaagagattttagaaaaggcatttagtcagtttgggaaactggaacgagtgaagaagttaaaagattatgcgttcattcattttgatgagcgagatggtgctgtcaagctatggaagaaatgaatggcaaacttggattacccatatgatgtttcacgccgggccgggcgggggg

SEQ ID NO: 365624 - DNA, 1413 bp, Homo sapiens
agagaggagccgactcggcagggactgggggaccgggccgagagtgcgagcgagcgagggagggagtgagggagcgtgcgagccagaaggggaaaggcggccactcgtgcctgagcgaccgcagaggggagtgggagcagtggggtaaaggagcggggggcgggaataagaaaggccgagagaaggcggacagaggctagtggtggtggtggtggtagggggagaaggaggagctggaggagggcaggggctgagggagtgagtgaagcggacgcgcgagggaggggagggaagggaagggaagggaagggggggtcacgcgggggcgcgcgcgcgcaccgggagcgcgctcggaggcgagtggaactggatcgggtttgctgccagcggcgtgagcttcggccgccattttacaacagctccactcgcgccggacacagggagcagcgagcacgcgtttcccgcaacccgataccatcggacaggatttctccgcctcagcccaacggggagatctctggaaacatggctacagaacatgttaatggaaatggtactgaagagcccatggatactacttctgcagttatccattcagaaaattttcagacattgcttgatgctggtttaccacagaaagttgctgaaaaactagatgaaatttacgttgcagggctagttgcacatagtgatttagatgaaagagctattgaagctttaaaagaattcaatgaagacggtgcattggcagttcttcaacagtttaaagacagtgatctctctcatgttcagaacaaaagtgcctttttatgtggagtcatgaagacttacaggcagagagaaaaacaagggaccaaagtagcagattctagtaaaggaccagatgaggcaaaaattaaggcactcttggaaagaacaggctacacacttgatgtgaccactggacagaggaagtatggaggaccacctccagattccgtttattcaggtcagcagccttctgttggcactgagatatttgtgggaaagatcccaagagatctatttgaggatgaacttgttccattatttgagaaagctggacctatatgggatcttcgtctaatgatggatccactcactggtctcaatagaggttatgcgtttgtcactttttgtacaaaagaagcagctcaggaggctgttaaactgtataataatcatgaaattcgttctggaaaacatattggtgtctgcatctcagttgccaacaataggctttttgtgggctctattcctaagagtaaaaccaaggaacagattcttgaagaatttagcaaagtaacagaggtcttcagcgtcatttatacaccaccggatgacagaaaaaacagagctttgcttctgatatgagtccaacactgccagcagcgt

SEQ ID NO: 365625 - DNA, 1442 bp, Homo sapiens
agagaggagccgactcggcagggactgggggaccgggccgagagtgcgagcgagcgagggagggagtgagggagcgtgcgagccagaaggggaaaggcggccactcgtgcctgagcgaccgcagaggggagtgggagcagtggggtaaaggagcggggggcgggaataagaaaggccgagagaaggcggacagaggctagtggtggtggtggtggtagggggagaaggaggagctggaggagggcaggggctgagggagtgagtgaagcggacgcgcgagggaggggagggaagggaagggaagggaagggggggtcacgcgggggcgcgcgcgcgcaccgggagcgcgctcggaggcgagtggaactggatcgggtttgctgccagcggcgtgagcttcggccgccattttacaacagctccactcgcgccggacacagggagcagcgagcacgcgtttcccgcaacccgataccatcggacaggatttctccgcctcagcccaacggggagatctctggaaacatggctacagaacatgttaatggaaatggtactgaagagcccatggatactacttctgcagttatccattcagaaaattttcagacattgcttgatgctggtttaccacagaaagttgctgaaaaactagatgaaatttacgttgcagggctagttgcacatagtgatttagatgaaagagctattgaagctttaaaagaattcaatgaagacggtgcattggcagttcttcaacagtttaaagacagtgatctctctcatgttcagaacaaaagtgcctttttatgtggagtcatgaagacttacaggcagagagaaaaacaagggaccaaagtagcagattctagtaaaggaccagatgaggcaaaaattaaggcactcttggaaagaacaggctacacacttgatgtgaccactggacagaggaagtatggaggaccacctccagattccgtttattcaggtcagcagccttctgttggcactgagtttgtgggcgaaaagatcccaagagatctatttgagggagtgaactttgtttccacttaatttggaggaaaagctgggaccctaattatgggaatctctcgcgctaaatggaggtggattcccacttcaccgtgggtctcccacattcagaagggtttaatagcaggttggtgccaccttttttgtggtgaccaaaaaaaggaaagccaagccgttcaacgagggaagagggcgtggttctaacaaaccgtgggtttattaaattatactctccttgcaacaactgtccgggtttccgtggggagaaaacccttatctgtgggcgggtccgggcacattcttcacaaggttgggcccaaaccacacattagggggccttttacatagggcggggggggccacactatttgccccttaaaaggaaggat

SEQ ID NO: 365626 - DNA, 2518 bp, Homo sapiens
agagaggagccgactcggcagggactgggggaccgggccgagagtgcgagcgagcgagggagggagtgagggagcgtgcgagccagaaggggaaaggcggccactcgtgcctgagcgaccgcagaggggagtgggagcagtggggtaaaggagcggggggcgggaataagaaaggccgagagaaggcggacagaggctagtggtggtggtggtggtagggggagaaggaggagctggaggagggcaggggctgagggagtgagtgaagcggacgcgcgagggaggggagggaagggaagggaagggaagggggggtcacgcgggggcgcgcgcgcgcaccgggagcgcgctcggaggcgagtggaactggatcgggtttgctgccagcggcgtgagcttcggccgccattttacaacagctccactcgcgccggacacagggagcagcgagcacgcgtttcccgcaacccgataccatcggacaggatttctccgcctcagcccaacggggagatctctggaaacatggctacagaacatgttaatggaaatggtactgaagagcccatggatactacttctgcagttatccattcagaaaattttcagacattgcttgatgctggtttaccacagaaagttgctgaaaaactagatgaaatttacgttgcagggctagttgcacatagtgatttagatgaaagagctattgaagctttaaaagaattcaatgaagacggtgcattggcagttcttcaacagtttaaagacagtgatctctctcatgttcagaacaaaagtgcctttttatgtggagtcatgaagacttacaggcagagagaaaaacaagggaccaaagtagcagattctagtaaaggaccagatgaggcaaaaattaaggcactcttggaaagaacaggctacacacttgatgtgaccactggacagaggaagtatggaggaccacctccagattccgtttattcaggtcagcagccttctgttggcactgagatatttgtgggaaagatcccaagagatctatttgaggatgaacttgttccattatttgagaaagctggacctatatgggatcttcgtctaatgatggatccactcactggtctcaatagaggttatgcgtttgtcactttttgtacaaaagaagcagctcaggaggctgttaaactgtataataatcatgaaattcgttctggaaaacatattggtgtctgcatctcagttgccaacaataggctttttgtgggctctattcctaagagtaaaaccaaggaacagattcttgaagaatttagcaaagtaacagagggtcttacagacgtcattttataccaccaaccggatgacaagaaaaaaaacagaggcttttgctttcttgaatatgaagatcacaaaacagctgcccaggcaaggcgtaggttaatgagtggtaaagtcaaggtctgggggaatgttggaactgttgaatgggctgatcctatagaagatcctgatcctgaggttatggcaaaggtaaaagtgctgtttgtacgcaaccttgccaatactgtaacagaagagattttagaaaaggcatttagtcagtttgggaaactggaacgagtgaagaagttaaaagattatgcgttcattcattttgatgagcgagatggtgctgtcaaggctatggaagaaatgaatggcaaagacttggagggagaaaatattgaaattgtttttgccaagccaccagatcagaaaaggaaagaaagaaaagctcagaggcaagcagcaaaaaatcaaatgtatgacgattactactattatggtccacctcatatgccccctccaacaagaggtcgagggcgtggaggtagaggtggttatggatatcctccagattattatggatatgaagattattatgattattatggttatgattaccataactatcgtggtggatatgaagatccatactatggttatgaagattttcaagttggagctagaggaaggggtggtagaggagcaaggggtgctgctccatccagaggtcgtggggctgctcctccccgcggtagagccggttattcacagagaggaggtcctggatcagcaagaggcgttcgaggtgcgagaggaggtgcccaacaacaaagaggccgcgggcagggaaaaggggtcgaggccggtcctgacctgttacaatgaagactgacttgctatgtgggattacaccagaagcttgcagtggagtaatggtaaggaaatcaagcaaccttaaatatgtcggctgtataggagcatattctattgcagaagaccttcctatgaagatcatggaatcaaatacgggacattgaactaatacttggactttgatatgaatttctttaacaattttctctgcagtgcaagttattaaactaaagctactctattttcaaaatgtgttccaacagaaatccttcataactcctagcatggtatcttaataaagaataaagttctttta

SEQ ID NO: 365627 - DNA, 763 bp, Homo sapiens
gcacgaggagagagagagagagagagagaaagagcagcaaaaaatcaaatgtatgacgattactactattatggtccacctcatatgccccctccaacaagaggtcgagggcgtggaggtagaggtggttatggatatcctccagattattatggatatgaagattattatgattattatggttatgattaccataactatcgtggtggatatgaagatccatactatggttatgaagattttcaagttggagctagaggaaggggtggtagaggagcaaggggtgctgctccatccagaggtcgtggggctgctcctccccgcggtagagccggttattcacagagaggaggtcctggatcagcaagaggcgttcgaggtgcgagaggaggtgcccaacaacaaagaggccgcgggcagggaaaaggggtcgaggccggtcctgacctgttacaatgaagactgacttgctatgtgggattacaccagaagcttgcagtggagtaatggtaaggaaatcaagcaaccttaaatatgtcggctgtataggagcatattctattgcagaagaccttcctatgaagatcatggaatcaaatacgggacattgaactaatacttggactttgatatgaatttctttaacaattttctctgcagtgcaagttattaaactaaagctactctattttcaaaatgtgttccaacagaaatccttcataactcctagcatggtatcttaataaagaataaagttctttta

SEQ ID NO: 365628 - DNA, 7371 bp, Homo sapiens
agagaggagccgactcggcagggactgggggaccgggccgagagtgcgagcgagcgagggagggagtgagggagcgtgcgagccagaaggggaaaggcggccactcgtgcctgagcgaccgcagaggggagtgggagcagtggggtaaaggagcggggggcgggaataagaaaggccgagagaaggcggacagaggctagtggtggtggtggtggtagggggagaaggaggagctggaggagggcaggggctgagggagtgagtgaagcggacgcgcgagggaggggagggaagggaagggaagggaagggggggtcacgcgggggcgcgcgcgcgcaccgggagcgcgctcggaggcgagtggaactggatcgggtttgctgccagcggcgtgagcttcggccgccattttacaacagctccactcgcgccggacacagggagcagcgagcacgcgtttcccgcaacccgataccatcggacaggatttctccgcctcagcccaacggggagatctctggaaacatggctacagaacatgttaatggaaatggtactgaagagcccatggatactacttctgcagttatccattcagaaaattttcagacattgcttgatgctggtttaccacagaaagttgctgaaaaactagatgaaatttacgttgcagggctagttgcacatagtgatttagatgaaagagctattgaagctttaaaagaattcaatgaagacggtgcattggcagttcttcaacagtttaaagacagtgatctctctcatgttcagaacaaaagtgcctttttatgtggagtcatgaagacttacaggcagagagaaaaacaagggaccaaagtagcagattctagtaaaggaccagatgaggcaaaaattaaggcactcttggaaagaacaggctacacacttgatgtgaccactggacagaggaagtatggaggaccacctccagattccgtttattcaggtcagcagccttctgttggcactgagatatttgtgggaaagatcccaagagatctatttgaggatgaacttgttccattatttgagaaagctggacctatatgggatcttcgtctaatgatggatccactcactggtctcaatagaggttatgcgtttgtcactttttgtacaaaagaagcagctcaggaggctgttaaactgtataataatcatgaaattcgttctggaaaacatattggtgtctgcatctcagttgccaacaataggctttttgtgggctctattcctaagagtaaaaccaaggaacagattcttgaagaatttagcaaagtaacagagggtcttacagacgtcattttataccaccaaccggatgacaagaaaaaaaacagaggcttttgctttcttgaatatgaagatcacaaaacagctgcccaggcaaggcgtaggttaatgagtggtaaagtcaaggtctgggggaatgttggaactgttgaatgggctgatcctatagaagatcctgatcctgaggttatggcaaaggtaaaagtgctgtttgtacgcaaccttgccaatactgtaacagaagagattttagaaaaggcatttagtcagtttgggaaactggaacgagtgaagaagttaaaagattatgcgttcattcattttgatgagcgagatggtgctgtcaaggctatggaagaaatgaatggcaaagacttggagggagaaaatattgaaattgtttttgccaagccaccagatcagaaaaggaaagaaagaaaagctcagaggcaagcagcaaaaaatcaaatgtatgacgattactactattatggtccacctcatatgccccctccaacaagaggtcgagggcgtggaggtagaggtggttatggatatcctccagattattatggatatgaagattattatgattattatggttatgattaccataactatcgtggtggatatgaagatccatactatggttatgaagattttcaagttggagctagaggaaggggtggtagaggagcaaggggtgctgctccatccagaggtcgtggggctgctcctccccgcggtagagccggttattcacagagaggaggtcctggatcagcaagaggcgttcgaggtgcgagaggaggtgcccaacaacaaagaggccgcgggcagggaaaaggggtcgaggccggtcctgacctgttacaatgaagactgacttgctatgtgggattacaccagaagcttgcagtggagtaatggtaaggaaatcaagcaaccttaaatatgtcggctgtataggagcatattctattgcagaagaccttcctatgaagatcatggaatcaaatacgggacattgaactaatacttggactttgatatgaatttctttaacaattttctctgcagtgcaagttattaaactaaagctactctattttcaaaatgtgttccaacagaaatccttcataactcctagcatggtatcttaataaagaataaagttcttttaaaaatctgctctaagtagatttttccccttttttaaattaaggatcccaacagtggtattttgaaatattctcttgaatttgtgcatttaaattttattgcagtggtatagatgaatgccactgatggtatccttaaattttatttctgctcaccaaggttaatcatgattgtctatatcttttttatagtgatcacttttgaattgtgttcagatatgcagtttcaggtgtaatcatcagagctggttagtcaggcattccagatagtggttcttttcagaacctttttaaaagggttggttaactacctcagtagcagaggattgaactataccctgtctgtactgtacatagaaaatgccttgcttttgtcgtattttgtggctgaaaaagcagccttgcttcttcagatattgtagttatttggatgtataatagtttagcaagatgttacttttgtaagacatcagatgttcaaaaaagtgcatccgaacttgtactaaatactgcagtgtccctttataaaaagtcagactaaaactgacaattgtacagcgaacctgacatttggatattttgaagttttttcataaatcatagaaattagtatatggctgtagtttagctttttaggtaaaaggtatgtttcattagtgcatttcttcctgctgatcactgtaaacatgtgaatcagctttccatttcttatgcaggtcatgataacttgtagagtagagtacaatcatttgtgctatgtttttaattttctaaagcaccttgatgacagtgagtgtccagtggtgaagcatcctctattgaaccaccctcaaaaatttttttgccaagtcctaagttgatagcttaaagtaaaaagtgaaaattatagtttcattaggacttggtgtaaagaaatcccctccccccttccccaaagggatactgcagttatatcacatacccaataggcaccacgatgaagatcagagcttatacttaattaaggttttatacacaccagttccccagtaaatgcaaatttaacaagaaaatcagacatgtcatatgttcaaaatgctcatggcaaacaatcattttgcattcctgcaaataaaattgttttatactgtaagctggaggcgagtgtaacttatttttgtaataaagtttttattttttttatgtgtcattaatataaatgtgtgttagtgtagaaatcttctggtttaaaaacttagaattgcacacatttcagtatgtttatttgtacttacataattttagaatagtggttgccaatagcctgtatgtttcacattaattggttttttgttatctaaataaatcattttagtatgttgtatgtcagttactgggatagctgggacatagagtgtaatttaaaatttgtcaataagtattcattggaatatatgtaaatgtgccttgccggttattgaaacttatctacaaaatgagtatggggtgacaaaaattagttcctggtgcttaatgaaactttctgccactgattttatatattaccccgtgcttttttaaagtacatctctctcaaaacttagtgtaagtttgagggctacacaaaacatttacatttcattctaacataatgaatataataggttgtggaaagtgggtaaactaaatgtagccttcagtaaaattgaatctcagtgtaatccttggtgctggcatttctcagttccgaggagttaaatgatcccatctaagaggtcattgccatgcctattggcactttactgtcatagcatttttaagggacactgtcaaggtgtttaagttctcagaattacttgttgggattttaggacaggtttgtttacttaaagtaagaactgcattgtcaaagttgaaagaggaacacttttgtgagttcacaaatgtgttcttaagaaaacattaaaatatggagctctgggttttcaagactatttggcattcttaatttggggacttgggagggaaactgataaaaagaaattgaagaattgatggttatacttaaagaagggtaatgtaaacagtggtgatgaaatatatacacatcaagtgaaattacttgacagtgttcatttgaatgactttgaattcaagccattataattacttttaaaattaaatatcatttgcactgttctgataatgggtgcagtttttgagcaatataatcagagctaaatatgcatgtagtgattagtgatgtgaacaattaacgttctgagaagaaatactaactgtggtattttcaaacttaaatttctgtagtaaaatcagtatcaaagtcttatcagatcaaggaaaaacaggcaatgcatataaacatacttttgaatgttgtgtggcctataaagcaataatgcaatttatatggaatgtcatgggatatgagaaatggaaatgcaaaaataactaatcctttagtaaaaatgtcaacatgttaaagggggaatgttaactaatgtaggttattgctatttgtgatttgtttatgggttcttggctttgacagcttcaaagaatggacagtgataagttaaaagaaattttgtatattgtcaaggaaagggtcttaaatccgagtcaagtcccttccttggggtaaaaaatgtattcttaaagcattctgatgttaaaaagaaaacttaagttatctaaccaaaacagacgcaagattttgtttctgcagactacttggcaatcaaaagtgatcataaatttaggttatcagttttcagaaagttgctttgtgagaaaattttgttagatatattctcccaagcatgctttttgtggaaggttttcagccattgccactgaatcagatgttaaaaatgaagggaaaattgagtgtgcacacacacaactgttgtacactcatgattgcagtttttagcttaagaaacttttctaccagttactgtgaatctgacttaaaatgtaaagtttcctcatgataaaataggaacaacatagaaatggattgatggggtgatctgagttattgtatataaaagtttttaaagaatagaatgaacatcaagctagataggcaaaaattgacacattcagaacagcttttttgactgcgaagccaaaagttgtcagaaacagcaaaagatcccttattattacagagtattttacgtagtctctattttaaggagagaaattaaatagaagggcttcatgcatttaggggagggtgctaaaacttctcaagttcgtcaaacttacaggaatacccaccatgatcattttctctctaattatgtataccacaaaattttcatctggccataggaattcactggtgggtgtaaaattaatgactaaagaaattaagtgacaaatacataaaagaaacagacttgtggggatattgttttaaggtgtattaattactcagtgatgataccactcaatagggcatgccactacttttcttaagatgctaattatgaagcagtgctcacaggcattttttaactagcaaattagtagatggacttttggggtctgtcactttttaaaagtatttaagacttaaattctattagcaccacagtctgccttcagtaatacacctaaaatatttttcaggaccagaagcattcagtttgaaaatttgcagatgcaaaccagtattattactaacgctctgggtcaaagattaggtttttaatattaacagtagtctggtaaatatttagaagtctggcattgagaaacaaaagcttgtacctgactagtatttttatttaaaaaaattagttctgttagcttatttaaattgtgttttatttatccgtagaatttatatttatttcattcctttcatctcactgaaaactgtctgcaggccctttgatttggattagatgtgtgaagtactgtcttttgccaaaaacctcaaattacctgttcttttcaacgtagtgggtttgtgcttgtttggagatcagttcaaaaactatctgtactatctgtactgcctctgatgttaagattttatgtatagcataaggaagctagctctgactatattttcctaagaataaagacctatttttgtagcatgtcttaggatctccaggagtccaagaattattgtgggtgtcctccaattcatcactcttcacttaacagcttttaagtagacacttggaatctttagaggtctgtcgccctttgattatccatacattcgaagtaactagccaatggtgaaaaattcctcaagatatcctcagttgcaatcacattactggaagatgaatagaataaatgtattaggctggtcttaatttttgatggaaatattctgttgtcccgtacttgccattggatttgataaagttagtggtaatttggaaagaatcggggacttgccaatatatttgtgggttttagcttatacccctaggatttcttggttgcgggacgagcagttttggccacttccatcaggacaagactttttaggtcacttagtgcaggttttagtttctattttggattaacaacatttatattgattatcgaaaagaagctttcatcatttcagaacagtcctggaagtttgactttgagtgtgggagaagtcctaataaaccattttggaaattagtgtctccaagtgttacagcttcctaaaatgggtttctaacacagtgggatcaaaataaggttattttaggataatatactgtaaacttaattgactgtctgattttctactttgtctataaagtggcttacaacaggttctaatctagaaaggagttataaaggttatctgtaatgtttatgaatt

SEQ ID NO: 365629 - DNA, 5053 bp, Homo sapiens
agagaggagccgactcggcagggactgggggaccgggccgagagtgcgagcgagcgagggagggagtgagggagcgtgcgagccagaaggggaaaggcggccactcgtgcctgagcgaccgcagaggggagtgggagcagtggggtaaaggagcggggggcgggaataagaaaggccgagagaaggcggacagaggctagtggtggtggtggtggtagggggagaaggaggagctggaggagggcaggggctgagggagtgagtgaagcggacgcgcgagggaggggagggaagggaagggaagggaagggggggtcacgcgggggcgcgcgcgcgcaccgggagcgcgctcggaggcgagtggaactggatcgggtttgctgccagcggcgtgagcttcggccgccattttacaacagctccactcgcgccggacacagggagcagcgagcacgcgtttcccgcaacccgataccatcggacaggatttctccgcctcagcccaacggggagatctctggaaacatggctacagaacatgttaatggaaatggtactgaagagcccatggatactacttctgcagttatccattcagaaaattttcagacattgcttgatgctggtttaccacagaaagttgctgaaaaactagatgaaatttacgttgcagggctagttgcacatagtgatttagatgaaagagctattgaagctttaaaagaattcaatgaagacggtgcattggcagttcttcaacagtttaaagacagtgatctctctcatgttcagaacaaaagtgcctttttatgtggagtcatgaagacttacaggcagagagaaaaacaagggaccaaagtagcagattctagtaaaggaccagatgaggcaaaaattaaggcactcttggaaagaacaggctacacacttgatgtgaccactggacagaggaagtatggaggaccacctccagattccgtttattcaggtcagcagccttctgttggcactgagatatttgtgggaaagatcccaagagatctatttgaggatgaacttgttccattatttgagaaagctggacctatatgggatcttcgtctaatgatggatccactcactggtctcaatagaggttatgcgtttgtcactttttgtacaaaagaagcagctcaggaggctgttaaactgtataataatcatgaaattcgttctggaaaacatattggtgtctgcatctcagttgccaacaataggctttttgtgggctctattcctaagagtaaaaccaaggaacagattcttgaagaatttagcaaagtaacagagggtcttacagacgtcattttataccaccaaccggatgacaagaaaaaaaacagaggcttttgctttcttgaatatgaagatcacaaaacagctgcccaggcaaggcgtaggttaatgagtggtaaagtcaaggtctgggggaatgttggaactgttgaatgggctgatcctatagaagatcctgatcctgaggttatggcaaaggtaaaagtgctgtttgtacgcaaccttgccaatactgtaacagaagagattttagaaaaggcatttagtcagtttgggaaactggaacgagtgaagaagttaaaagattatgcgttcattcattttgatgagcgagatggtgctgtcaaggctatggaagaaatgaatggcaaagacttggagggagaaaatattgaaattgtttttgccaagccaccagatcagaaaaggaaagaaagaaaagctcagaggcaagcagcaaaaaatcaaatgtatgacgattactactattatggtccacctcatatgccccctccaacaagaggtcgagggcgtggaggtagaggtggttatggatatcctccagattattatggatatgaagattattatgattattatggttatgattaccataactatcgtggtggatatgaagatccatactatggttatgaagattttcaagttggagctagaggaaggggtggtagaggagcaaggggtgctgctccatccagaggtcgtggggctgctcctccccgcggtagagccggttattcacagagaggaggtcctggatcagcaagaggcgttcgaggtgcgagaggaggtgcccaacaacaaagaggccgcgggcagggaaaaggggtcgaggccggtcctgacctgttacaatgaagactgacttgctatgtgggattacaccagaagcttgcagtggagtaatggtaaggaaatcaagcaaccttaaatatgtcggctgtataggagcatattctattgcagaagaccttcctatgaagatcatggaatcaaatacgggacattgaactaatacttggactttgatatgaatttctttaacaattttctctgcagtgcaagttattaaactaaagctactctattttcaaaatgtgttccaacagaaatccttcataactcctagcatggtatcttaataaagaataaagttcttttaaaaatctgctctaagtagatttttccccttttttaaattaaggatcccaacagtggtattttgaaatattctcttgaatttgtgcatttaaattttattgcagtggtatagatgaatgccactgatggtatccttaaattttatttctgctcaccaaggttaatcatgattgtctatatcttttttatagtgatcacttttgaattgtgttcagatatgcagtttcaggtgtaatcatcagagctggttagtcaggcattccagatagtggttcttttcagaacctttttaaaagggttggttaactacctcagtagcagaggattgaactataccctgtctgtactgtacatagaaaatctttgtagataaaagcaaggcttgttaaatatgatatgagggtaagattttaatataccaaatgtaacattcttagttgcctttagtttcagaggcttgtaagacttcctcatgaccatcataacaggccttgcttttgtcgtattttgtggctgaaaaagcagccttgcttcttcagatattgtagttatttggatgtataatagtttagcaagatgttacttttgtaagacatcagatgttcaaaaaagtgcatccgaacttgtactaaatactgcagtgtccctttataaaaagtcagactaaaactgacaattgtacagcgaacctgacatttggatattttgaagttttttcataaatcatagaaattagtatatggctgtagtttagctttttaggtaaaaggtatgtttcattagtgcatttcttcctgctgatcactgtaaacatgtgaatcagctttccatttcttatgcaggtcatgataacttgtagagtagagtacaatcatttgtgctatgtttttaattttctaaagcaccttgatgacagtgagtgtccagtggtgaagcatcctctattgaaccaccctcaaaaatttttttgccaagtcctaagttgatagcttaaagtaaaaagtgaaaattatagtttcattaggacttggtgtaaagaaatcccctccccccttccccaaagggatactgcagttatatcacatacccaataggcaccacgatgaagatcagagcttatacttaattaaggttttatacacaccagttccccagtaaatgcaaatttaacaagaaaatcagacatgtcatatgttcaaaatgctcatggcaaacaatcattttgcattcctgcaaataaaattgttttatactgtaagctggaggcgagtgtaacttatttttgtaataaagtttttattttttttatgtgtcattaatataaatgtgtgttagtgtagaaatcttctggtttaaaaacttagaattgcacacatttcagtatgtttatttgtacttacataattttagaatagtggttgccaatagcctgtatgtttcacattaattggttttttgttatctaaataaatcattttagtatgttgtatgtcagttactgggatagctgggacatagagtgtaatttaaaatttgtcaataagtattcattggaatatatgtaaatgtgccttgccggttattgaaacttatctacaaaatgagtatggggtgacaaaaattagttcctggtgcttaatgaaactttctgccactgattttatatattaccccgtgcttttttaaagtacatctctctcaaaacttagtgtaagtttgagggctacacaaaacatttacatttcattctaacataatgaatataataggttgtggaaagtgggtaaactaaatgtagccttcagtaaaattgaatctcagtgtaatccttggtgctggcatttctcagttccgaggagttaaatgatcccatctaagaggtcattgccatgcctattggcactttactgtcatagcatttttaagggacactgtcaaggtgtttaagttctcagaattacttgttgggattttaggacaggtttgtttacttaaagtaagaactgcattgtcaaagttgaaagaggaacacttttgtgagttcacaaatgtgttcttaagaaaacattaaaatatggagctctgggttttcaagactatttggcattcttaatttggggacttgggagggaaactgataaaaagaaattgaagaattgatggttatacttaaagaagggtaatgtaaacagtggtgatgaaatatatacacatcaagtgaaattacttgacagtgttcatttgaatgactttgaattcaagccattataattacttttaaaattaaatatcatttgcactgttctgataatgggtgcagtttttgagcaatataatcagagctaaatatgcatgtagtgattagtgatgtgaacaattaacgttctgagaagaaatactaactgtggtattttcaaacttaaatttctgtagtaaaatcagtatcaaaagggtcttttttaaaatttttcccccaaagagggggggaaaaattttttcccccaaaaaatgtggcctataaagcaataatgcaatg

SEQ ID NO: 365630 - DNA, 3370 bp, Homo sapiens
agagaggagccgactcggcagggactgggggaccgggccgagagtgcgagcgagcgagggagggagtgagggagcgtgcgagccagaaggggaaaggcggccactcgtgcctgagcgaccgcagaggggagtgggagcagtggggtaaaggagcggggggcgggaataagaaaggccgagagaaggcggacagaggctagtggtggtggtggtggtagggggagaaggaggagctggaggagggcaggggctgagggagtgagtgaagcggacgcgcgagggaggggagggaagggaagggaagggaagggggggtcacgcgggggcgcgcgcgcgcaccgggagcgcgctcggaggcgagtggaactggatcgggtttgctgccagcggcgtgagcttcggccgccattttacaacagctccactcgcgccggacacagggagcagcgagcacgcgtttcccgcaacccgataccatcggacaggatttctccgcctcagcccaacggggagatctctggaaacatggctacagaacatgttaatggaaatggtactgaagagcccatggatactacttctgcagttatccattcagaaaattttcagacattgcttgatgctggtttaccacagaaagttgctgaaaaactagatgaaatttacgttgcagggctagttgcacatagtgatttagatgaaagagctattgaagctttaaaagaattcaatgaagacggtgcattggcagttcttcaacagtttaaagacagtgatctctctcatgttcagaacaaaagtgcctttttatgtggagtcatgaagacttacaggcagagagaaaaacaagggaccaaagtagcagattctagtaaaggaccagatgaggcaaaaattaaggcactcttggaaagaacaggctacacacttgatgtgaccactggacagaggaagtatggaggaccacctccagattccgtttattcaggtcagcagccttctgttggcactgagatatttgtgggaaagatcccaagagatctatttgaggatgaacttgttccattatttgagaaagctggacctatatgggatcttcgtctaatgatggatccactcactggtctcaatagaggttatgcgtttgtcactttttgtacaaaagaagcagctcaggaggctgttaaactgtataataatcatgaaattcgttctggaaaacatattggtgtctgcatctcagttgccaacaataggctttttgtgggctctattcctaagagtaaaaccaaggaacagattcttgaagaatttagcaaagtaacagagggtcttacagacgtcattttataccaccaaccggatgacaagaaaaaaaacagaggcttttgctttcttgaatatgaagatcacaaaacagctgcccaggcaaggcgtaggttaatgagtggtaaagtcaaggtctgggggaatgttggaactgttgaatgggctgatcctatagaagatcctgatcctgaggttatggcaaaggtaaaagtgctgtttgtacgcaaccttgccaatactgtaacagaagagattttagaaaaggcatttagtcagtttgggaaactggaacgagtgaagaagttaaaagattatgcgttcattcattttgatgagcgagatggtgctgtcaaggctatggaagaaatgaatggcaaagacttggagggagaaaatattgaaattgtttttgccaagccaccagatcagaaaaggaaagaaagaaaagctcagaggcaagcagcaaaaaatcaaatgtatgacgattactactattatggtccacctcatatgccccctccaacaagaggtcgagggcgtggaggtagaggtggttatggatatcctccagattattatggatatgaagattattatgattattatggttatgattaccataactatcgtggtggatatgaagatccatactatggttatgaagattttcaagttggagctagaggaaggggtggtagaggagcaaggggtgctgctccatccagaggtcgtggggctgctcctccccgcggtagagccggttattcacagagaggaggtcctggatcagcaagaggcgttcgaggtgcgagaggaggtgcccaacaacaaagaggccgcggggtacgtggtgcgaggggtggccgcggtggaaatgtaggaggaaagcgcaaagctgatgggtacaaccagccagattccaagcggcgccagaccaataatcagaactggggctcccaacccattgctcagcaaccgctccaaggtggtgatcattctggtaactatggttacaaatctgaaaaccaggagttttatcaggatacttttgggcaacagtggaagtagaaacagtagggcctctgtaaaattggagactgataggttgatcagaaactcaccctaaatctgaacgggtgccgctataatttgtgacatctggcaagatttccctttatgtatatattttaacaatccgcttggacacgaacaaagccacacttctaactgcttctggcgaactgattttatttttaatttttttcaataaagatattcttagatactgaaagaaatagttaatgagtttgcatttgtgcttgagaaaatttggctcaagtccatttggctgtagtgtcaacgatgtttccagtagtgtttagatttggtgtcttcaaaggtagttgattaaaaccaagtgtgtctttaatatcttgtatcagaataactttgtatgttaccaacttaaattgctagaataaggtaaattgatacacaactgctatttttaatttagaactttgacctaatttgggttttcaaaaccattttggctacttgtattctttatgctgttgtttatttcaataaaaaattcacacctaaaaaaaaaaaaaaaaaaaaaaaaaaaaaaaaaaaaaaaaaaaaaaaaaaaaaaaaaaaaaaaaaaaaaaaaaaaaaaaaaaaaaacaaaaaaacgaacgaagacaaaaaaaaaaaaaaaaaaagaagaaaacaaagcgaagaaaacaaaaagcgagaaaatagaaacagagggggacgtgcagagataagatactgaggaggcagagagaaagagcagaaaagattagtaaggaagcaaggcacgcagaacggaaggggggagaagcaaaagaagagaggagcaaggagcaaaaaaaagagaagaggaagggaaaaaaaagaacagacagagagaagtagggacaagaaaacgaaggtgagggagaaagtggaaaacaaacacgagaggaacgcgcggagggataataaaggaggagagaagcgcccgaaaggggcg

SEQ ID NO: 365631 - DNA, 6718 bp, Homo sapiens
agagaggagccgactcggcagggactgggggaccgggccgagagtgcgagcgagcgagggagggagtgagggagcgtgcgagccagaaggggaaaggcggccactcgtgcctgagcgaccgcagaggggagtgggagcagtggggtaaaggagcggggggcgggaataagaaaggccgagagaaggcggacagaggctagtggtggtggtggtggtagggggagaaggaggagctggaggagggcaggggctgagggagtgagtgaagcggacgcgcgagggaggggagggaagggaagggaagggaagggggggtcacgcgggggcgcgcgcgcgcaccgggagcgcgctcggaggcgagtggaactggatcgggtttgctgccagcggcgtgagcttcggccgccattttacaacagctccactcgcgccggacacagggagcagcgagcacgcgtttcccgcaacccgataccatcggacaggatttctccgcctcagcccaacggggagatctctggaaacatggctacagaacatgttaatggaaatggtactgaagagcccatggatactacttctgcagttatccattcagaaaattttcagacattgcttgatgctggtttaccacagaaagttgctgaaaaactagatgaaatttacgttgcagggctagttgcacatagtgatttagatgaaagagctattgaagctttaaaagaattcaatgaagacggtgcattggcagttcttcaacagtttaaagacagtgatctctctcatgttcagaacaaaagtgcctttttatgtggagtcatgaagacttacaggcagagagaaaaacaagggaccaaagtagcagattctagtaaaggaccagatgaggcaaaaattaaggcactcttggaaagaacaggctacacacttgatgtgaccactggacagaggaagtatggaggaccacctccagattccgtttattcaggtcagcagccttctgttggcactgagatatttgtgggaaagatcccaagagatctatttgaggatgaacttgttccattatttgagaaagctggacctatatgggatcttcgtctaatgatggatccactcactggtctcaatagaggttatgcgtttgtcactttttgtacaaaagaagcagctcaggaggctgttaaactgtataataatcatgaaattcgttctggaaaacatattggtgtctgcatctcagttgccaacaataggctttttgtgggctctattcctaagagtaaaaccaaggaacagattcttgaagaatttagcaaagtaacagagggtcttacagacgtcattttataccaccaaccggatgacaagaaaaaaaacagaggcttttgctttcttgaatatgaagatcacaaaacagctgcccaggcaaggcgtaggttaatgagtggtaaagtcaaggtctgggggaatgttggaactgttgaatgggctgatcctatagaagatcctgatcctgaggttatggcaaaggtaaaagtgctgtttgtacgcaaccttgccaatactgtaacagaagagattttagaaaaggcatttagtcagtttgggaaacatggaatcaaatacgggacattgaactaatacttggactttgatatgaatttctttaacaattttctctgcagtgcaagttattaaactaaagctactctattttcaaaatgtgttccaacagaaatccttcataactcctagcatggtatcttaataaagaataaagttcttttatggtattttgaaatattctcttgaatttgtgcatttaaattttattgcagtggtatagatgaatgccactgatggtatccttaaattttatttctgctcaccaaggttaatcatgattgtctatatcttttttatagtgatcacttttgaattgtgttcagatatgcagtttcaggtgtaatcatcagagctggttagtcaggcattccagatagtggttcttttcagaacctttttaaaagggttggttaactacctcagtagcagaggattgaactataccctgtctgtactgtacatagaaaatctttgtagataaaagcaaggcttgttaaatatgatatgagggtaagattttaatataccaaatgtaacattcttagttgcctttagtttcagaggcttgtaagacttcctcatgaccatcataacaggccttgcttttgtcgtattttgtggctgaaaaagcagccttgcttcttcagatattgtagttatttggatgtataatagtttagcaagatgttacttttgtaagacatcagatgttcaaaaaagtgcatccgaacttgtactaaatactgcagtgtccctttataaaaagtcagactaaaactgacaattgtacagcgaacctgacatttggatattttgaagttttttcataaatcatagaaattagtatatggctgtagtttagctttttaggtaaaaggtatgtttcattagtgcatttcttcctgctgatcactgtaaacatgtgaatcagctttccatttcttatgcaggtcatgataacttgtagagtagagtacaatcatttgtgctatgtttttaattttctaaagcaccttgatgacagtgagtgtccagtggtgaagcatcctctattgaaccaccctcaaaaatttttttgccaagtcctaagttgatagcttaaagtaaaaagtgaaaattatagtttcattaggacttggtgtaaagaaatcccctccccccttccccaaagggatactgcagttatatcacatacccaataggcaccacgatgaagatcagagcttatacttaattaaggttttatacacaccagttccccagtaaatgcaaatttaacaagaaaatcagacatgtcatatgttcaaaatgctcatggcaaacaatcattttgcattcctgcaaataaaattgttttatactgtaagctggaggcgagtgtaacttatttttgtaataaagtttttattttttttatgtgtcattaatataaatgtgtgttagtgtagaaatcttctggtttaaaaacttagaattgcacacatttcagtatgtttatttgtacttacataattttagaatagtggttgccaatagcctgtatgtttcacattaattggttttttgttatctaaataaatcattttagtatgttgtatgtcagttactgggatagctgggacatagagtgtaatttaaaatttgtcaataagtattcattggaatatatgtaaatgtgccttgccggttattgaaacttatctacaaaatgagtatggggtgacaaaaattagttcctggtgcttaatgaaactttctgccactgattttatatattaccccgtgcttttttaaagtacatctctctcaaaacttagtgtaagtttgagggctacacaaaacatttacatttcattctaacataatgaatataataggttgtggaaagtgggtaaactaaatgtagccttcagtaaaattgaatctcagtgtaatccttggtgctggcatttctcagttccgaggagttaaatgatcccatctaagaggtcattgccatgcctattggcactttactgtcatagcatttttaagggacactgtcaaggtgtttaagttctcagaattacttgttgggattttaggacaggtttgtttacttaaagtaagaactgcattgtcaaagttgaaagaggaacacttttgtgagttcacaaatgtgttcttaagaaaacattaaaatatggagctctgggttttcaagactatttggcattcttaatttggggacttgggagggaaactgataaaaagaaattgaagaattgatggttatacttaaagaagggtaatgtaaacagtggtgatgaaatatatacacatcaagtgaaattacttgacagtgttcatttgaatgactttgaattcaagccattataattacttttaaaattaaatatcatttgcactgttctgataatgggtgcagtttttgagcaatataatcagagctaaatatgcatgtagtgattagtgatgtgaacaattaacgttctgagaagaaatactaactgtggtattttcaaacttaaatttctgtagtaaaatcagtatcaaagtcttatcagatcaaggaaaaacaggcaatgcatataaacatacttttgaatgttgtgtggcctataaagcaataatgcaatttatatggaatgtcatgggatatgagaaatggaaatgcaaaaataactaatcctttagtaaaaatgtcaacatgttaaagggggaatgttaactaatgtaggttattgctatttgtgatttgtttatgggttcttggctttgacagcttcaaagaatggacagtgataagttaaaagaaattttgtatattgtcaaggaaagggtcttaaatccgagtcaagtcccttccttggggtaaaaaatgtattcttaaagcattctgatgttaaaaagaaaacttaagttatctaaccaaaacagacgcaagattttgtttctgcagactacttggcaatcaaaagtgatcataaatttaggttatcagttttcagaaagttgctttgtgagaaaattttgttagatatattctcccaagcatgctttttgtggaaggttttcagccattgccactgaatcagatgttaaaaatgaagggaaaattgagtgtgcacacacacaactgttgtacactcatgattgcagtttttagcttaagaaacttttctaccagttactgtgaatctgacttaaaatgtaaagtttcctcatgataaaataggaacaacatagaaatggattgatggggtgatctgagttattgtatataaaagtttttaaagaatagaatgaacatcaagctagataggcaaaaattgacacattcagaacagcttttttgactgcgaagccaaaagttgtcagaaacagcaaaagatcccttattattacagagtattttacgtagtctctattttaaggagagaaattaaatagaagggcttcatgcatttaggggagggtgctaaaacttctcaagttcgtcaaacttacaggaatacccaccatgatcattttctctctaattatgtataccacaaaattttcatctggccataggaattcactggtgggtgtaaaattaatgactaaagaaattaagtgacaaatacataaaagaaacagacttgtggggatattgttttaaggtgtattaattactcagtgatgataccactcaatagggcatgccactacttttcttaagatgctaattatgaagcagtgctcacaggcattttttaactagcaaattagtagatggacttttggggtctgtcactttttaaaagtatttaagacttaaattctattagcaccacagtctgccttcagtaatacacctaaaatatttttcaggaccagaagcattcagtttgaaaatttgcagatgcaaaccagtattattactaacgctctgggtcaaagattaggtttttaatattaacagtagtctggtaaatatttagaagtctggcattgagaaacaaaagcttgtacctgactagtatttttatttaaaaaaattagttctgttagcttatttaaattgtgttttatttatccgtagaatttatatttatttcattcctttcatctcactgaaaactgtctgcaggccctttgatttggattagatgtgtgaagtactgtcttttgccaaaaacctcaaattacctgttcttttcaacgtagtgggtttgtgcttgtttggagatcagttcaaaaactatctgtactatctgtactgcctctgatgttaagattttatgtatagcataaggaagctagctctgactatattttcctaagaataaagacctatttttgtagcatgtcttaggatctccaggagtccaagaattattgtgggtgtcctccaattcatcactcttcacttaacagcttttaagtagacacttggaatctttagaggtctgtcgccctttgattatccatacattcgaagtaactagccaatggtgaaaaattcctcaagatatcctcagttgcaatcacattactggaagatgaatagaataaatgtattaggctggtcttaatttttgatggaaatattctgttgtcccgtacttgccattggatttgataaagttagtggtaatttggaaagaatcggggacttgccaatatatttgtgggttttagcttatacccctaggatttcttggttgcgggacgagcagttttggccacttccatcaggacaagactttttaggtcacttagtgcaggttttagtttctattttggattaacaacatttatattgattatcgaaaagaagctttcatcatttcagaacagtcctggaagtttgactttgagtgtgggagaagtcctaataaaccattttggaaattagtgtctccaagtgttacagcttcctaaaatgggtttctaacacagtgggatcaaaataaggttattttaggataatatactgtaaacttaattgactgtctgattttctactttgtctataaagtggcttacaacaggttctaatctagaaaggagttataaaggttatctgtaatgtttatgaatt

SEQ ID NO: 365632 - DNA, 2949 bp, Homo sapiens
agagaggagccgactcggcagggactgggggaccgggccgagagtgcgagcgagcgagggagggagtgagggagcgtgcgagccagaaggggaaaggcggccactcgtgcctgagcgaccgcagaggggagtgggagcagtggggtaaaggagcggggggcgggaataagaaaggccgagagaaggcggacagaggctagtggtggtggtggtggtagggggagaaggaggagctggaggagggcaggggctgagggagtgagtgaagcggacgcgcgagggaggggagggaagggaagggaagggaagggggggtcacgcgggggcgcgcgcgcgcaccgggagcgcgctcggaggcgagtggaactggatcgggtttgctgccagcggcgtgagcttcggccgccattttacaacagctccactcgcgccggacacagggagcagcgagcacgcgtttcccgcaacccgataccatcggacaggatttctccgcctcagcccaacggggagatctctggaaacatggctacagaacatgttaatggaaatggtactgaagagcccatggatactacttctgcagttatccattcagaaaattttcagacattgcttgatgctggtttaccacagaaagttgctgaaaaactagatgaaatttacgttgcagggctagttgcacatagtgatttagatgaaagagctattgaagctttaaaagaattcaatgaagacggtgcattggcagttcttcaacagtttaaagacagtgatctctctcatgttcagaacaaaagtgcctttttatgtggagtcatgaagacttacaggcagagagaaaaacaagggaccaaagtagcagattctagtaaaggaccagatgaggcaaaaattaaggcactcttggaaagaacaggctacacacttgatgtgaccactggacagaggaagtatggaggaccacctccagattccgtttattcaggtcagcagccttctgttggcactgagatatttgtgggaaagatcccaagagatctatttgaggatgaacttgttccattatttgagaaagctggacctatatgggatcttcgtctaatgatggatccactcactggtctcaatagaggttatgcgtttgtcactttttgtacaaaagaagcagctcaggaggctgttaaactgtataataatcatgaaattcgttctggaaaacatattggtgtctgcatctcagttgccaacaataggctttttgtgggctctattcctaagagtaaaaccaaggaacagattcttgaagaatttagcaaagtaacagagggtcttacagacgtcattttataccaccaaccggatgacaagaaaaaaaacagaggcttttgctttcttgaatatgaagatcacaaaacagctgcccaggtaaaagtgctgtttgtacgcaaccttgccaatactgtaacagaagagattttagaaaaggcatttagtcagtttgggaaactggaacgagtgaagaagttaaaagattatgcgttcattcattttgatgagcgagatggtgctgtcaaggctatggaagaaatgaatggcaaagacttggagggagaaaatattgaaattgtttttgccaagccaccagatcagaaaaggaaagaaagaaaagctcagaggcaagcagcaaaaaatcaaatgtatgacgattactactattatggtccacctcatatgccccctccaacaagaggtcgagggcgtggaggtagaggtggttatggatatcctccagattattatggatatgaagattattatgattattatggttatgattaccataactatcgtggtggatatgaagatccatactatggttatgaagattttcaagttggagctagaggaaggggtggtagaggagcaaggggtgctgctccatccagaggtcgtggggctgctcctccccgcggtagagccggttattcacagagaggaggtcctggatcagcaagaggcgttcgaggtgcgagaggaggtgcccaacaacaaagaggccgcggggtacgtggtgcgaggggtggccgcggtggaaatgtaggaggaaagcgcaaagctgatgggtacaaccagccagattccaagcggcgccagaccaataatcagaactggggctcccaacccattgctcagcaaccgctccaaggtggtgatcattctggtaactatggttacaaatctgaaaaccaggagttttatcaggatacttttgggcaacagtggaagtagaaacagtagggcctctgtaaaattggagactgataggttgatcagaaactcaccctaaatctgaacgggtgccgctataatttgtgacatctggcaagatttccctttatgtatatattttaacaatccgcttggacacgaacaaagccacacttctaactgcttctggcgaactgattttatttttaatttttttcaataaagatattcttagatactgaaagaaatagttaatgagtttgcatttgtgcttgagaaaatttggctcaagtccatttggctgtagtgtcaacgatgtttccagtagtgtttagatttggtgtcttcaaaggtagttgattaaaaccaagtgtgtctttaatatcttgtatcagaataactttgtatgttaccaacttaaattgctagaataaggtaaattgatacacaactgctatttttaatttagaactttgacctaatttgggttttcaaaaccattttggctacttgtattctttatgctgttgtttatttcaataaaaaattcacacctaaatgtatacttactaaaattgtgtttacaattcgtttttcacaaaatttcctgcaaatttggttcaaattgtatagcatgtcaaggccaattaaagggttttgtgccttgttaaaaaaagt

SEQ ID NO: 365633 - DNA, 2069 bp, Homo sapiens
agagaggagccgactcggcagggactgggggaccgggccgagagtgcgagcgagcgagggagggagtgagggagcgtgcgagccagaaggggaaaggcggccactcgtgcctgagcgaccgcagaggggagtgggagcagtggggtaaaggagcggggggcgggaataagaaaggccgagagaaggcggacagaggctagtggtggtggtggtggtagggggagaaggaggagctggaggagggcaggggctgagggagtgagtgaagcggacgcgcgagggaggggagggaagggaagggaagggaagggggggtcacgcgggggcgcgcgcgcgcaccgggagcgcgctcggaggcgagtggaactggatcgggtttgctgccagcggcgtgagcttcggccgccattttacaacagctccactcgcgccggacacagggagcagcgagcacgcgtttcccgcaacccgataccatcggacaggatttctccgcctcagcccaacggggagatctctggaaacatggctacagaacatgttaatggaaatggtactgaagagcccatggatactacttctgcagttatccattcagaaaattttcagacattgcttgatgctggtttaccacagaaagttgctgaaaaactagatgaaatttacgttgcagggctagttgcacatagtgatttagatgaaagagctattgaagctttaaaagaattcaatgaagacggtgcattggcagttcttcaacagtttaaagacagtgatctctctcatgttcagaacaaaagtgcctttttatgtggagtcatgaagacttacaggcagagagaaaaacaagggaccaaagtagcagattctagtaaaggaccagatgaggcaaaaattaaggcactcttggaaagaacaggctacacacttgatgtgaccactggacagaggaagtatggaggaccacctccagattccgtttattcaggtcagcagccttctgttggcactgagatatttgtgggaaagatcccaagagatctatttgaggatgaacttgttccattatttgagaaagctggacctatatgggatcttcgtctaatgatggatccactcactggtctcaatagaggttatgcgtttgtcactttttgtacaaaagaagcagctcaggaggctgttaaactgtataataatcatgaaattcgttctggaaaacatattggtgtctgcatctcagttgccaacaataggctttttgtgggctctattcctaagagtaaaaccaaggaacagattcttgaagaatttagcaaagtaacagagggtcttacagacgtcattttataccaccaaccggatgacaagaaaaaaaacagaggcttttgctttcttgaatatgaagatcacaaaacagctgcccaggcaaggcgtaggttaatgagtggtaaagtcaaggtctgggggaatgttggaactgttgaatgggctgatcctatagaagatcctgatcctgaggttatggcaaaggtaaaagtgctgtttgtacgcaaccttgccaatactgtaacagaagagattttagaaaaggcatttagtcagtttgggaaactggaacgagtgaagaagttaaaagattatgcgttcattcattttgatgagcgagatggtgctgtcaaggctatggaagaaatgaatggcaaagacttggagggagaaaatattgaaattgtttttgccaagccaccagatcagaaaaggaaagaaagaaaagctcagaggcaagcagcaaaaaatcaaatgtatgacgattactactattatggtccacctcatatgccccctccaacaagaggtcgagggcgtggaggtagaggtggttatggatatcctccagattattatggatatgaagattattatgattattatggttatgattaccataactatcgtggtggatatgaagatccatactatggttatgaagattttcaaaatgtgttccaacagaaatccttcataactcctagcatggtatcttaataaagaataaagttctttta

SEQ ID NO: 365634 - DNA, 1020 bp, Homo sapiens
agagaggagccgactcggcagggactgggggaccgggccgagagtgcgagcgagcgagggagggagtgagggagcgtgcgagccagaaggggaaaggcggccactcgtgcctgagcgaccgcagaggggagtgggagcagtggggtaaaggagcggggggcgggaataagaaaggccgagagaaggcggacagaggctagtggtggtggtggtggtagggggagaaggaggagctggaggagggcaggggctgagggagtgagtgaagcggacgcgcgagggaggggagggaagggaagggaagggaagggggggtcacgcgggggcgcgcgcgcgcaccgggagcgcgctcggaggcgagtggaactggatcgggtttgctgccagcggcgtgagcttcggccgccattttacaacagctccactcgcgccggacacagggagcagcgagcacgcgtttcccgcaacccgataccatcggacaggatttctccgcctcagcccaacggggagatctctggaaacatggctacagaacatgttaatggaaatggtactgaagagcccatggatactacttctgcagttatccattcagaaaattttcagacattgcttgatgctggtttaccacagaaagttgctgaaaaactagatgaaatttacgttgcagggctagttgcacatagtgatttagatgaaagagctattgaagctttaaaagaattcaatgaagacggtgcattggcagttcttcaacagtttaaagacagtgatctctctcatgttcagaacaaaagtgcctttttatgtggagtcatgaagacttacaggcagagagaaaaacaagggaccaaagtagcagattctagtaaaggaccagatgaggcaaaaattaaggtatgtctttctatactccctttagttttaaagtcattttaactgtttcctaattttggtaaatattccttgggtatgaaatggatgtatgttagatgttgagataattcatcaatcttt

SEQ ID NO: 365635 - DNA, 408 bp, Homo sapiens
taagtcatgctcggtccggcatgtgctgtaggccagcggcatgggcggctgccctgggctcgcctcttccagcccagcatccagctggcccgccagggcttccccgtgggcaagggcttggcggcagccctggaaaacaagcggaccgtcatcgagcagcagcctgtcttgtgtgaggtgttctgccgggatagaaaggtgcttcgggagggggagagactgaccctgccgcagctggctgacacctacgagacgctggcctacagcacatgccggccagcggtttaacaaatgacagtagggaacacagaaatcaaatattaagaatggatgatcaaaatcaccaatgcacatgtagtaatcaaatgtttggggctagatattatggttatacaaaaaacattaaaa

SEQ ID NO: 365636 - DNA, 2883 bp, Homo sapiens
gtgctgctggatgaccagaccgggcgtcgggtgagcccagaagtgagagcagttggctgtgccccagtgctgtgtgacccagaggcgccgctcaccctctctgagctggtggacatcatagcgggtgcagcccaaaactgtcttctgaggaagaggtgctctcctgggcccccactgtccccaggcctcagatgctgcatattgctggcccagctcctgaggctctttggacctccaggaatcggtgtctctatcaggaacccttaaccctgacccggactcccagctgggacccggggtgtcggagtggcaagagcgctgtcaggcctggtgaagggtgtgagctgtccaacggggcagggaggaggcagggcctgttctgcagttggacagacagagccctctagctgctttctggaagactgaagggcagcaaggcaagtgaggtgctgccgtcatccaggctggacagttcagtgatttgcctgaggccccacagcaggagaacgagaaggctgcctgatcagagagtccctgaagaagattctgtggctacaggcttcagcagagtgtgagggagaccccggttatttcctcagctatttccaccaaatcctcctgtctttcgtggccaacaccccaggcaaggcttggggcccccgtctgctgctggacgcagagccatgaagaagaagttagtggtgctgggcctgctggccgtggtcctggtgctggtcattgtcggcctctgtctctggctgccctcagcctccaaggaacctgacaaccatgtgtacaccagggctgccgtggccgcggatgccaagcagtgctcgaagattgggagggatgcactgcgggacggtggctctgcggtggatgcagccattgcagccctgttgtgtgtggggctcatgaatgcccacagcatgggcatcgggggtggcctcttcctcaccatctacaacagcaccacacgaaaagctgaggtcatcaacgcccgcgaggtggcccccaggctggcctttgccaccatgttcaacagctcggagcagtcccagaagggggggctgtcggtggcggtgcctggggagatccgaggctatgagctggcacaccagcggcatgggcggctgccctgggctcgcctcttccagcccagcatccagctggcccgccagggcttccccgtgggcaagggcttggcggcagccctggaaaacaagcggaccgtcatcgagcagcagcctgtcttgtgtgaggtgttctgccgggatagaaaggtgcttcgggagggggagagactgaccctgccgcagctggctgacacctacgagacgctggccatcgagggtgcccaggccttctacaacggcagcctcacggcccagattgtgaaggacatccaggcggccgggggcattgtgacagctgaggacctgaacaactaccgtgctgagctgatcgagcacccgctgaacatcagcctgggagacgcggtgctgtacatgcccagtgcgccgctcagcgggcccgtgctggccctcatcctcaacatcctcaaagggtacaacttctcccgggagagcgtggagagccccgagcagaagggcctgacgtaccaccgcatcgtagaggctttccggtttgcctacgccaagaggaccctgcttggggaccccaagtttgtggatgtgactgaggtggtccgcaacatgacctccgagttcttcgctgcccagctccgggcccagatctctgacgacaccactcacccgatctcctactacaagcccgagttctacacgccggatgacgggggcactgctcacctgtctgtcgtcgcagaggacggcagtgctgtgtccgccaccagcaccatcaacctctactttggctccaaggtccgctccccggtcagcgggatcctgttcaataatgaaatggacgacttcagctctcccagcatcaccaacgagtttggggtacccccctcacctgccaatttcatccagccagggaagcagccgctctcgtccatgtgcccgacgatcatggtgggccaggacggccaggtccggatggtggtgggagctgctgggggcacacagatcaccacggccactgcactggccatcatctacaacctctggttcggctatgacgtgaagcgggccgtggaggagccccggctgcacaaccagcttctgcccaacgtcacgacagtggagagaaacattgaccaggcagtgactgcagccctggagacccggcaccatcacacccagatcgcgtccaccttcatcgctgtggtgcaagccatcgtccgcacggctggtggctgggcagctgcctcggactccaggaaaggcggggagcctgccggctactgagtgctccaggaggacaaggctgacaagcaatccagggacaagatactcaccaggaccaggaaggggactctgggggaccggcttcccctgtgagcagcagagcagcacaataaatgaggccactgtgccaggctccaggtggcctccctggcctgtctccccaaaaaaaaaaaaaaaaaaaaaaaaaaaaaacaaaaaaaaaaacaaacaaacaaaaaaagacaaacaagaaaaaaaaaaaaaaaaaaaagaaaaagcagagaaggaacacagcgcacgcaagccagaaagagcagaaagagaagaaaaaaggaggagcgagaaagacagagagagacgagagcaagagacaaagtacacgaagaggaaagaggaaaaggaaaccagaggaggacaaagagaagggggacgcagaacaacagagacgcaaagacacaagaaaaacagagaaaaaaaaacgagacggaaggaagaaaagaaaagaaaggaa

SEQ ID NO: 365637 - DNA, 2678 bp, Homo sapiens
cactgtccgccggggctgctgggcacgccctggctggtctcttggactagcgggtgcagcccaaaactgtcttctgaggaagaggtgctctcctgggcccccactgtccccaggcctcagcaaggcaagtgaggtgctgccgtcatccaggctggacagttcagtgatttgcctgaggccccacagcagagttcaactggagacagagaaaccagctagaggcagagggaggtaacacggagtcccccagaaaggtctgggctgcgcgtgcttcaggtaacctcccttgaccttcaggagaacgagaaggctgcctgatcagagagtccctgaagaagattctgtggctacaggcttcagcagagtgtgagggagaccccggttatttcctcagctatttccaccaaatcctcctgtctttcgtggccaacaccccaggcaaggcttggggcccccgtctgctgctggacgcagagccatgaagaagaagttagtggtgctgggcctgctggccgtggtcctggtgctggtcattgtcggcctctgtctctggctgccctcagcctccaaggaacctgacaaccatgtgtacaccagggctgccgtggccgcggatgccaagcagtgctcgaagattgggagggatgcactgcgggacggtggctctgcggtggatgcagccattgcagccctgttgtgtgtggggctcatgaatgcccacagcatgggcatcgggggtggcctcttcctcaccatctacaacagcaccacacgaaaagctgaggtcatcaacgcccgcgaggtggcccccaggctggcctttgccaccatgttcaacagctcggagcagtcccagaagggggggctgtcggtggcggtgcctggggagatccgaggctatgagctggcacaccagcggcatgggcggctgccctgggctcgcctcttccagcccagcatccagctggcccgccagggcttccccgtgggcaagggcttggcggcagccctggaaaacaagcggaccgtcatcgagcagcagcctgtcttgtgtgaggtgttctgccgggatagaaaggtgcttcgggagggggagagactgaccctgccgcagctggctgacacctacgagacgctggccatcgagggtgcccaggccttctacaacggcagcctcacggcccagattgtgaaggacatccaggcggccgggggcattgtgacagctgaggacctgaacaactaccgtgctgagctgatcgagcacccgctgaacatcagcctgggagacgcggtgctgtacatgcccagtgcgccgctcagcgggcccgtgctggccctcatcctcaacatcctcaaagggtacaacttctcccgggagagcgtggagagccccgagcagaagggcctgacgtaccaccgcatcgtagaggctttccggtttgcctacgccaagaggaccctgcttggggaccccaagtttgtggatgtgactgaggtggtccgcaacatgacctccgagttcttcgctgcccagctccgggcccagatctctgacgacaccactcacccgatctcctactacaagcccgagttctacacgccggatgacgggggcactgctcacctgtctgtcgtcgcagaggacggcagtgctgtgtccgccaccagcaccatcaacctctactttggctccaaggtccgctccccggtcagcgggatcctgttcaataatgaaatggacgacttcagctctcccagcatcaccaacgagtttggggtacccccctcacctgccaatttcatccagccagggaagcagccgctctcgtccatgtgcccgacgatcatggtgggccaggacggccaggtccggatggtggtgggagctgctgggggcacacagatcaccacggccactgcactggccatcatctacaacctctggttcggctatgacgtgaagcgggccgtggaggagccccggctgcacaaccagcttctgcccaacgtcacgacagtggagagaaacattgaccaggcagtgactgcagccctggagacccggcaccatcacacccagatcgcgtccaccttcatcgctgtggtgcaagccatcgtccgcacggctggtggctgggcagctgcctcggactccaggaaaggcggggagcctgccggctactgagtgctccaggaggacaaggctgacaagcaatccagggacaagatactcaccaggaccaggaaggggactctgggggaccggcttcccctgtgagcagcagagcagcacaataaatgaggccactgtgccaggctccaggtggcctccctggcctgtctccccaaaaaaaaaaaaaaaaaaaaaaaaaaaaaacaaaaaaaaaaacaaacaaacaaaaaaagacaaacaagaaaaaaaaaaaaaaaaaaaagaaaaagcagagaaggaacacagcgcacgcaagccagaaagagcagaaagagaagaaaaaaggaggagcgagaaagacagagagagacgagagcaagagacaaagtacacgaagaggaaagaggaaaaggaaaccagaggaggacaaagagaagggggacgcagaacaacagagacgcaaagacacaagaaaaacagagaaaaaaaaacgagacggaaggaagaaaagaaaagaaaggaa

SEQ ID NO: 365638 - DNA, 2641 bp, Homo sapiens
gtgctgctggatgaccagaccgggcgtcgggtgagcccagaagtgagagcagttggctgtgccccagtgctgtgtgacccagaggcgccgctcaccctctctgagctggtggacatcatagcgggtgcagcccaaaactgtcttctgaggaagaggtgctctcctgggcccccactgtccccaggcctcagcaaggcaagtgaggtgctgccgtcatccaggctggacagttcagtgatttgcctgaggccccacagcaggagaacgagaaggctgcctgatcagagagtccctgaagaagattctgtggctacaggcttcagcagagtgtgagggagaccccggttatttcctcagctatttccaccaaatcctcctgtctttcgtggccaacaccccaggcaaggcttggggcccccgtctgctgctggacgcagagccatgaagaagaagttagtggtgctgggcctgctggccgtggtcctggtgctggtcattgtcggcctctgtctctggctgccctcagcctccaaggaacctgacaaccatgtgtacaccagggctgccgtggccgcggatgccaagcagtgctcgaagattgggagggatgcactgcgggacggtggctctgcggtggatgcagccattgcagccctgttgtgtgtggggctcatgaatgcccacagcatgggcatcgggggtggcctcttcctcaccatctacaacagcaccacacgaaaagctgaggtcatcaacgcccgcgaggtggcccccaggctggcctttgccaccatgttcaacagctcggagcagtcccagaagggggggctgtcggtggcggtgcctggggagatccgaggctatgagctggcacaccagcggcatgggcggctgccctgggctcgcctcttccagcccagcatccagctggcccgccagggcttccccgtgggcaagggcttggcggcagccctggaaaacaagcggaccgtcatcgagcagcagcctgtcttgtgtgaggtgttctgccgggatagaaaggtgcttcgggagggggagagactgaccctgccgcagctggctgacacctacgagacgctggccatcgagggtgcccaggccttctacaacggcagcctcacggcccagattgtgaaggacatccaggcggccgggggcattgtgacagctgaggacctgaacaactaccgtgctgagctgatcgagcacccgctgaacatcagcctgggagacgcggtgctgtacatgcccagtgcgccgctcagcgggcccgtgctggccctcatcctcaacatcctcaaagggtacaacttctcccgggagagcgtggagagccccgagcagaagggcctgacgtaccaccgcatcgtagaggctttccggtttgcctacgccaagaggaccctgcttggggaccccaagtttgtggatgtgactgaggtggtccgcaacatgacctccgagttcttcgctgcccagctccgggcccagatctctgacgacaccactcacccgatctcctactacaagcccgagttctacacgccggatgacgggggcactgctcacctgtctgtcgtcgcagaggacggcagtgctgtgtccgccaccagcaccatcaacctctactttggctccaaggtccgctccccggtcagcgggatcctgttcaataatgaaatggacgacttcagctctcccagcatcaccaacgagtttggggtacccccctcacctgccaatttcatccagccagggaagcagccgctctcgtccatgtgcccgacgatcatggtgggccaggacggccaggtccggatggtggtgggagctgctgggggcacacagatcaccacggccactgcactggccatcatctacaacctctggttcggctatgacgtgaagcgggccgtggaggagccccggctgcacaaccagcttctgcccaacgtcacgacagtggagagaaacattgaccaggcagtgactgcagccctggagacccggcaccatcacacccagatcgcgtccaccttcatcgctgtggtgcaagccatcgtccgcacggctggtggctgggcagctgcctcggactccaggaaaggcggggagcctgccggctactgagtgctccaggaggacaaggctgacaagcaatccagggacaagatactcaccaggaccaggaaggggactctgggggaccggcttcccctgtgagcagcagagcagcacaataaatgaggccactgtgccaggctccaggtggcctccctggcctgtctccccaaaaaaaaaaaaaaaaaaaaaaaaaaaaaacaaaaaaaaaaacaaacaaacaaaaaaagacaaacaagaaaaaaaaaaaaaaaaaaaagaaaaagcagagaaggaacacagcgcacgcaagccagaaagagcagaaagagaagaaaaaaggaggagcgagaaagacagagagagacgagagcaagagacaaagtacacgaagaggaaagaggaaaaggaaaccagaggaggacaaagagaagggggacgcagaacaacagagacgcaaagacacaagaaaaacagagaaaaaaaaacgagacggaaggaagaaaagaaaagaaaggaa

SEQ ID NO: 365639 - DNA, 2966 bp, Homo sapiens
cggcccaccaagcctggggaggtggccacccttccatgatggcatttggatgttccctgtgtgtggggagggcacagggactccattcgtagaccacctctgggacagtgtgtctgcctctgaggtcagacgctctgcactgggacagggtggagtggagggaaatccagcttggggctcattggaggggcttgctggcagacaccgccctttgtgggaaactgactgtgggagaggggaaccccaacctctgtcaccacatccctcttccctgttgtcacacctgtcacctgctgccatagccatgagacttcccaagggtcactgctgccactcactgcacagcctggaagggagtccacaggggacatacagtgagcaagagacctgtgccactcaggcctcctgggggtgtccccagtgcagccatgatgataatcacagctaccattcaccaagccctgcccacagtctaacctactctattcacaacactcccagcagcaaggcaagtgaggtgctgccgtcatccaggctggacagttcagtgatttgcctgaggccccacagcagagttcaactggagacagagaaaccagctagaggcagagggaggtaacacggagtcccccagaaaggtctgggctgcgcgtgcttcagctatttccaccaaatcctcctgtctttcgtggccaacaccccaggcaaggcttggggcccccgtctgctgctggacgcagagccatgaagaagaagttagtggtgctgggcctgctggccgtggtcctggtgctggtcattgtcggcctctgtctctggctgccctcagcctccaaggaacctgacaaccatgtgtacaccagggctgccgtggccgcggatgccaagcagtgctcgaagattgggagggatgcactgcgggacggtggctctgcggtggatgcagccattgcagccctgttgtgtgtggggctcatgaatgcccacagcatgggcatcgggggtggcctcttcctcaccatctacaacagcaccacacgaaaagctgaggtcatcaacgcccgcgaggtggcccccaggctggcctttgccaccatgttcaacagctcggagcagtcccagaagggggggctgtcggtggcggtgcctggggagatccgaggctatgagctggcacaccagcggcatgggcggctgccctgggctcgcctcttccagcccagcatccagctggcccgccagggcttccccgtgggcaagggcttggcggcagccctggaaaacaagcggaccgtcatcgagcagcagcctgtcttgtgtgaggtgttctgccgggatagaaaggtgcttcgggagggggagagactgaccctgccgcagctggctgacacctacgagacgctggccatcgagggtgcccaggccttctacaacggcagcctcacggcccagattgtgaaggacatccaggcggccgggggcattgtgacagctgaggacctgaacaactaccgtgctgagctgatcgagcacccgctgaacatcagcctgggagacgcggtgctgtacatgcccagtgcgccgctcagcgggcccgtgctggccctcatcctcaacatcctcaaagggtacaacttctcccgggagagcgtggagagccccgagcagaagggcctgacgtaccaccgcatcgtagaggctttccggtttgcctacgccaagaggaccctgcttggggaccccaagtttgtggatgtgactgaggccagctctggggtctcggcaggtggtccgcaacatgacctccgagttcttcgctgcccagctccgggcccagatctctgacgacaccactcacccgatctcctactacaagcccgagttctacacgccggatgacgggggcactgctcacctgtctgtcgtcgcagaggacggcagtgctgtgtccgccaccagcaccatcaacctctactttggctccaaggtccgctccccggtcagcgggatcctgttcaataatgaaatggacgacttcagctctcccagcatcaccaacgagtttggggtacccccctcacctgccaatttcatccagccagggaagcagccgctctcgtccatgtgcccgacgatcatggtgggccaggacggccaggtccggatggtggtgggagctgctgggggcacacagatcaccacggccactgcactggccatcatctacaacctctggttcggctatgacgtgaagcgggccgtggaggagccccggctgcacaaccagcttctgcccaacgtcacgacagtggagagaaacattgaccaggcagtgactgcagccctggagacccggcaccatcacacccagatcgcgtccaccttcatcgctgtggtgcaagccatcgtccgcacggctggtggctgggcagctgcctcggactccaggaaaggcggggagcctgccggctactgagtgctccaggaggacaaggctgacaagcaatccagggacaagatactcaccaggaccaggaaggggactctgggggaccggcttcccctgtgagcagcagagcagcacaataaatgaggccactgtgccaggctccaggtggcctccctggcctgtctccccaaaaaaaaaaaaaaaaaaaaaaaaaaaaaacaaaaaaaaaaacaaacaaacaaaaaaagacaaacaagaaaaaaaaaaaaaaaaaaaagaaaaagcagagaaggaacacagcgcacgcaagccagaaagagcagaaagagaagaaaaaaggaggagcgagaaagacagagagagacgagagcaagagacaaagtacacgaagaggaaagaggaaaaggaaaccagaggaggacaaagagaagggggacgcagaacaacagagacgcaaagacacaagaaaaacagagaaaaaaaaacgagacggaaggaagaaaagaaaagaaaggaa

SEQ ID NO: 365640 - DNA, 2808 bp, Homo sapiens
gtgctgctggatgaccagaccgggcgtcgggtgagcccagaagtgagagcagttggctgtgccccagtgctgtgtgacccagaggcgccgctcaccctctctgagctggtggacatcataggtggggaagctcaggtcagggcactcccatgagtgtctggaggcctgagtcccattctcagctctgccatatgcttgctgcgctctagaggagttcctcttcctctccaagcctcggtttatgtacccgtgcagtgggagtgagttgcacttcggggtgaagggggcaagacttgtgtgggcgcatcctgcagaaggatcccacagcaaggcaagtgaggtgctgccgtcatccaggctggacagttcagtgatttgcctgaggccccacagcagagttcaactggagacagagaaaccagctagaggcagagggaggtaacacggagtcccccagaaaggtctgggctgcgcgtgcttcaggcttcagcagagtgtgagggagaccccggttatttcctcagctatttccaccaaatcctcctgtctttcgtggccaacaccccaggcaaggcttggggcccccgtctgctgctggacgcagagccatgaagaagaagttagtggtgctgggcctgctggccgtggtcctggtgctggtcattgtcggcctctgtctctggctgccctcagcctccaaggaacctgacaaccatgtgtacaccagggctgccgtggccgcggatgccaagcagtgctcgaagattgggagggatgcactgcgggacggtggctctgcggtggatgcagccattgcagccctgttgtgtgtggggctcatgaatgcccacagcatgggcatcgggggtggcctcttcctcaccatctacaacagcaccacacgaaaagctgaggtcatcaacgcccgcgaggtggcccccaggctggcctttgccaccatgttcaacagctcggagcagtcccagaagggggggctgtcggtggcggtgcctggggagatccgaggctatgagctggcacaccagcggcatgggcggctgccctgggctcgcctcttccagcccagcatccagctggcccgccagggcttccccgtgggcaagggcttggcggcagccctggaaaacaagcggaccgtcatcgagcagcagcctgtcttgtgtgaggtgttctgccgggatagaaaggtgcttcgggagggggagagactgaccctgccgcagctggctgacacctacgagacgctggccatcgagggtgcccaggccttctacaacggcagcctcacggcccagattgtgaaggacatccaggcggccgggggcattgtgacagctgaggacctgaacaactaccgtgctgagctgatcgagcacccgctgaacatcagcctgggagacgcggtgctgtacatgcccagtgcgccgctcagcgggcccgtgctggccctcatcctcaacatcctcaaagggtacaacttctcccgggagagcgtggagagccccgagcagaagggcctgacgtaccaccgcatcgtagaggctttccggtttgcctacgccaagaggaccctgcttggggaccccaagtttgtggatgtgactgaggtggtccgcaacatgacctccgagttcttcgctgcccagctccgggcccagatctctgacgacaccactcacccgatctcctactacaagcccgagttctacacgccggatgacgggggcactgctcacctgtctgtcgtcgcagaggacggcagtgctgtgtccgccaccagcaccatcaacctctactttggctccaaggtccgctccccggtcagcgggatcctgttcaataatgaaatggacgacttcagctctcccagcatcaccaacgagtttggggtacccccctcacctgccaatttcatccagccagggaagcagccgctctcgtccatgtgcccgacgatcatggtgggccaggacggccaggtccggatggtggtgggagctgctgggggcacacagatcaccacggccactgcactggccatcatctacaacctctggttcggctatgacgtgaagcgggccgtggaggagccccggctgcacaaccagcttctgcccaacgtcacgacagtggagagaaacattgaccaggcagtgactgcagccctggagacccggcaccatcacacccagatcgcgtccaccttcatcgctgtggtgcaagccatcgtccgcacggctggtggctgggcagctgcctcggactccaggaaaggcggggagcctgccggctactgagtgctccaggaggacaaggctgacaagcaatccagggacaagatactcaccaggaccaggaaggggactctgggggaccggcttcccctgtgagcagcagagcagcacaataaatgaggccactgtgccaggctccaggtggcctccctggcctgtctccccaaaaaaaaaaaaaaaaaaaaaaaaaaaaaacaaaaaaaaaaacaaacaaacaaaaaaagacaaacaagaaaaaaaaaaaaaaaaaaaagaaaaagcagagaaggaacacagcgcacgcaagccagaaagagcagaaagagaagaaaaaaggaggagcgagaaagacagagagagacgagagcaagagacaaagtacacgaagaggaaagaggaaaaggaaaccagaggaggacaaagagaagggggacgcagaacaacagagacgcaaagacacaagaaaaacagagaaaaaaaaacgagacggaaggaagaaaagaaaagaaaggaa

SEQ ID NO: 365641 - DNA, 1251 bp, Homo sapiens
gtgctgctggatgaccagaccgggcgtcgggtgagcccagaagtgagagcagttggctgtgccccagtgctgtgtgacccagaggcgccgctcaccctctctgagctggtggacatcatagcgggtgcagcccaaaactgtcttctgaggaagaggtgctctcctgggcccccactgtccccaggcctcagcaaggcaagtgaggtgctgccgtcatccaggctggacagttcagtgatttgcctgaggccccacagcaggagaacgagaaggctgcctgatcagagagtccctgaagaagattctgtggctacaggcttcagcagagtgtgagggagaccccggttatttcctcagctatttccaccaaatcctcctgtctttcgtggccaacaccccaggcaaggcttggggcccccgtctgctgctggacgcagagccatgaagaagaagttagtggtgctgggcctgctggccgtggtcctggtgctggtcattgtcggcctctgtctctggctgccctcagcctccaaggaacctgacaaccatgtgtacaccagggctgccgtggccgcggatgccaagcagtgctcgaagattgggagggatgcactgcgggacggtggctctgcggtggatgcagccattgcagccctgttgtgtgtggggctcatgaatgcccacagcatgggcatcgggggtggcctcttcctcaccatctacaacagcaccacacgaaaagctgaggtcatcaacgcccgcgaggtggcccccaggctggcctttgccaccatgttcaacagctcggagcagtcccagaagggggggctgtcggtggcggtgcctggggagatccgaggctatgagctggcacaccagcggcatgggcggctgccctgggctcgcctcttccagcccagcatccagctggcccgccagggcttccccgtgggcaagggcttggcggcagccctggaaaacaagcggaccgtcatcgagcagcagcctgtcttgtgtgaggtgttctgccgggatagaaaggtgcttcgggagggggagagactgaccctgccgcagctggctgacacctacgagacgctggcctacagcacatgccggccagcggtttaacaaatgacagtagggaacacagaaatcaaatattaagaatggatgatcaaaatcaccaatgcacatgtagtaatcaaatgtttggggctagatattatggttatacaaaaaacattaaaa

SEQ ID NO: 365642 - DNA, 545 bp, Homo sapiens
gtcgacctcagtagccggcaggctccccgcctttcctggagtccgaggcagctgagtgctccaggaggacaaggctgacaagcaatccagggacaagatactcaccaggaccaggaaggggactctgggggaccggcttcccctgtgagcagcagagcagcacaataaatgaggccactgtgccaggctccaggtggcctccctggcctgtctccccaaaaaaaaaaaaaaaaaaaaaaaaaaaaaacaaaaaaaaaaacaaacaaacaaaaaaagacaaacaagaaaaaaaaaaaaaaaaaaaagaaaaagcagagaaggaacacagcgcacgcaagccagaaagagcagaaagagaagaaaaaaggaggagcgagaaagacagagagagacgagagcaagagacaaagtacacgaagaggaaagaggaaaaggaaaccagaggaggacaaagagaagggggacgcagaacaacagagacgcaaagacacaagaaaaacagagaaaaaaaaacgagacggaaggaagaaaagaaaagaaaggaa

SEQ ID NO: 365643 - DNA, 2776 bp, Homo sapiens
tctccgcttgatccgtttcaggctctggctccgctactgcatcgtgtgcttctgtccaagaggcagagagactgaaactatctgctgccgcctggattctcccagagattgcctggaacaccagctcgggtcctcgcacaccatcctgcgggtgcagcccaaaactgtcttctgaggaagaggtgctctcctgggcccccactgtccccaggcctcagcaaggcaagtgaggtgctgccgtcatccaggctggacagttcagtgatttgcctgaggccccacagcagagttcaactggagacagagaaaccagctagaggcagagggaggtaacacggagtcccccagaaaggtctgggctgcgcgtgcttcaggtaacctcccttgaccttcaggagaacgagaaggctgcctgatcagagagtccctgaagaagattctgtggctacaggcttcagcagagtgtgagggagaccccggttatttcctcagctatttccaccaaatcctcctgtctttcgtggccaacaccccaggcaaggcttggggcccccgtctgctgctggacgcagagccatgaagaagaagttagtggtgctgggcctgctggccgtggtcctggtgctggtcattgtcggcctctgtctctggctgccctcagcctccaaggaacctgacaaccatgtgtacaccagggctgccgtggccgcggatgccaagcagtgctcgaagattgggagggatgcactgcgggacggtggctctgcggtggatgcagccattgcagccctgttgtgtgtggggctcatgaatgcccacagcatgggcatcgggggtggcctcttcctcaccatctacaacagcaccacacgaaaagctgaggtcatcaacgcccgcgaggtggcccccaggctggcctttgccaccatgttcaacagctcggagcagtcccagaagggggggctgtcggtggcggtgcctggggagatccgaggctatgagctggcacaccagcggcatgggcggctgccctgggctcgcctcttccagcccagcatccagctggcccgccagggcttccccgtgggcaagggcttggcggcagccctggaaaacaagcggaccgtcatcgagcagcagcctgtcttgtgtgaggtgttctgccgggatagaaaggtgcttcgggagggggagagactgaccctgccgcagctggctgacacctacgagacgctggccatcgagggtgcccaggccttctacaacggcagcctcacggcccagattgtgaaggacatccaggcggccgggggcattgtgacagctgaggacctgaacaactaccgtgctgagctgatcgagcacccgctgaacatcagcctgggagacgcggtgctgtacatgcccagtgcgccgctcagcgggcccgtgctggccctcatcctcaacatcctcaaagggtacaacttctcccgggagagcgtggagagccccgagcagaagggcctgacgtaccaccgcatcgtagaggctttccggtttgcctacgccaagaggaccctgcttggggaccccaagtttgtggatgtgactgaggtggtccgcaacatgacctccgagttcttcgctgcccagctccgggcccagatctctgacgacaccactcacccgatctcctactacaagcccgagttctacacgccggatgacgggggcactgctcacctgtctgtcgtcgcagaggacggcagtgctgtgtccgccaccagcaccatcaacctctactttggctccaaggtccgctccccggtcagcgggatcctgttcaataatgaaatggacgacttcagctctcccagcatcaccaacgagtttggggtacccccctcacctgccaatttcatccagccagggaagcagccgctctcgtccatgtgcccgacgatcatggtgggccaggacggccaggtccggatggtggtgggagctgctgggggcacacagatcaccacggccactgcactggccatcatctacaacctctggttcggctatgacgtgaagcgggccgtggaggagccccggctgcacaaccagcttctgcccaacgtcacgacagtggagagaaacattgaccaggcagtgactgcagccctggagacccggcaccatcacacccagatcgcgtccaccttcatcgctgtggtgcaagccatcgtccgcacggctggtggctgggcagctgcctcggactccaggaaaggcggggagcctgccggctactgagtgctccaggaggacaaggctgacaagcaatccagggacaagatactcaccaggaccaggaaggggactctgggggaccggcttcccctgtgagcagcagagcagcacaataaatgaggccactgtgccaggctccaggtggcctccctggcctgtctccccaaaaaaaaaaaaaaaaaaaaaaaaaaaaaacaaaaaaaaaaacaaacaaacaaaaaaagacaaacaagaaaaaaaaaaaaaaaaaaaagaaaaagcagagaaggaacacagcgcacgcaagccagaaagagcagaaagagaagaaaaaaggaggagcgagaaagacagagagagacgagagcaagagacaaagtacacgaagaggaaagaggaaaaggaaaccagaggaggacaaagagaagggggacgcagaacaacagagacgcaaagacacaagaaaaacagagaaaaaaaaacgagacggaaggaagaaaagaaaagaaaggaa

SEQ ID NO: 365644 - DNA, 2885 bp, Homo sapiens
gtgctgctggatgaccagaccgggcgtcgggtgagcccagaagtgagagcagttggctgtgccccagtgctgtgtgacccagaggcgccgctcaccctctctgagctggtggacatcataggtggggaagctcaggtcagggcactcccatgagtgtctggaggcctgagtcccattctcagctctgccatatgcttgctgcgctctagaggagttcctcttcctctccaagcctcggtttatgtacccgtgcagtgggagtgagttgcacttcggggtgaagggggcaagacttgtgtgggcgcatcctgcagaaggatcccacagcaaggcaagtgaggtgctgccgtcatccaggctggacagttcagtgatttgcctgaggccccacagcagagttcaactggagacagagaaaccagctagaggcagagggaggtaacacggagtcccccagaaaggtctgggctgcgcgtgcttcaggtaacctcccttgaccttcaggagaacgagaaggctgcctgatcagagagtccctgaagaagattctgtggctacaggcttcagcagagtgtgagggagaccccggttatttcctcagctatttccaccaaatcctcctgtctttcgtggccaacaccccaggcaaggcttggggcccccgtctgctgctggacgcagagccatgaagaagaagttagtggtgctgggcctgctggccgtggtcctggtgctggtcattgtcggcctctgtctctggctgccctcagcctccaaggaacctgacaaccatgtgtacaccagggctgccgtggccgcggatgccaagcagtgctcgaagattgggagggatgcactgcgggacggtggctctgcggtggatgcagccattgcagccctgttgtgtgtggggctcatgaatgcccacagcatgggcatcgggggtggcctcttcctcaccatctacaacagcaccacacgaaaagctgaggtcatcaacgcccgcgaggtggcccccaggctggcctttgccaccatgttcaacagctcggagcagtcccagaagggggggctgtcggtggcggtgcctggggagatccgaggctatgagctggcacaccagcggcatgggcggctgccctgggctcgcctcttccagcccagcatccagctggcccgccagggcttccccgtgggcaagggcttggcggcagccctggaaaacaagcggaccgtcatcgagcagcagcctgtcttgtgtgaggtgttctgccgggatagaaaggtgcttcgggagggggagagactgaccctgccgcagctggctgacacctacgagacgctggccatcgagggtgcccaggccttctacaacggcagcctcacggcccagattgtgaaggacatccaggcggccgggggcattgtgacagctgaggacctgaacaactaccgtgctgagctgatcgagcacccgctgaacatcagcctgggagacgcggtgctgtacatgcccagtgcgccgctcagcgggcccgtgctggccctcatcctcaacatcctcaaagggtacaacttctcccgggagagcgtggagagccccgagcagaagggcctgacgtaccaccgcatcgtagaggctttccggtttgcctacgccaagaggaccctgcttggggaccccaagtttgtggatgtgactgaggtggtccgcaacatgacctccgagttcttcgctgcccagctccgggcccagatctctgacgacaccactcacccgatctcctactacaagcccgagttctacacgccggatgacgggggcactgctcacctgtctgtcgtcgcagaggacggcagtgctgtgtccgccaccagcaccatcaacctctactttggctccaaggtccgctccccggtcagcgggatcctgttcaataatgaaatggacgacttcagctctcccagcatcaccaacgagtttggggtacccccctcacctgccaatttcatccagccagggaagcagccgctctcgtccatgtgcccgacgatcatggtgggccaggacggccaggtccggatggtggtgggagctgctgggggcacacagatcaccacggccactgcactggccatcatctacaacctctggttcggctatgacgtgaagcgggccgtggaggagccccggctgcacaaccagcttctgcccaacgtcacgacagtggagagaaacattgaccaggcagtgactgcagccctggagacccggcaccatcacacccagatcgcgtccaccttcatcgctgtggtgcaagccatcgtccgcacggctggtggctgggcagctgcctcggactccaggaaaggcggggagcctgccggctactgagtgctccaggaggacaaggctgacaagcaatccagggacaagatactcaccaggaccaggaaggggactctgggggaccggcttcccctgtgagcagcagagcagcacaataaatgaggccactgtgccaggctccaggtggcctccctggcctgtctccccaaaaaaaaaaaaaaaaaaaaaaaaaaaaaacaaaaaaaaaaacaaacaaacaaaaaaagacaaacaagaaaaaaaaaaaaaaaaaaaagaaaaagcagagaaggaacacagcgcacgcaagccagaaagagcagaaagagaagaaaaaaggaggagcgagaaagacagagagagacgagagcaagagacaaagtacacgaagaggaaagaggaaaaggaaaccagaggaggacaaagagaagggggacgcagaacaacagagacgcaaagacacaagaaaaacagagaaaaaaaaacgagacggaaggaagaaaagaaaagaaaggaa

SEQ ID NO: 365645 - DNA, 1359 bp, Homo sapiens
gacagggagtcagactggtcatgcaaggtcctgggcctgccttgggtcctggggagccacggaaggttgtgggtgccagagggttgcggtcagagtcacagtcaagggccttctgagacctgtgccccctccccaccctccctccccacctcctcaggccagctctggggtctcggcaggtggtccgcaacatgacctccgagttcttcgctgcccagctccgggcccagatctctgacgacaccactcacccgatctcctactacaagcccgagttctacacgccggatgacgggggcactgctcacctgtctgtcgtcgcagaggacggcagtgctgtgtccgccaccagcaccatcaacctctactttggctccaaggtccgctccccggtcagcgggatcctgttcaataatgaaatggacgacttcagctctcccagcatcaccaacgagtttggggtacccccctcacctgccaatttcatccagccagggaagcagccgctctcgtccatgtgcccgacgatcatggtgggccaggacggccaggtccggatggtggtgggagctgctgggggcacacagatcaccacggccactgcactggccatcatctacaacctctggttcggctatgacgtgaagcgggccgtggaggagccccggctgcacaaccagcttctgcccaacgtcacgacagtggagagaaacattgaccaggcagtgactgcagccctggagacccggcaccatcacacccagatcgcgtccaccttcatcgctgtggtgcaagccatcgtccgcacggctggtggctgggcagctgcctcggactccaggaaaggcggggagcctgccggctactgagtgctccaggaggacaaggctgacaagcaatccagggacaagatactcaccaggaccaggaaggggactctgggggaccggcttcccctgtgagcagcagagcagcacaataaatgaggccactgtgccaggctccaggtggcctccctggcctgtctccccaaaaaaaaaaaaaaaaaaaaaaaaaaaaaacaaaaaaaaaaacaaacaaacaaaaaaagacaaacaagaaaaaaaaaaaaaaaaaaaagaaaaagcagagaaggaacacagcgcacgcaagccagaaagagcagaaagagaagaaaaaaggaggagcgagaaagacagagagagacgagagcaagagacaaagtacacgaagaggaaagaggaaaaggaaaccagaggaggacaaagagaagggggacgcagaacaacagagacgcaaagacacaagaaaaacagagaaaaaaaaacgagacggaaggaagaaaagaaaagaaaggaa

SEQ ID NO: 365646 - DNA, 1207 bp, Homo sapiens
gacagggagtcagactggtcatgcaaggtggtccgcaacatgacctccgagttcttcgctgcccagctccgggcccagatctctgacgacaccactcacccgatctcctactacaagcccgagttctacacgccggatgacgggggcactgctcacctgtctgtcgtcgcagaggacggcagtgctgtgtccgccaccagcaccatcaacctctactttggctccaaggtccgctccccggtcagcgggatcctgttcaataatgaaatggacgacttcagctctcccagcatcaccaacgagtttggggtacccccctcacctgccaatttcatccagccagggaagcagccgctctcgtccatgtgcccgacgatcatggtgggccaggacggccaggtccggatggtggtgggagctgctgggggcacacagatcaccacggccactgcactggccatcatctacaacctctggttcggctatgacgtgaagcgggccgtggaggagccccggctgcacaaccagcttctgcccaacgtcacgacagtggagagaaacattgaccaggcagtgactgcagccctggagacccggcaccatcacacccagatcgcgtccaccttcatcgctgtggtgcaagccatcgtccgcacggctggtggctgggcagctgcctcggactccaggaaaggcggggagcctgccggctactgagtgctccaggaggacaaggctgacaagcaatccagggacaagatactcaccaggaccaggaaggggactctgggggaccggcttcccctgtgagcagcagagcagcacaataaatgaggccactgtgccaggctccaggtggcctccctggcctgtctccccaaaaaaaaaaaaaaaaaaaaaaaaaaaaaacaaaaaaaaaaacaaacaaacaaaaaaagacaaacaagaaaaaaaaaaaaaaaaaaaagaaaaagcagagaaggaacacagcgcacgcaagccagaaagagcagaaagagaagaaaaaaggaggagcgagaaagacagagagagacgagagcaagagacaaagtacacgaagaggaaagaggaaaaggaaaccagaggaggacaaagagaagggggacgcagaacaacagagacgcaaagacacaagaaaaacagagaaaaaaaaacgagacggaaggaagaaaagaaaagaaaggaa

SEQ ID NO: 365647 - DNA, 4108 bp, Homo sapiens
ataataattaggccaagcgttgaatagtacggggggggggggggggcgagccccggcggctctggccgcggccgcactcagcgccacgcgtcgaaagcgcaggccccgaggacccgccgcactgacagtatgagccgcacagcctacacggtgggagccctgcttctcctcttggggaccctgctgccggctgctgaagggaaaaagaaagggtcccaaggtgccatccccccgccagacaaggcccagcacaatgactcagagcagactcagtcgccccagcagcctggctccaggaaccgggggcggggccaagggcggggcactgccatgcccggggaggaggtgctggagtccagccaagaggccctgcatgtgacggagcgcaaatacctgaagcgagactggtgcaaaacccagccgcttaagcagaccatccacgaggaaggctgcaacagtcgcaccatcatcaaccgcttctgttacggccagtgcaactctttctacatccccaggcacatccggaaggaggaaggttcctttcagtcctgctccttctgcaagcccaagaaattcactaccatgatggtcacactcaactgccctgaactacagccacctaccaagaagaagagagtcacacgtgtgaagcagtgtcgttgcatatccatcgatttggattaagccaaatccaggtgcacccagcatgtcctaggaatgcagccccaggaagtcccagacctaaaacaaccagattcttacttggcttaaacctagaggccagaagaacccccagctgcctcctggcaggagcctgcttgtgcgtagttcgtgtgcatgagtgtggatgggtgcctgtgggtgtttttagacaccagagaaaacacagtctctgctagagagcactccctattttgtaaacatatctgctttaatggggatgtaccagaaacccacctcaccccggctcacatctaaaggggcggggccgtggtctggttctgactttgtgtttttgtgccctcctggggaccagaatctcctttcggaatgaatgttcatggaagaggctcctctgagggcaagagacctgttttagtgctgcattcgacatggaaaagtccttttaacctgtgcttgcatcctcctttcctcctcctcctcacaatccatctcttcttaagttgatagtgactatgtcagtctaatctcttgtttgccaaggttcctaaattaattcacttaaccatgatgcaaatgtttttcattttgtgaagaccctccagactctgggagaggctggtgtgggcaaggacaagcaggatagtggagtgagaaagggagggtggagggtgaggccaaatcaggtccagcaaaagtcagtagggacattgcagaagcttgaaaggccaataccagaacacaggctgatgcttctgagaaagtcttttcctagtatttaacagaacccaagtgaacagaggagaaatgagattgccagaaagtgattaactttggccgttgcaatctgctcaaacctaacaccaaactgaaaacataaatactgaccactcctatgttcggacccaagcaagttagctaaaccaaaccaactcctctgctttgtccctcaggtggaaaagagaggtagtttagaactctctgcataggggtgggaattaatcaaaaacctcagaggctgaaattcctaatacctttcctttatcgtggttatagtcagctcatttccattccactatttcccataatgcttctgagagccactaacttgattgataaagatcctgcctctgctgagtgtacctgacagtagtctaagatgagagagtttagggactactctgttttagcaagagatattttgggggtctttttgttttaactattgtcaggagattgggctaaagagaagacgacgagagtaaggaaataaagggaattgcctctggctagagagtagttaggtgttaatacctggtagagatgtaagggatatgacctccctttctttatgtgctcactgaggatctgaggggaccctgttaggagagcatagcatcatgatgtattagctgttcatctgctactggttggatggacataactattgtaactattcagtatttactggtaggcactgtcctctgattaaacttggcctactggcaatggctacttaggattgatctaagggccaaagtgcagggtgggtgaactttattgtactttggatttggttaacctgttttcttcaagcctgaggttttatatacaaactccctgaatactctttttgccttgtatcttctcagcctcctagccaagtcctatgtaatatggaaaacaaacactgcagacttgagattcagttgccgatcaaggctctggcattcagagaacccttgcaactcgagaagctgtttttatttcgtttttgttttgatccagtgctctcccatctaacaactaaacaggagccatttcaaggcgggagatattttaaacacccaaaatgttgggtctgattttcaaacttttaaactcactactgatgattctcacgctaggcgaatttgtccaaacacatagtgtgtgtgttttgtatacactgtatgaccccaccccaaatctttgtattgtccacattctccaacaataaagcacagagtggatttaattaagcacacaaatgctaaggcagaattttgagggtgggagagaagaaaagggaaagaagctgaaaatgtaaaaccacaccagggaggaaaaatgacattcagaaccagcaaacactgaatttctcttgttgttttaactctgccacaagaatgcaatttcgttaatggagatgacttaagttggcagcagtaatcttcttttaggagcttgtaccacagtcttgcacataagtgcagatttggctcaagtaaagagaatttcctcaacactaacttcactgggataatcagcagcgtaactaccctaaaagcatatcactagccaaagagggaaatatctgttcttcttactgtgcctatattaagactagtacaaatgtggtgtgtcttccaactttcattgaaaatgccatatctataccatattttattcgagtcactgatgatgtaatgatatattttttcattattatagtagaatatttttatggcaagatatttgtggtcttgatcatacctattaaaataatgccaaacaccaaatatgaattttatgatgtacactttgtgcttggcattaaaagaaaaaaacacacatcctggaagtctgtaagttgttttttgttactgtaggtcttcaaagttaagagtgtaagtgaaaaatctggaggagaggataatttccactgtgtggaatgtgaatagttaaatgaaaagttatggttatttaatgtaattattacttcaaatcctttggtcactgtgatttcaagcatgttttctttttctcctttatatgactttctctgagttgggcaaagaagaagctgacacaccgtatgttgttagagtcttttatctggtcaggggaaacaaaatcttgacccagctgaacatgtcttcctgagtcagtgcctgaatctttattttttaaattgaatgttccttaaaggttaacatttctaaagcaatattaagaaagactttaaatgttattttggaagacttacgatgcatgtatacaaacgaatagcagataatgatgactagttcacacataaagtccttttaaggagaaaatctaaaatgaaaagtggataaacagaacatttataagtgatcagttaatgcctaagagtgaaagtagttctattgacattcctcaagatatttaatatcaactgcattatgtattatgtctgcttaaatcatttaaaaacggcaaagaattatatagactatgaggtaccttgctgtgtaggaggatgaaaggggagttgatagtctcataaaactaatttggcttcaagtttcatgaatctgtaactagaatttaattttcaccccaataatgttctatatagcctttgctaaagagcaactaataaattaaacctattctttctgtg

SEQ ID NO: 365648 - DNA, 3856 bp, Homo sapiens
ataataattaggccaagcgttgaatagtacggggggggggggggggcgagccccggcggctctggccgcggccgcactcagcgccacgcgtcgaaagcgcaggccccgaggacccgccgcactgacagggagcgcaaatacctgaagcgagactggtgcaaaacccagccgcttaagcagaccatccacgaggaaggctgcaacagtcgcaccatcatcaaccgcttctgttacggccagtgcaactctttctacatccccaggcacatccggaaggaggaaggttcctttcagtcctgctccttctgcaagcccaagaaattcactaccatgatggtcacactcaactgccctgaactacagccacctaccaagaagaagagagtcacacgtgtgaagcagtgtcgttgcatatccatcgatttggattaagccaaatccaggtgcacccagcatgtcctaggaatgcagccccaggaagtcccagacctaaaacaaccagattcttacttggcttaaacctagaggccagaagaacccccagctgcctcctggcaggagcctgcttgtgcgtagttcgtgtgcatgagtgtggatgggtgcctgtgggtgtttttagacaccagagaaaacacagtctctgctagagagcactccctattttgtaaacatatctgctttaatggggatgtaccagaaacccacctcaccccggctcacatctaaaggggcggggccgtggtctggttctgactttgtgtttttgtgccctcctggggaccagaatctcctttcggaatgaatgttcatggaagaggctcctctgagggcaagagacctgttttagtgctgcattcgacatggaaaagtccttttaacctgtgcttgcatcctcctttcctcctcctcctcacaatccatctcttcttaagttgatagtgactatgtcagtctaatctcttgtttgccaaggttcctaaattaattcacttaaccatgatgcaaatgtttttcattttgtgaagaccctccagactctgggagaggctggtgtgggcaaggacaagcaggatagtggagtgagaaagggagggtggagggtgaggccaaatcaggtccagcaaaagtcagtagggacattgcagaagcttgaaaggccaataccagaacacaggctgatgcttctgagaaagtcttttcctagtatttaacagaacccaagtgaacagaggagaaatgagattgccagaaagtgattaactttggccgttgcaatctgctcaaacctaacaccaaactgaaaacataaatactgaccactcctatgttcggacccaagcaagttagctaaaccaaaccaactcctctgctttgtccctcaggtggaaaagagaggtagtttagaactctctgcataggggtgggaattaatcaaaaacctcagaggctgaaattcctaatacctttcctttatcgtggttatagtcagctcatttccattccactatttcccataatgcttctgagagccactaacttgattgataaagatcctgcctctgctgagtgtacctgacagtagtctaagatgagagagtttagggactactctgttttagcaagagatattttgggggtctttttgttttaactattgtcaggagattgggctaaagagaagacgacgagagtaaggaaataaagggaattgcctctggctagagagtagttaggtgttaatacctggtagagatgtaagggatatgacctccctttctttatgtgctcactgaggatctgaggggaccctgttaggagagcatagcatcatgatgtattagctgttcatctgctactggttggatggacataactattgtaactattcagtatttactggtaggcactgtcctctgattaaacttggcctactggcaatggctacttaggattgatctaagggccaaagtgcagggtgggtgaactttattgtactttggatttggttaacctgttttcttcaagcctgaggttttatatacaaactccctgaatactctttttgccttgtatcttctcagcctcctagccaagtcctatgtaatatggaaaacaaacactgcagacttgagattcagttgccgatcaaggctctggcattcagagaacccttgcaactcgagaagctgtttttatttcgtttttgttttgatccagtgctctcccatctaacaactaaacaggagccatttcaaggcgggagatattttaaacacccaaaatgttgggtctgattttcaaacttttaaactcactactgatgattctcacgctaggcgaatttgtccaaacacatagtgtgtgtgttttgtatacactgtatgaccccaccccaaatctttgtattgtccacattctccaacaataaagcacagagtggatttaattaagcacacaaatgctaaggcagaattttgagggtgggagagaagaaaagggaaagaagctgaaaatgtaaaaccacaccagggaggaaaaatgacattcagaaccagcaaacactgaatttctcttgttgttttaactctgccacaagaatgcaatttcgttaatggagatgacttaagttggcagcagtaatcttcttttaggagcttgtaccacagtcttgcacataagtgcagatttggctcaagtaaagagaatttcctcaacactaacttcactgggataatcagcagcgtaactaccctaaaagcatatcactagccaaagagggaaatatctgttcttcttactgtgcctatattaagactagtacaaatgtggtgtgtcttccaactttcattgaaaatgccatatctataccatattttattcgagtcactgatgatgtaatgatatattttttcattattatagtagaatatttttatggcaagatatttgtggtcttgatcatacctattaaaataatgccaaacaccaaatatgaattttatgatgtacactttgtgcttggcattaaaagaaaaaaacacacatcctggaagtctgtaagttgttttttgttactgtaggtcttcaaagttaagagtgtaagtgaaaaatctggaggagaggataatttccactgtgtggaatgtgaatagttaaatgaaaagttatggttatttaatgtaattattacttcaaatcctttggtcactgtgatttcaagcatgttttctttttctcctttatatgactttctctgagttgggcaaagaagaagctgacacaccgtatgttgttagagtcttttatctggtcaggggaaacaaaatcttgacccagctgaacatgtcttcctgagtcagtgcctgaatctttattttttaaattgaatgttccttaaaggttaacatttctaaagcaatattaagaaagactttaaatgttattttggaagacttacgatgcatgtatacaaacgaatagcagataatgatgactagttcacacataaagtccttttaaggagaaaatctaaaatgaaaagtggataaacagaacatttataagtgatcagttaatgcctaagagtgaaagtagttctattgacattcctcaagatatttaatatcaactgcattatgtattatgtctgcttaaatcatttaaaaacggcaaagaattatatagactatgaggtaccttgctgtgtaggaggatgaaaggggagttgatagtctcataaaactaatttggcttcaagtttcatgaatctgtaactagaatttaattttcaccccaataatgttctatatagcctttgctaaagagcaactaataaattaaacctattctttctgtg

SEQ ID NO: 365649 - DNA, 1054 bp, Homo sapiens
acgcactctgaggatcccgagtgggtctgtgtcttccaactttcattgaaaatgccatatctataccatattttattcgagtcactgatgatgtaatgatatattttttcattattatagtagaatatttttatggcaagatatttgtggtcttgatcatacctattaaaataatgccaaacaccaaatatgaattttatgatgtacactttgtgcttggcattaaaagaaaaaaacacacatcctggaagtctgtaagttgttttttgttactgtaggtcttcaaagttaagagtgtaagtgaaaaatctggaggagaggataatttccactgtgtggaatgtgaatagttaaatgaaaagttatggttatttaatgtaattattacttcaaatcctttggtcactgtgatttcaagcatgttttctttttctcctttatatgactttctctgagttgggcaaagaagaagctgacacaccgtatgttgttagagtcttttatctggtcaggggaaacaaaatcttgacccagctgaacatgtcttcctgagtcagtgcctgaatctttattttttaaattgaatgttccttaaaggttaacatttctaaagcaatattaagaaagactttaaatgttattttggaagacttacgatgcatgtatacaaacgaatagcagataatgatgactagttcacacataaagtccttttaaggagaaaatctaaaatgaaaagtggataaacagaacatttataagtgatcagttaatgcctaagagtgaaagtagttctattgacattcctcaagatatttaatatcaactgcattatgtattatgtctgcttaaatcatttaaaaacggcaaagaattatatagactatgaggtaccttgctgtgtaggaggatgaaaggggagttgatagtctcataaaactaatttggcttcaagtttcatgaatctgtaactagaatttaattttcaccccaataatgttctatatagcctttgctaaagagcaactaataaattaaacctattctttctgtg

SEQ ID NO: 365650 - DNA, 2704 bp, Homo sapiens
ataataattaggccaagcgttgaatagtacggggggggggggggggcgagccccggcggctctggccgcggccgcactcagcgccacgcgtcgaaagcgcaggccccgaggacccgccgcactgacagtatgagccgcacagcctacacggtgggagccctgcttctcctcttggggaccctgctgccggctgctgaagggaaaaagaaagggtcccaaggtgccatccccccgccagacaaggcccagcacaatgactcagagcagactcagtcgccccagcagcctggctccaggaaccgggggcggggccaagggcggggcactgccatgcccggggaggaggtgctggagtccagccaagaggccctgcatgtgacggagcgcaaatacctgaagcgagactggtgcaaaacccagccgcttaagcagaccatccacgaggaaggctgcaacagtcgcaccatcatcaaccgcttctgttacggccagtgcaactctttctacatccccaggcacatccggaaggaggaaggttcctttcagtcctgctccttctgcaagcccaagaaattcactaccatgatggtcacactcaactgccctgaactacagccacctaccaagaagaagagagtcacacgtgtgaagcagtgtcgttgcatatccatcgatttggattaagccaaatccaggtgcacccagcatgtcctaggaatgcagccccaggaagtcccagacctaaaacaaccagattcttacttggcttaaacctagaggccagaagaacccccagctgcctcctggcaggagcctgcttgtgcgtagttcgtgtgcatgagtgtggatgggtgcctgtgggtgtttttagacaccagagaaaacacagtctctgctagagagcactccctattttgtaaacatatctgctttaatggggatgtaccagaaacccacctcaccccggctcacatctaaaggggcggggccgtggtctggttctgactttgtgtttttgtgccctcctggggaccagaatctcctttcggaatgaatgttcatggaagaggctcctctgagggcaagagacctgttttagtgctgcattcgacatggaaaagtccttttaacctgtgcttgcatcctcctttcctcctcctcctcacaatccatctcttcttaagttgatagtgactatgtcagtctaatctcttgtttgccaaggttcctaaattaattcacttaaccatgatgcaaatgtttttcattttgtgaagaccctccagactctgggagaggctggtgtgggcaaggacaagcaggatagtggagtgagaaagggagggtggagggtgaggccaaatcaggtccagcaaaagtcagtagggacattgcagaagcttgaaaggccaataccagaacacaggctgatgcttctgagaaagtcttttcctagtatttaacagaacccaagtgaacagaggagaaatgagattgccagaaagtgattaactttggccgttgcaatctgctcaaacctaacaccaaactgaaaacataaatactgaccactcctatgttcggacccaagcaagttagctaaaccaaaccaactcctctgctttgtccctcaggtggaaaagagaggtagtttagaactctctgcataggggtgggaattaatcaaaaacctcagaggctgaaattcctaatacctttcctttatcgtggttatagtcagctcatttccattccactatttcccataatgcttctgagagccactaacttgattgataaagatcctgcctctgctgagtgtacctgacagtagtctaagatgagagagtttagggactactctgttttagcaagagatattttgggggtctttttgttttaactattgtcaggagattgggctaaagagaagacgacgagagtaaggaaataaagggaattgcctctggctagagagtagttaggtgttaatacctggtagagatgtaagggatatgacctccctttctttatgtgctcactgaggatctgaggggaccctgttaggagagcatagcatcatgatgtattagctgttcatctgctactggttggatggacataactattgtaactattcagtatttactggtaggcactgtcctctgattaaacttggcctactggcaatggctacttaggattgatctaagggccaaagtgcagggtgggtgaactttattgtactttggatttggttaacctgttttcttcaagcctgaggttttatatacaaactccctgaatactctttttgccttgtatcttctcagcctcctagccaagtcctatgtaatatggaaaacaaacactgcagacttgagattcagttgccgatcaaggctctggcattcagagaacccttgcaactcgagaagctgtttttatttcgtttttgttttgatccagtgctctcccatctaacaactaaacaggagccatttcaaggcgggagatattttaaacacccaaaatgttgggtctgattttcaaacttttaaactcactactgatgattctcacgctaggcgaatttgtccaaacacatagtgtgtgtgttttgtatacactgtatgaccccaccccaaatctttgtattgtccacattctccaacaataaagcacagagtggatttaattaagc

SEQ ID NO: 365651 - DNA, 494 bp, Homo sapiens
aagcgcaggccccgaggacccgccgcactgacagggtgagcgcggacgcacccggcagggatgtgagtgggcggagggaagagggccgcaaaccaacccaggacccgctcagttccacgcgcggcagccctccgtgcgcgcaggctcgggtgcgttgttcgcgggggtgaattgtgaagaaccatcgcggggtccttcctgctgaggccgcggacaccgtgacctcgctgctctgggtctgcagggaaacgtaggaaaaaaagttgtcaggagcgggcaggatgacccccacatcccgtttccacctcccggaggcccccgaacacgctcctggtgctggtggcagcagcgcctggcagacgcgcccgcttagcgagggcgcgaagtccaggccgccagagcgcaggagcatccggacctgctagtcggccgctgactgcgcggcgagttgccttgagagggtcccatgtgcttggggcgccgcgctgggtctg

SEQ ID NO: 365652 - DNA, 3296 bp, Homo sapiens
ataataattaggccaagcgttgaatagtacggggggggggggggggcgagccccggcggctctggccgcggccgcactcagcgccacgcgtcgaaagcgcaggccccgaggacccgccgcactgacagtatgagccgcacagcctacacggtgggagccctgcttctcctcttggggaccctgctgccggctgctgaagggaaaaagaaagggtcccaaggtgccatccccccgccagacaaggcccagcacaatgactcagagcagactcagtcgccccagcagcctggctccaggaaccgggggcggggccaagggcggggcactgccatgcccggggaggaggtgctggagtccagccaagaggccctgcatgtgacggagcgcaaatacctgaagcgagactggtgcaaaacccagccgcttaagcagaccatccacgaggaaggctgcaacagtcgcaccatcatcaaccgcttctgttacggccagtgcaactctttctacatccccaggcacatccggaaggaggaaggttcctttcagtcctgctccttctgcaagcccaagaaattcactaccatgatggtcacactcaactgccctgaactacagccacctaccaagaagaagagagtcacacgtgtgaagcagtgtcgttgcatatccatcgatttggattaagccaaatccaggtgcacccagcatgtcctaggaatgcagccccaggaagtcccagacctaaaacaaccagattcttacttggcttaaacctagaggccagaagaacccccagctgcctcctggcaggagcctgcttgtgcgtagttcgtgtgcatgagtgtggatgggtgcctgtgggtgtttttagacaccagagaaaacacagtctctgctagagagcactccctattttgtaaacatatctgctttaatggggatgtaccagaaacccacctcaccccggctcacatctaaaggggcggggccgtggtctggttctgactttgtgtttttgtgccctcctggggaccagaatctcctttcggaatgaatgttcatggaagaggctcctctgagggcaagagacctgttttagtgctgcattcgacatggaaaagtccttttaacctgtgcttgcatcctcctttcctcctcctcctcacaatccatctcttcttaagttgatagtgactatgtcagtctaatctcttgtttgccaaggttcctaaattaattcacttaaccatgatgcaaatgtttttcattttgtgaagaccctccagactctgggagaggctggtgtgggcaaggacaagcaggatagtggagtgagaaagggagggtggagggtgaggccaaatcaggtccagcaaaagtcagtagggacattgcagaagcttgaaaggccaataccagaacacaggctgatgcttctgagaaagtcttttcctagtatttaacagaacccaagtgaacagaggagaaatgagattgccagaaagtgattaactttggccgttgcaatctgctcaaacctaacaccaaactgaaaacataaatactgaccactcctatgttcggacccaagcaagttagctaaaccaaaccaactcctctgctttgtccctcaggtggaaaagagaggtagtttagaactctctgcataggggtgggaattaatcaaaaacctcagaggctgaaattcctaatacctttcctttatcgtggttatagtcagctcatttccattccactatttcccataatgcttctgagagccactaacttgattgataaagatcctgcctctgctgagtgtacctgacagtagtctaagatgagagagtttagggactactctgttttagcaagagatattttgggggtctttttgttttaactattgtcaggagattgggctaaagagaagacgacgagagtaaggaaataaagggaattgcctctggctagagagtagttaggtgttaatacctggtagagatgtaagggatatgacctccctttctttatgtgctcactgaggatctgaggggaccctgttaggagagcatagcatcatgatgtattagctgttcatctgctactggttggatggacataactattgtaactattcagtatttactggtaggcactgtcctctgattaaacttggcctactggcaatggctacttaggattgatctaagggccaaagtgcagggtgggtgaactttattgtactttggatttggttaacctgttttcttcaagcctgaggttttatatacaaactccctgaatactctttttgccttgtatcttctcagcctcctagccaagtcctatgtaatatggaaaacaaacactgcagacttgagattcagttgccgatcaaggctctggcattcagagaacccttgcaactcgagaagctgtttttatttcgtttttgttttgatccagtgctctcccatctaacaactaaacaggagccatttcaaggcgggagatattttaaacacccaaaatgttgggtctgattttcaaacttttaaactcactactgatgattctcacgctaggcgaatttgtccaaacacatagtgtgtgtgttttgtatacactgtatgaccccaccccaaatctttgtattgtccacattctccaacaataaagcacagagtggatttaattaagcacacaaatgctaaggcagaattttgagggtgggagagaagaaaagggaaagaagctgaaaatgtaaaaccacaccagggaggaaaaatgacattcagaaccagcaaacactgaatttctcttgttgttttaactctgccacaagaatgcaatttcgttaatggagatgacttaagttggcagcagtaatcttcttttaggagcttgtaccacagtcttgcacataagtgcagatttggctcaagtaaagagaatttcctcaacactaacttcactgggataatcagcagcgtaactaccctaaaagcatatcactagccaaagagggaaatatctgttcttcttactgtgcctatattaagactagtacaaatgtggtgtgtcttccaactttcattgaaaatgccatatctataccatattttattcgagtcactgatgatgtaatgatatattttttcattattatagtagaatatttttatggcaagatatttgtggtcttgatcatacctattaaaataatgccaaacaccaaatatgaattttatgatgtacactttgtgcttggcattaaaagaaaaaaacacaca

SEQ ID NO: 365653 - DNA, 1039 bp, Homo sapiens
tccgctccggcctcggcttcgacgtaggccaacgcttcctccccagtagctcctaggccttctcgtggccgttgttttgaaaacggcgctctgattggctaggtttccgggcccgcgcccgttgccccacgcactgaccaattggcactcatgtaacatcggacgaggcacgagtgaggggggaggcggtggcggcggccattttgagccgctgccgccattggagtgggccccccccctttcccccttcgcctcctgacaggaaaggtttaagggggacagagccctgggaggccgggccgggctcgggggccaccccgggggcccgggccatggatgtgcgccgtctgaaggtgaacgaacttcgcgaggagctgcagcgccgcggcctggacactcgaggcctcaaggccgagcttgctgagcggctgcaggcggcgttggaggccgaggagcctgacgacgagcgggagctcgacgccgacgacgaaccggggcgacccgggcacatcaacgaggaggtcgagaccgaggggggctccgagctggaggggaccgcgcagccaccgccgcccgggctgcagccgcacgcggagcccggcggctactcggggccggacggacattatgccatggacaatattaccaggcagaaccaattctacgatacccaagtcatcaaacaagaaaacgagtcaggctacgagaggagaccactggaaatggagcagcagcaggcctatcgtccagaaatgaagacagagatgaagcaaggagcacccaccagcttcctcccgcctgaagcttctcaactcaagccagacaggcagcaattccagagtcgaaagaggccttatgaagaaaaccggggacgggggtactttgagcaccgagaggataggaggtgggtgtatgaggcagcagtcacccttgctctggtaggtttctatatccatagcctcgtgcttgctggggacatttgcactaacctagaggggctgagtaaagattccctctgctttcacactcttcctgtccc

SEQ ID NO: 365654 - DNA, 795 bp, Homo sapiens
  misc_feature (726)..(726): n is a, c, g, or t
  misc_feature (733)..(734): n is a, c, g, or t
  misc_feature (737)..(738): n is a, c, g, or t
  misc_feature (742)..(742): n is a, c, g, or t
  misc_feature (745)..(745): n is a, c, g, or t
  misc_feature (747)..(747): n is a, c, g, or t
  misc_feature (754)..(754): n is a, c, g, or t
aaactataggctaggtacgaggctgggtgttaatcggccgaggcctgggtaccaatgctatcatggataagatgcgggtgatgggcctacgccggcagcggaactatgctggccgctgggatgtcctgatccagcaggccacccagtgcctcaaccgcctcatccagattgctgcccgcaagaaacgcaactatatcctagatcagacaaatgtttatgggtcagcccagagacgaaaaatgagaccatttgaaggcttccagcgcaaagctattgtaatttgtcccactgacgaggacctaaaagaccgaacaataaagcgaaccgacgaggaagggaaggatgtcccagatcatgcggtcttagaaatgaaagccaacttcacgttgccagatgttggggacttcctggatgaggttctgttcattgagctgcagcgggaggaagcggacaagctagtgaggcagtacaacgaggaaggccgcaaggctgggccaccccctgaaaagcgctttgacaaccgaggtggtggtggcttccggggccgcgggggtggtggtggcttccagcgctatgaaaaccgaggaccccctggaggcaaccgtggcggcttccagaaccgagggggaggcagcggtggaggaggcaactaccgaggaggtttcaaccgcagcggaggtggtggctatagccagaaccgctggggtaacaacaacacatccacanagagcgnncannggcnccngnaagcgcncaaagctcgcacaggccaccagccgccacatagccgtcgcc

SEQ ID NO: 365655 - DNA, 635 bp, Homo sapiens
  misc_feature (3)..(3): n is a, c, g, or t
  misc_feature (6)..(6): n is a, c, g, or t
  misc_feature (17)..(17): n is a, c, g, or t
  misc_feature (45)..(45): n is a, c, g, or t
  misc_feature (48)..(48): n is a, c, g, or t
  misc_feature (68)..(68): n is a, c, g, or t
tgngcnccccccggtgnggccgctctagaactagtggtccccccnggntgaggaattcggcccgaganaaaacacaacaaaaccaaaccacagaatcatctttaacccaactttttatacgatgccccagttccccataactttgcacacaagcttctgtgttcagttgaattgtaactgctttttgtatttggagagagtgactattgaacttgaaaccttttattccgggcgtcttggtagtttctggtgggattcagtgggtgagagggaagaaggggaggttggggggctccttcccttcagaacttgaagtttctcccactgcctcctctccagtggtctcccaggtgccagacccaaaagcttttcctacagtgataccctttatttttacttccccttgactcatatgttttaacatgattttaacaaactgcacttattaagaaatgtgtttgccctgttttgtttggtttcgttttgttttctttgaataaatgacatggcacctcctagcaggaaggaagcagggttgaaaccctgaagtgttactgcagttggccgttaattggggtgggggcctctttaaagggaaattatttactcattcattaaacaacttaactgaggga

SEQ ID NO: 365656 - DNA, 736 bp, Homo sapiens
tccgctccggcctcggcttcgacgtaggccaacgcttcctccccagtagctcctaggccttctcgtggccgttgttttgaaaacggcgctctgattggctaggtttccgggcccgcgcccgttgccccacgcactgaccaattggcactcatgtaacatcggacgaggcacgagtgaggggggaggcggtggcggcggccattttgagccgctgccgccattggagtgggccccccccctttcccccttcgcctcctgacaggaaaggtttaagggggacagagccctgggaggccgggccgggctcgggggccaccccgggggcccgggccatggatgtgcgccgtctgaaggtgaacgaacttcgcgaggagctgcagcgccgcggcctggacactcgaggcctcaaggccgagcttgctgagcggctgcaggcggcgttggaggccgaggagcctgacgacgagcgggagctcgacgccgacgacgaaccggggcgacccgggcacatcaacgaggaggtcgagaccgaggggggctccgagctggaggggaccgcgcagccaccgccgcccgggctgcagccgcacgcggagcccggcggctactcggggccggacggacattatgccatggacaatattaccaggcagaaccaattctacgatacccaagtcatcaaacaagaaaacgagtccatggttgtgcgtgcctgtaatcccagctactcggaggc

SEQ ID NO: 365657 - DNA, 4125 bp, Homo sapiens
tccgctccggcctcggcttcgacgtaggccaacgcttcctccccagtagctcctaggccttctcgtggccgttgttttgaaaacggcgctctgattggctaggtttccgggcccgcgcccgttgccccacgcactgaccaattggcactcatgtaacatcggacgaggcacgagtgaggggggaggcggtggcggcggccattttgagccgctgccgccattggagtgggccccccccctttcccccttcgcctcctgacaggaaaggtttaagggggacagagccctgggaggccgggccgggctcgggggccaccccgggggcccgggccatggatgtgcgccgtctgaaggtgaacgaacttcgcgaggagctgcagcgccgcggcctggacactcgaggcctcaaggccgagcttgctgagcggctgcaggcggcgttggaggccgaggagcctgacgacgagcgggagctcgacgccgacgacgaaccggggcgacccgggcacatcaacgaggaggtcgagaccgaggggggctccgagctggaggggaccgcgcagccaccgccgcccgggctgcagccgcacgcggagcccggcggctactcggggccggacggacattatgccatggacaatattaccaggcagaaccaattctacgatacccaagtcatcaaacaagaaaacgagtcaggctacgagaggagaccactggaaatggagcagcagcaggcctatcgtccagaaatgaagacagagatgaagcaaggagcacccaccagcttcctcccgcctgaagcttctcaactcaagccagacaggcagcaattccagagtcgaaagaggccttatgaagaaaaccggggacgggggtactttgagcaccgagaggataggaggggccgctctcctcagcctcctgctgaagaggatgaagatgactttgatgatacccttgttgctattgacacctataactgcgacctccacttcaaggtggcccgagatcggagtagtggctatccgctcacaattgagggctttgcatacctgtggtcaggagcccgtgccagctatggggtcagaaggggccgtgtatgcttcgagatgaagatcaatgaggaaatctccgtgaagcaccttccgtctacagagcctgacccccacgtggtccgtatcggctggtccctggactcctgcagcacccagctaggcgaagagcctttctcctatggctatggaggcactgggaagaagtccaccaatagccggtttgaaaactacggagacaagtttgcagagaacgatgtgattggctgctttgcggattttgaatgtggaaatgacgtggaactgtcttttaccaagaatggaaagtggatgggcattgctttccgaatccagaaggaagccttggggggtcaggccctctatcctcatgtcctggtgaagaattgcgcagtggagttcaacttcggacagagagcagagccctactgttctgtcctcccggggtttaccttcatccagcaccttccccttagtgagcgtatccggggcaccgttggaccaaagagcaaggcagaatgtgagattctgatgatggtgggcctgcctgctgctggcaagaccacatgggccatcaaacatgcagcctccaacccttccaagaagtacaacatcctgggtaccaatgccatcatggataagatgcgggtgatgggcctacgccggcagcggaactatgctggccgctgggatgtcctgatccagcaggccacccagtgcctcaaccgcctcatccagattgctgcccgcaagaaacgcaactatatcctagatcagacaaatgtttatgggtcagcccagagacgaaaaatgagaccatttgaaggcttccagcgcaaagctattgtaatttgtcccactgacgaggacctaaaagaccgaacaataaagcgaaccgacgaggaagggaaggatgtcccagatcatgcggtcttagaaatgaaagccaacttcacgttgccagatgttggggacttcctggatgaggttctgttcattgagctgcagcgggaggaagcggacaagctagtgaggcagtacaacgaggaaggccgcaaggctgggccaccccctgaaaagcgctttgacaaccgaggtggtggtggcttccggggccgcgggggtggtggtggcttccagcgctatgaaaaccgaggaccccctggaggcaaccgtggcggcttccagaaccgagggggaggcagcggtggaggaggcaactaccgaggaggtttcaaccgcagcggaggtggtggctatagccagaaccgctggggtaacaacaaccgggataacaacaactccaacaacagaggcagctacaaccgggctccccagcaacagccgccaccacagcagcctccgccaccacagccaccaccccagcagccaccgccaccacccagctacagccctgctcggaaccccccaggggccagcacctacaataagaacagcaacatccctggctcaagcgccaataccagcacccccaccgtcagcagctacagccctccacagccgagttacagccagccaccctacaaccagggaggttacagccagggctacacagccccaccgcctccacctccaccaccacctgcctacaactatgggagctacggcggttacaacccggccccctataccccaccgccaccccccaccgcacagacctaccctcagcccagctataaccagtatcagcagtatgcccagcagtggaaccagtactatcagaaccagggccagtggccgccatactacgggaactacgactacgggagctactccgggaacacacagggtggcacaagtacacagtagccagtgtgacccagaggctcccggaggcccctgccggcttcctccaccagcgcctgcctcggcccctcctctgcccccgccagatcccgtggtgctggggatggggtcatcccagggctgcctccctccagcccactgcctcccctctgaggggcttccttcccctccatagggccaggcatttttttctggattcaaacaggcaacaatgaccttttattttctgtttgtccccacctccccagccttccacctcctgttcttcctaccttcttcctttttgactaaataatccccacctcccttgatcatacagtgaggctacagtgactgaggggagaatcccctcctgttcactctcccaaccctgctccagcccctcagcttcccagaccctcatgcagttggttgtaaattctcccaggagctgttttactgtctacttttcaggattaaaaaaaaaatcaaaacttaaaaaaaaaaaagtttaaaaagcaaaatggggagggggaggaagcagtgacttttttttggtaattatgcgcttttttttaatttttagaatttgtctttttactgtgggtgggctgttgatatttcatcaagataagcatttctttcctgagttcaggtgactgaggaagagccacaaaacaaaacacaacaaaaccaaaccacagaatcatctttaacccaactttttatacgatgccccagttccccataactttgcacacaagcttctgtgttcagttgaattgtaactgctttttgtatttggagagagtgactattgaacttgaaaccttttattccgggcgtcttggtagtttctggtgggattcagtgggtgagagggaagaaggggaggttggggggctccttcccttcagaacttgaagtttctcccactgcctcctctccagtggtctcccaggtgccagacccaaaagcttttcctacagtgataccctttatttttacttccccttgactcatatgttttaacatgattttaacaaactgcacttattaagaaatgtgtttgccctgttttgtttggtttcgttttgttttctttgaataaatgacatggcacctcctagcaggaaggaagcagggttgaaaccctgaagtgttactgcagttggccgttaattggggtgggggcctctttaaagggaaattatttactcattcattaaacaacttaactgaggga

SEQ ID NO: 365658 - DNA, 4019 bp, Homo sapiens
tccgctccggcctcggcttcgacgtaggccaacgcttcctccccagtagctcctaggccttctcgtggccgttgttttgaaaacggcgctctgattggctaggtttccgggcccgcgcccgttgccccacgcactgaccaattggcactcatgtaacatcggacgaggcacgagtgaggggggaggcggtggcggcggccattttgagccgctgccgccattggagtgggccccccccctttcccccttcgcctcctgacaggaaaggtttaagggggacagagccctgggaggccgggccgggctcgggggccaccccgggggcccgggccatggatgtgcgccgtctgaaggtgaacgaacttcgcgaggagctgcagcgccgcggcctggacactcgaggcctcaaggccgagcttgctgagcggctgcaggcggcgttggaggccgaggagcctgacgacgagcgggagctcgacgccgacgacgaaccggggcgacccgggcacatcaacgaggagatgccatggacaatattaccaggcagaaccaattctacgatacccaagtcatcaaacaagaaaacgagtcaggctacgagaggagaccactggaaatggagcagcagcaggcctatcgtccagaaatgaagacagagatgaagcaaggagcacccaccagcttcctcccgcctgaagcttctcaactcaagccagacaggcagcaattccagagtcgaaagaggccttatgaagaaaaccggggacgggggtactttgagcaccgagaggataggaggggccgctctcctcagcctcctgctgaagaggatgaagatgactttgatgatacccttgttgctattgacacctataactgcgacctccacttcaaggtggcccgagatcggagtagtggctatccgctcacaattgagggctttgcatacctgtggtcaggagcccgtgccagctatggggtcagaaggggccgtgtatgcttcgagatgaagatcaatgaggaaatctccgtgaagcaccttccgtctacagagcctgacccccacgtggtccgtatcggctggtccctggactcctgcagcacccagctaggcgaagagcctttctcctatggctatggaggcactgggaagaagtccaccaatagccggtttgaaaactacggagacaagtttgcagagaacgatgtgattggctgctttgcggattttgaatgtggaaatgacgtggaactgtcttttaccaagaatggaaagtggatgggcattgctttccgaatccagaaggaagccttggggggtcaggccctctatcctcatgtcctggtgaagaattgcgcagtggagttcaacttcggacagagagcagagccctactgttctgtcctcccggggtttaccttcatccagcaccttccccttagtgagcgtatccggggcaccgttggaccaaagagcaaggcagaatgtgagattctgatgatggtgggcctgcctgctgctggcaagaccacatgggccatcaaacatgcagcctccaacccttccaagaagtacaacatcctgggtaccaatgccatcatggataagatgcgggtgatgggcctacgccggcagcggaactatgctggccgctgggatgtcctgatccagcaggccacccagtgcctcaaccgcctcatccagattgctgcccgcaagaaacgcaactatatcctagatcagacaaatgtttatgggtcagcccagagacgaaaaatgagaccatttgaaggcttccagcgcaaagctattgtaatttgtcccactgacgaggacctaaaagaccgaacaataaagcgaaccgacgaggaagggaaggatgtcccagatcatgcggtcttagaaatgaaagccaacttcacgttgccagatgttggggacttcctggatgaggttctgttcattgagctgcagcgggaggaagcggacaagctagtgaggcagtacaacgaggaaggccgcaaggctgggccaccccctgaaaagcgctttgacaaccgaggtggtggtggcttccggggccgcgggggtggtggtggcttccagcgctatgaaaaccgaggaccccctggaggcaaccgtggcggcttccagaaccgagggggaggcagcggtggaggaggcaactaccgaggaggtttcaaccgcagcggaggtggtggctatagccagaaccgctggggtaacaacaaccgggataacaacaactccaacaacagaggcagctacaaccgggctccccagcaacagccgccaccacagcagcctccgccaccacagccaccaccccagcagccaccgccaccacccagctacagccctgctcggaaccccccaggggccagcacctacaataagaacagcaacatccctggctcaagcgccaataccagcacccccaccgtcagcagctacagccctccacagccgagttacagccagccaccctacaaccagggaggttacagccagggctacacagccccaccgcctccacctccaccaccacctgcctacaactatgggagctacggcggttacaacccggccccctataccccaccgccaccccccaccgcacagacctaccctcagcccagctataaccagtatcagcagtatgcccagcagtggaaccagtactatcagaaccagggccagtggccgccatactacgggaactacgactacgggagctactccgggaacacacagggtggcacaagtacacagtagccagtgtgacccagaggctcccggaggcccctgccggcttcctccaccagcgcctgcctcggcccctcctctgcccccgccagatcccgtggtgctggggatggggtcatcccagggctgcctccctccagcccactgcctcccctctgaggggcttccttcccctccatagggccaggcatttttttctggattcaaacaggcaacaatgaccttttattttctgtttgtccccacctccccagccttccacctcctgttcttcctaccttcttcctttttgactaaataatccccacctcccttgatcatacagtgaggctacagtgactgaggggagaatcccctcctgttcactctcccaaccctgctccagcccctcagcttcccagaccctcatgcagttggttgtaaattctcccaggagctgttttactgtctacttttcaggattaaaaaaaaaatcaaaacttaaaaaaaaaaaagtttaaaaagcaaaatggggagggggaggaagcagtgacttttttttggtaattatgcgcttttttttaatttttagaatttgtctttttactgtgggtgggctgttgatatttcatcaagataagcatttctttcctgagttcaggtgactgaggaagagccacaaaacaaaacacaacaaaaccaaaccacagaatcatctttaacccaactttttatacgatgccccagttccccataactttgcacacaagcttctgtgttcagttgaattgtaactgctttttgtatttggagagagtgactattgaacttgaaaccttttattccgggcgtcttggtagtttctggtgggattcagtgggtgagagggaagaaggggaggttggggggctccttcccttcagaacttgaagtttctcccactgcctcctctccagtggtctcccaggtgccagacccaaaagcttttcctacagtgataccctttatttttacttccccttgactcatatgttttaacatgattttaacaaactgcacttattaagaaatgtgtttgccctgttttgtttggtttcgttttgttttctttgaataaatgacatggcacctcctagcaggaaggaagcagggttgaaaccctgaagtgttactgcagttggccgttaattggggtgggggcctctttaaagggaaattatttactcattcattaaacaacttaactgaggga

SEQ ID NO: 365659 - DNA, 3840 bp, Homo sapiens
caggtactcacaaccccgaacgttcagactgacatagaaacacaggcacagaacacctccgatcatcacggacccacaaagggcctccagcgaagaccagcccaccgtgtctggcacgcactcgcgagcgggcgttcgcgggtgtggccggcagcaaatggagaaacccttggcagcgcccggacgccctccagtggcggctcctgagaaccggggacagttcaatccgggccacaaacttttttagaacaaatcattgtgggaagctgggaggagagagagagagaggaagtcggacgtgggcgaggggcggggtgtctggactggaacctctgggcccacatgccatggacaatattaccaggcagaaccaattctacgatacccaagtcatcaaacaagaaaacgagtcaggctacgagaggagaccactggaaatggagcagcagcaggcctatcgtccagaaatgaagacagagatgaagcaaggagcacccaccagcttcctcccgcctgaagcttctcaactcaagccagacaggcagcaattccagagtcgaaagaggccttatgaagaaaaccggggacgggggtactttgagcaccgagaggataggaggggccgctctcctcagcctcctgctgaagaggatgaagatgactttgatgatacccttgttgctattgacacctataactgcgacctccacttcaaggtggcccgagatcggagtagtggctatccgctcacaattgagggctttgcatacctgtggtcaggagcccgtgccagctatggggtcagaaggggccgtgtatgcttcgagatgaagatcaatgaggaaatctccgtgaagcaccttccgtctacagagcctgacccccacgtggtccgtatcggctggtccctggactcctgcagcacccagctaggcgaagagcctttctcctatggctatggaggcactgggaagaagtccaccaatagccggtttgaaaactacggagacaagtttgcagagaacgatgtgattggctgctttgcggattttgaatgtggaaatgacgtggaactgtcttttaccaagaatggaaagtggatgggcattgctttccgaatccagaaggaagccttggggggtcaggccctctatcctcatgtcctggtgaagaattgcgcagtggagttcaacttcggacagagagcagagccctactgttctgtcctcccggggtttaccttcatccagcaccttccccttagtgagcgtatccggggcaccgttggaccaaagagcaaggcagaatgtgagattctgatgatggtgggcctgcctgctgctggcaagaccacatgggccatcaaacatgcagcctccaacccttccaagaagtacaacatcctgggtaccaatgccatcatggataagatgcgggtgatgggcctacgccggcagcggaactatgctggccgctgggatgtcctgatccagcaggccacccagtgcctcaaccgcctcatccagattgctgcccgcaagaaacgcaactatatcctagatcagacaaatgtttatgggtcagcccagagacgaaaaatgagaccatttgaaggcttccagcgcaaagctattgtaatttgtcccactgacgaggacctaaaagaccgaacaataaagcgaaccgacgaggaagggaaggatgtcccagatcatgcggtcttagaaatgaaagccaacttcacgttgccagatgttggggacttcctggatgaggttctgttcattgagctgcagcgggaggaagcggacaagctagtgaggcagtacaacgaggaaggccgcaaggctgggccaccccctgaaaagcgctttgacaaccgaggtggtggtggcttccggggccgcgggggtggtggtggcttccagcgctatgaaaaccgaggaccccctggaggcaaccgtggcggcttccagaaccgagggggaggcagcggtggaggaggcaactaccgaggaggtttcaaccgcagcggaggtggtggctatagccagaaccgctggggtaacaacaaccgggataacaacaactccaacaacagaggcagctacaaccgggctccccagcaacagccgccaccacagcagcctccgccaccacagccaccaccccagcagccaccgccaccacccagctacagccctgctcggaaccccccaggggccagcacctacaataagaacagcaacatccctggctcaagcgccaataccagcacccccaccgtcagcagctacagccctccacagccgagttacagccagccaccctacaaccagggaggttacagccagggctacacagccccaccgcctccacctccaccaccacctgcctacaactatgggagctacggcggttacaacccggccccctataccccaccgccaccccccaccgcacagacctaccctcagcccagctataaccagtatcagcagtatgcccagcagtggaaccagtactatcagaaccagggccagtggccgccatactacgggaactacgactacgggagctactccgggaacacacagggtggcacaagtacacagtagccagtgtgacccagaggctcccggaggcccctgccggcttcctccaccagcgcctgcctcggcccctcctctgcccccgccagatcccgtggtgctggggatggggtcatcccagggctgcctccctccagcccactgcctcccctctgaggggcttccttcccctccatagggccaggcatttttttctggattcaaacaggcaacaatgaccttttattttctgtttgtccccacctccccagccttccacctcctgttcttcctaccttcttcctttttgactaaataatccccacctcccttgatcatacagtgaggctacagtgactgaggggagaatcccctcctgttcactctcccaaccctgctccagcccctcagcttcccagaccctcatgcagttggttgtaaattctcccaggagctgttttactgtctacttttcaggattaaaaaaaaaatcaaaacttaaaaaaaaaaaagtttaaaaagcaaaatggggagggggaggaagcagtgacttttttttggtaattatgcgcttttttttaatttttagaatttgtctttttactgtgggtgggctgttgatatttcatcaagataagcatttctttcctgagttcaggtgactgaggaagagccacaaaacaaaacacaacaaaaccaaaccacagaatcatctttaacccaactttttatacgatgccccagttccccataactttgcacacaagcttctgtgttcagttgaattgtaactgctttttgtatttggagagagtgactattgaacttgaaaccttttattccgggcgtcttggtagtttctggtgggattcagtgggtgagagggaagaaggggaggttggggggctccttcccttcagaacttgaagtttctcccactgcctcctctccagtggtctcccaggtgccagacccaaaagcttttcctacagtgataccctttatttttacttccccttgactcatatgttttaacatgattttaacaaactgcacttattaagaaatgtgtttgccctgttttgtttggtttcgttttgttttctttgaataaatgacatggcacctcctagcaggaaggaagcagggttgaaaccctgaagtgttactgcagttggccgttaattggggtgggggcctctttaaagggaaattatttactcattcattaaacaacttaactgaggga

SEQ ID NO: 365660 - DNA, 4152 bp, Homo sapiens
tccgctccggcctcggcttcgacgtaggccaacgcttcctccccagtagctcctaggccttctcgtggccgttgttttgaaaacggcgctctgattggctaggtttccgggcccgcgcccgttgccccacgcactgaccaattggcactcatgtaacatcggacgaggcacgagtgaggggggaggcggtggcggcggccattttgagccgctgccgccattggagtgggccccccccctttcccccttcgcctcctgacaggaaaggtttaagggggacagagccctgggaggccgggccgggctcgggggccaccccgggggcccgggccatggatgtgcgccgtctgaaggtgaacgaacttcgcgaggagctgcagcgccgcggcctggacactcgaggcctcaaggccgagcttgctgagcggctgcaggcggcgttggaggccgaggagcctgacgacgagcgggagctcgacgccgacgacgaaccggggcgacccgggcacatcaacgaggaggtcgagaccgaggggggctccgagctggaggggaccgcgcagccaccgccgcccgggctgcagccgcacgcggagcccggcggctactcggggccggacggacattatgccatggacaatattaccaggcagaaccaattctacgatacccaagtcatcaaacaagaaaacgagtcaggctacgagaggagaccactggaaatggagcagcagcaggcctatcgtccagaaatgaagacagagatgaagcaaggagcacccaccagcttcctcccgcctgaagcttctcaactcaagccagacaggcagcaattccagagtcgaaagaggccttatgaagaaaaccggggacgggggtactttgagcaccgagaggataggaggggccgctctcctcagcctcctgctgaagaggatgaagatgactttgatgatacccttgttgctattgacacctataactgcgacctccacttcaaggtggcccgagatcggagtagtggctatccgctcacaattgagggctttgcatacctgtggtcaggagcccgtgccagctatggggtcagaaggggccgtgtatgcttcgagatgaagatcaatgaggaaatctccgtgaagcaccttccgtctacagagcctgacccccacgtggtccgtatcggctggtccctggactcctgcagcacccagctaggcgaagagcctttctcctatggctatggaggcactgggaagaagtccaccaatagccggtttgaaaactacggagacaagtttgcagagaacgatgtgattggctgctttgcggattttgaatgtggaaatgacgtggaactgtcttttaccaagaatggaaagtggatgggcattgctttccgaatccagaaggaagccttggggggtcaggccctctatcctcatgtcctggtgaagaattgcgcagtggagttcaacttcggacagagagcagagccctactgttctgtcctcccggggtttaccttcatccagcaccttccccttagtgagcgtatccggggcaccgttggaccaaagagcaaggcagaatgtgagattctgatgatggtgggcctgcctgctgctggcaagaccacatgggccatcaaacatgcagcctccaacccttccaagaagtacaacatcctgggtaccaatgccatcatggataagatgcgggtgatgggcctacgccggcagcggaactatgctggccgctgggatgtcctgatccagcaggccacccagtgcctcaaccgcctcatccagattgctgcccgcaagaaacgcaactatatcctagatcagacaaatgtttatgggtcagcccagagacgaaaaatgagaccatttgaaggcttccagcgcaaagctattgtaatttgtcccactgacgaggacctaaaagaccgaacaataaagcgaaccgacgaggaagggaaggatgtcccagatcatgcggtcttagaaatgaaagccaacttcacgttgccagatgttggggacttcctggatgaggttctgttcattgagctgcagcgggaggaagcggacaagctagtgaggcagtacaacgaggaaggccgcaaggctgggccaccccctgaaaagcgctttgacaaccgaggtggtggtggcttccggggccgcgggggtggtggtggcttccagcgctatgaaaaccgaggaccccctggaggcaaccgtggcggcttccagaaccgagggggaggcagcggtggaggaggcaactaccgaggaggtttcaaccgcagcggaggtggtggctatagccagaaccgctggggtaacaacaaccgggataacaacaactccaacaacagaggcagctacaaccgggctccccagcaacagccgccaccacagcagcctccgccaccacagccaccaccccagcagccaccgccaccacccagctacagccctgctcggaaccccccaggggccagcacctacaataagaacagcaacatccctggctcaagcgccaataccagcacccccaccgtcagcagctacagccctccacagccgagttacagccagccaccctacaaccagggaggttacagccagggctacacagccccaccgcctccacctccaccaccacctgcctacaactatgggagctacggcggttacaacccggccccctataccccaccgccaccccccaccgcacagacctaccctcagcccagctataaccagtatcagcagtatgcccagcagtggaaccagtactatcagaaccagggccagtggccgccatactacgggaactacgactacgggagctactccgggaacacacagggtggcacaagtacacagtagccagtgtgacccagaggctcccggaggcccctgccggcttcctccaccagcgcctgcctcggcccctcctctgcccccgccagatcccgtggtgctggggatggggtcatcccagggctgcctccctccagcccactgcctcccctctgaggggcttccttcccctccatagggccaggcatttttttctggattcaaacaggcaacaatgaccttttattttctgtttgtccccacctccccagccttccacctcctgttcttcctaccttcttcctttttgactaaataatccccacctcccttgatcatacagtgaggctacagtgactgaggggagaatcccctcctgttcactctcccaaccctgctccagcccctcagcttcccagaccctcatgcagttggttgtaaattctcccaggagctgttttactgtctacttttcaggattaaaaaaaaaatcaaaacttaaaaaaaaaaaagtttaaaaagcaaaatggggagggggaggaagcagtgacttttttttggtaattatgcgcttttttttaatttttagaatttgtctttttactgtgggtgggctgttgatatttcatcaagataagcatttctttgaactcagggaaagaaatgcttatcttcctgagttcaggtgactgaggaagagccacaaaacaaaacacaacaaaaccaaaccacagaatcatctttaacccaactttttatacgatgccccagttccccataactttgcacacaagcttctgtgttcagttgaattgtaactgctttttgtatttggagagagtgactattgaacttgaaaccttttattccgggcgtcttggtagtttctggtgggattcagtgggtgagagggaagaaggggaggttggggggctccttcccttcagaacttgaagtttctcccactgcctcctctccagtggtctcccaggtgccagacccaaaagcttttcctacagtgataccctttatttttacttccccttgactcatatgttttaacatgattttaacaaactgcacttattaagaaatgtgtttgccctgttttgtttggtttcgttttgttttctttgaataaatgacatggcacctcctagcaggaaggaagcagggttgaaaccctgaagtgttactgcagttggccgttaattggggtgggggcctctttaaagggaaattatttactcattcattaaacaacttaactgaggga

SEQ ID NO: 365661 - DNA, 4066 bp, Homo sapiens
tccgctccggcctcggcttcgacgtaggccaacgcttcctccccagtagctcctaggccttctcgtggccgttgttttgaaaacggcgctctgattggctaggtttccgggcccgcgcccgttgccccacgcactgaccaattggcactcatgtaacatcggacgaggcacgagtgaggggggaggcggtggcggcggccattttgagccgctgccgccattggagtgggccccccccctttcccccttcgcctcctgacaggaaaggtttaagggggacagagccctgggaggccgggccgggctcgggggccaccccgggggcccgggccatggatgtgcgccgtctgaaggtgaacgaacttcgcgaggagctgcagcgccgcggcctggacactcgaggcctcaaggccgagcttgctgagcggctgcaggcggcgttggaggccgaggagcctgacgacgagcgggagctcgacgccgacgacgaaccggggcgacccgggcacatcaacgaggaggtcgagaccgaggggggctccgagctggaggggaccgcgcagccaccgccgcccgggctgcagccgcacgcggagcccggcggctactcggggccggacggacattatgccatggacaatattaccaggcagaaccaattctacgatacccaagtcatcaaacaagaaaacgagtcaggctacgagaggagaccactggaaatggagcagcagcaggcctatcgtccagaaatgaagacagagatgaagcaaggagcacccaccagcttcctcccgcctgaagcttctcaactcaagccagacaggcagcaattccagagtcgaaagaggccttatgaagaaaaccggggacgggggtactttgagcaccgagaggataggaggggccgctctcctcagcctcctgctgaagaggatgaagatgactttgatgatacccttgttgctattgacacctataactgcgacctccacttcaaggtggcccgagatcggagtagtggctatccgctcacaattgagggctttgcatacctgtggtcaggagcccgtgccagctatggggtcagaaggggccgtgtatgcttcgagatgaagatcaatgaggaaatctccgtgaagcaccttccgtctacagagcctgacccccacgtggtccgtatcggctggtccctggactcctgcagcacccagctaggcgaagagcctttctcctatggctatggaggcactgggaagaagtccaccaatagccggtttgaaaactacggagacaagtttgcagagaacgatgtgattggctgctttgcggattttgaatgtggaaatgacgtggaactgtcttttaccaagaatggaaagtggatgggcattgctttccgaatccagaaggaagccttggggggtcaggccctctatcctcatgtcctggtgaagaattgcgcagtggagttcaacttcggacagagagcagagccctactgttctgtcctcccggggtttaccttcatccagcaccttccccttagtgagcgtatccggggcaccgttggaccaaagagcaaggcagaatgtgagattctgatgatggtgggcctgcctgctgctggcaagaccacatgggccatcaaacatgcagcctccaacccttccaagaagtacaacatcctgggtaccaatgccatcatggataagatgcgggtgatgggcctacgccggcagcggaactatgctggccgctgggatgtcctgatccagcaggccacccagtgcctcaaccgcctcatccagattgctgcccgcaagaaacgcaactatatcctagatcagacaaatgtttatgggtcagcccagagacgaaaaatgagaccatttgaaggcttccagcgcaaagctattgtaatttgtcccactgacgaggacctaaaagaccgaacaataaagcgaaccgacgaggaagggaaggatgtcccagatcatgcggtcttagaaatgaaagccaacttcacgttgccagatgttggggacttcctggatgaggttctgttcattgagctgcagcgggaggaagcggacaagctagtgaggcagtacaacgaggaaggccgcaaggctgggccaccccctgaaaagcgctttgacaaccgaggtggtggtggcttccggggccgcgggggtggtggtggcttccagcgctatgaaaaccgaggaccccctggaggcaaccgtggcggcttccagaaccgagggggaggcagcggtggaggaggcaactaccgaggaggtttcaaccgcagcggaggtggtggctatagccagaaccgctggggtaacaacaaccgggataacaacaactccaacaacagaggcagctacaaccgggctccccagcaacagccgccaccacagcagcctccgccaccacagccaccaccccagcagccaccgccaccacccagctacagccctgctcggaaccccccaggggccagcacctacaataagaacagcaacatccctggctcaagcgccaataccagcacccccaccgtcagcagctacagccctccacagccgagttacagccagccaccctacaaccagggaggttacagccagggctacacagccccaccgcctccacctccaccaccacctgcctacaactatgggagctacggcggttacaacccggccccctataccccaccgccaccccccaccgcacagacctaccctcagcccagctataaccagtatcagcagtatgcccagcagtggaaccagtactatcagaaccagggccagtggccgccatactacgggaactacgactacgggagctactccgggaacacacagggtggcacaagtacacagtagccagtgtgacccagaggctcccggaggcccctgccggcttcctccaccagcgcctgcctcggcccctcctctgcccccgccagatcccgtggtgctggggatggggtcatcccagggctgcctccctccagcccactgcctcccctctgaggggcttccttcccctccatagggccaggcatttttttctggattcaaacaggcaacaatgaccttttattttctgtttgtccccacctccccagccttccacctcctgttcttcctaccttcttcctttttgactaaataatccccacctcccttgatcatacagtgaggctacagtgactgaggggagaatcccctcctgttcactctcccaaccctgctccagcccctcagcttcccagaccctcatgcagttggttgtaaattctcccaggagctgttttactgtctacttttcaggattaaaaaaaaaatcaaaacttaaaaaaaaaaaagtttaaaaagcaaaatggggagggggaggaagcagtgacttttttttggtaattatgcgcttttttttaatttttagaatttgtctttttactgtgggtgggctgttgatatttcatcaagataagcatttctttcctgagttcaggtgactgaggaagagccacaaaacaaaacccccataactttgcacacaagcttctgtgttcagttgaattgtaactgctttttgtatttggagagagtgactattgaacttgaaaccttttattccgggcgtcttggtagtttctggtgggattcagtgggtgagagggaagaaggggaggttggggggctccttcccttcagaacttgaagtttctcccactgcctcctctccagtggtctcccaggtgccagacccaaaagcttttcctacagtgataccctttatttttacttccccttgactcatatgttttaacatgattttaacaaactgcacttattaagaaatgtgtttgccctgttttgtttggtttcgttttgttttctttgaataaatgacatggcacctcctagcaggaaggaagcagggttgaaaccctgaagtgttactgcagttggccgttaattggggtgggggcctctttaaagggaaattatttactcattcattaaacaacttaactgaggga

SEQ ID NO: 365662 - DNA, 3347 bp, Homo sapiens
aaactataggctaggtacgaggctgggtgttaatcggccgaggcacaggcagcaattccagagtcgaaagaggccttatgaagaaaaccggggacgggggtactttgagcaccgagaggataggaggggccgctctcctcagcctcctgctgaagaggatgaagatgactttgatgatacccttgttgctattgacacctataactgcgacctccacttcaaggtggcccgagatcggagtagtggctatccgctcacaattgagggctttgcatacctgtggtcaggagcccgtgccagctatggggtcagaaggggccgtgtatgcttcgagatgaagatcaatgaggaaatctccgtgaagcaccttccgtctacagagcctgacccccacgtggtccgtatcggctggtccctggactcctgcagcacccagctaggcgaagagcctttctcctatggctatggaggcactgggaagaagtccaccaatagccggtttgaaaactacggagacaagtttgcagagaacgatgtgattggctgctttgcggattttgaatgtggaaatgacgtggaactgtcttttaccaagaatggaaagtggatgggcattgctttccgaatccagaaggaagccttggggggtcaggccctctatcctcatgtcctggtgaagaattgcgcagtggagttcaacttcggacagagagcagagccctactgttctgtcctcccggggtttaccttcatccagcaccttccccttagtgagcgtatccggggcaccgttggaccaaagagcaaggcagaatgtgagattctgatgatggtgggcctgcctgctgctggcaagaccacatgggccatcaaacatgcagcctccaacccttccaagaagtacaacatcctgggtaccaatgccatcatggataagatgcgggtgatgggcctacgccggcagcggaactatgctggccgctgggatgtcctgatccagcaggccacccagtgcctcaaccgcctcatccagattgctgcccgcaagaaacgcaactatatcctagatcagacaaatgtttatgggtcagcccagagacgaaaaatgagaccatttgaaggcttccagcgcaaagctattgtaatttgtcccactgacgaggacctaaaagaccgaacaataaagcgaaccgacgaggaagggaaggatgtcccagatcatgcggtcttagaaatgaaagccaacttcacgttgccagatgttggggacttcctggatgaggttctgttcattgagctgcagcgggaggaagcggacaagctagtgaggcagtacaacgaggaaggccgcaaggctgggccaccccctgaaaagcgctttgacaaccgaggtggtggtggcttccggggccgcgggggtggtggtggcttccagcgctatgaaaaccgaggaccccctggaggcaaccgtggcggcttccagaaccgagggggaggcagcggtggaggaggcaactaccgaggaggtttcaaccgcagcggaggtggtggctatagccagaaccgctggggtaacaacaaccgggataacaacaactccaacaacagaggcagctacaaccgggctccccagcaacagccgccaccacagcagcctccgccaccacagccaccaccccagcagccaccgccaccacccagctacagccctgctcggaaccccccaggggccagcacctacaataagaacagcaacatccctggctcaagcgccaataccagcacccccaccgtcagcagctacagccctccacagccgagttacagccagccaccctacaaccagggaggttacagccagggctacacagccccaccgcctccacctccaccaccacctgcctacaactatgggagctacggcggttacaacccggccccctataccccaccgccaccccccaccgcacagacctaccctcagcccagctataaccagtatcagcagtatgcccagcagtggaaccagtactatcagaaccagggccagtggccgccatactacgggaactacgactacgggagctactccgggaacacacagggtggcacaagtacacagtagccagtgtgacccagaggctcccggaggcccctgccggcttcctccaccagcgcctgcctcggcccctcctctgcccccgccagatcccgtggtgctggggatggggtcatcccagggctgcctccctccagcccactgcctcccctctgaggggcttccttcccctccatagggccaggcatttttttctggattcaaacaggcaacaatgaccttttattttctgtttgtccccacctccccagccttccacctcctgttcttcctaccttcttcctttttgactaaataatccccacctcccttgatcatacagtgaggctacagtgactgaggggagaatcccctcctgttcactctcccaaccctgctccagcccctcagcttcccagaccctcatgcagttggttgtaaattctcccaggagctgttttactgtctacttttcaggattaaaaaaaaaatcaaaacttaaaaaaaaaaaagtttaaaaagcaaaatggggagggggaggaagcagtgacttttttttggtaattatgcgcttttttttaatttttagaatttgtctttttactgtgggtgggctgttgatatttcatcaagataagcatttctttcctgagttcaggtgactgaggaagagccacaaaacaaaacacaacaaaaccaaaccacagaatcatctttaacccaactttttatacgatgccccagttccccataactttgcacacaagcttctgtgttcagttgaattgtaactgctttttgtatttggagagagtgactattgaacttgaaaccttttattccgggcgtcttggtagtttctggtgggattcagtgggtgagagggaagaaggggaggttggggggctccttcccttcagaacttgaagtttctcccactgcctcctctccagtggtctcccaggtgccagacccaaaagcttttcctacagtgataccctttatttttacttccccttgactcatatgttttaacatgattttaacaaactgcacttattaagaaatgtgtttgccctgttttgtttggtttcgttttgttttctttgaataaatgacatggcacctcctagcaggaaggaagcagggttgaaaccctgaagtgttactgcagttggccgttaattggggtgggggcctctttaaagggaaattatttactcattcattaaacaacttaactgaggga

SEQ ID NO: 365663 - DNA, 3519 bp, Homo sapiens
tccgctccggcctcggcttcgacgtaggccaacgcttcctccccagtagctcctaggccttctcgtggccgttgttttgaaaacggcgctctgattggctaggtttccgggcccgcgcccgttgccccacgcactgaccaattggcactcatgtaacatcggacgaggcacgagtgaggggggaggcggtggcggcggccattttgagccgctgccgccattggagtgggccccccccctttcccccttcgcctcctgacaggaaaggtttaagggggacagagccctgggaggccgggccgggctcgggggccaccccgggggcccgggccatggatgtgcgccgtctgaaggtgaacgaacttcgcgaggagctgcagcgccgcggcctggacactcgaggcctcaaggccgagcttgctgagcggctgcaggcggcgttggaggccgaggagcctgacgacgagcgggagctcgacgccgacgacgaaccggggcgacccgggcacatcaacgaggaggtcgagaccgaggggggctccgagctggaggggaccgcgcagccaccgccgcccgggctgcagccgcacgcggagcccggcggctactcggggccggacggacattatgccatggacaatattaccaggcagaaccaattctacgatacccaagtcatcaaacaagaaaacgagtcaggctacgagaggagaccactggaaatggagcagcagcaggcctatcgtccagaaatgaagacagagatgaagcaaggagcacccaccagcttcctcccgcctgaagcttctcaactcaagccagacaggcagcaattccagagtcgaaagaggccttatgaagaaaaccggggacgggggtactttgagcaccgagaggataggaggggccgctctcctcagcctcctgctgaagaggatgaagatgactttgatgatacccttgttgctattgacacctataactgcgacctccacttcaaggtggcccgagatcggagtagtggctatccgctcacaattgagggctttgcatacctgtggtcaggagcccgtgccagctatggggtcagaaggggccgtgtatgcttcgagatgaagatcaatgaggaaatctccgtgaagcaccttccgtctacagagcctgacccccacgtggtccgtatcggctggtccctggactcctgcagcacccagctaggcgaagagcctttctcctatggctatggaggcactgggaagaagtccaccaatagccggtttgaaaactacggagacaagtttgcagagaacgatgtgattggctgctttgcggattttgaatgtggaaatgacgtggaactgtcttttaccaagaatggaaagtggatgggcattgctttccgaatccagaaggaagccttggggggtcaggccctctatcctcatgtcctggtgaagaattgcgcagtggagttcaacttcggacagagagcagagccctactgttctgtcctcccggggtttaccttcatccagcaccttccccttagtgagcgtatccggggcaccgttggaccaaagagcaaggcagaatgtgagattctgatgatggtgggcctgcctgctgctggcaagaccacatgggccatcaaacatgcagcctccaacccttccaagaagtacaacatcctgggtaccaatgccatcatggataagatgcgggtgatgggcctacgccggcagcggaactatgctggccgctgggatgtcctgatccagcaggccacccagtgcctcaaccgcctcatccagattgctgcccgcaagaaacgcaactatatcctagatcagacaaatgtttatgggtcagcccagagacgaaaaatgagaccatttgaaggcttccagcgcaaagctattgtaatttgtcccactgacgaggacctaaaagaccgaacaataaagcgaaccgacgaggaagggaaggatgtcccagatcatgcggtcttagaaatgaaagccaacttcacgttgccagatgttggggacttcctggatgaggttctgttcattgagctgcagcgggaggaagcggacaagctagtgaggcagtacaacgaggaaggccgcaaggctgggccaccccctgaaaagcgctttgacaaccgaggtggtggtggcttccggggccgcgggggtggtggtggcttccagcgctatgaaaaccgaggaccccctggaggcaaccgtggcggcttccagaaccgagggggaggcagcggtggaggaggcaactaccgaggaggtttcaaccgcagcggaggtggtggctatagccagaaccgctggggtaacaacaaccgggataacaacaactccaacaacagaggcagctacaaccgggctccccagcaacagccgccaccacagcagcctccgccaccacagccaccaccccagcagccaccgccaccacccagctacagccctgctcggaaccccccaggggccagcacctacaataagaacagcaacatccctggctcaagcgccaataccagcacccccaccgtcagcagctacagccctccacagccgagttacagccagccaccctacaaccagggaggttacagccagggctacacagccccaccgcctccacctccaccaccacctgcctacaactatgggagctacggcggttacaacccggccccctataccccaccgccaccccccaccgcacagacctaccctcagcccagctataaccagtatcagcagtatgcccagcagtggaaccagtactatcagaaccagggccagtggccgccatactacgggaactacgactacgggagctactccgggaacacacagggtggcacaagtacacagtagccagtgtgacccagaggctcccggaggcccctgccggcttcctccaccagcgcctgcctcggcccctcctctgcccccgccagatcccgtggtgctggggatggggtcatcccagggctgcctccctccagcccactgcctcccctctgaggggcttccttcccctccatagggccaggcatttttttctggattcaaacaggcaacaatgaccttttattttctgtttgtccccacctccccagccttccacctcctgttcttcctaccttcttcctttttgactaaataatccccacctcccttgatcatacagtgaggctacagtgactgaggggagaatcccctcctgttcactctcccaaccctgctccagcccctcagcttcccagaccctcatgcagttggttgtaaattctcccaggagctgttttactgtctacttttcaggattaaaaaaaaaatcaaaacttaaaaaaaaaaaaaaaaaaaaaaactcgaggggggcccgacccaatcccccttaagagtcgtttcccatcactggccgcggtttaaacccctgacgggaaaccctggcttccccaataaatgccttggaaacatccccttttcc

SEQ ID NO: 365664 - DNA, 3475 bp, Homo sapiens
agcactagactaacttcaaattaaaccacccctgcagcaaaactcaattcttggctgcagacactgcccatcccagcttctacttgctggtattaatggctcaacacccccaagggaacatttatgggtctcctcccctggccctacctaggatcccatcccccaactcacgtgccatggctggggggatgttgcaggtcctgacctgagaagatggggtgaagtagtgggtgaaggtgaagtgcagtggcagctgctgcagcaggccgtggagcaagtagggtggggtagagggcagcatgtgggacagggtgaaaggtgaagggcccaggatggatggctgaggcgggaatgatgtggatgggatggctagcgagaaaggtggcagggtggccagggatgattgagtgagtgaggtgggacaaagaaataggggtcagatggggccgtgtatgcttcgagatgaagatcaatgaggaaatctccgtgaagcaccttccgtctacagagcctgacccccacgtggtccgtatcggctggtccctggactcctgcagcacccagctaggcgaagagcctttctcctatggctatggaggcactgggaagaagtccaccaatagccggtttgaaaactacggagacaagtttgcagagaacgatgtgattggctgctttgcggattttgaatgtggaaatgacgtggaactgtcttttaccaagaatggaaagtggatgggcattgctttccgaatccagaaggaagccttggggggtcaggccctctatcctcatgtcctggtgaagaattgcgcagtggagttcaacttcggacagagagcagagccctactgttctgtcctcccggggtttaccttcatccagcaccttccccttagtgagcgtatccggggcaccgttggaccaaagagcaaggcagaatgtgagattctgatgatggtgggcctgcctgctgctggcaagaccacatgggccatcaaacatgcagcctccaacccttccaagaagtacaacatcctgggtaccaatgccatcatggataagatgcgggtgatgggcctacgccggcagcggaactatgctggccgctgggatgtcctgatccagcaggccacccagtgcctcaaccgcctcatccagattgctgcccgcaagaaacgcaactatatcctagatcagacaaatgtttatgggtcagcccagagacgaaaaatgagaccatttgaaggcttccagcgcaaagctattgtaatttgtcccactgacgaggacctaaaagaccgaacaataaagcgaaccgacgaggaagggaaggatgtcccagatcatgcggtcttagaaatgaaagccaacttcacgttgccagatgttggggacttcctggatgaggttctgttcattgagctgcagcgggaggaagcggacaagctagtgaggcagtacaacgaggaaggccgcaaggctgggccaccccctgaaaagcgctttgacaaccgaggtggtggtggcttccggggccgcgggggtggtggtggcttccagcgctatgaaaaccgaggaccccctggaggcaaccgtggcggcttccagaaccgagggggaggcagcggtggaggaggcaactaccgaggaggtttcaaccgcagcggaggtggtggctatagccagaaccgctggggtaacaacaaccgggataacaacaactccaacaacagaggcagctacaaccgggctccccagcaacagccgccaccacagcagcctccgccaccacagccaccaccccagcagccaccgccaccacccagctacagccctgctcggaaccccccaggggccagcacctacaataagaacagcaacatccctggctcaagcgccaataccagcacccccaccgtcagcagctacagccctccacagccgagttacagccagccaccctacaaccagggaggttacagccagggctacacagccccaccgcctccacctccaccaccacctgcctacaactatgggagctacggcggttacaacccggccccctataccccaccgccaccccccaccgcacagacctaccctcagcccagctataaccagtatcagcagtatgcccagcagtggaaccagtactatcagaaccagggccagtggccgccatactacgggaactacgactacgggagctactccgggaacacacagggtggcacaagtacacagtagccagtgtgacccagaggctcccggaggcccctgccggcttcctccaccagcgcctgcctcggcccctcctctgcccccgccagatcccgtggtgctggggatggggtcatcccagggctgcctccctccagcccactgcctcccctctgaggggcttccttcccctccatagggccaggcatttttttctggattcaaacaggcaacaatgaccttttattttctgtttgtccccacctccccagccttccacctcctgttcttcctaccttcttcctttttgactaaataatccccacctcccttgatcatacagtgaggctacagtgactgaggggagaatcccctcctgttcactctcccaaccctgctccagcccctcagcttcccagaccctcatgcagttggttgtaaattctcccaggagctgttttactgtctacttttcaggattaaaaaaaaaatcaaaacttaaaaaaaaaaaagtttaaaaagcaaaatggggagggggaggaagcagtgacttttttttggtaattatgcgcttttttttaatttttagaatttgtctttttactgtgggtgggctgttgatatttcatcaagataagcatttctttcctgagttcaggtgactgaggaagagccacaaaacaaaacacaacaaaaccaaaccacagaatcatctttaacccaactttttatacgatgccccagttccccataactttgcacacaagcttctgtgttcagttgaattgtaactgctttttgtatttggagagagtgactattgaacttgaaaccttttattccgggcgtcttggtagtttctggtgggattcagtgggtgagagggaagaaggggaggttggggggctccttcccttcagaacttgaagtttctcccactgcctcctctccagtggtctcccaggtgccagacccaaaagcttttcctacagtgataccctttatttttacttccccttgactcatatgttttaacatgattttaacaaactgcacttattaagaaatgtgtttgccctgttttgtttggtttcgttttgttttctttgaataaatgacatggcacctcctagcaggaaggaagcagggttgaaaccctgaagtgttactgcagttggccgttaattggggtgggggcctctttaaagggaaattatttactcattcattaaacaacttaactgaggga

SEQ ID NO: 365665 - DNA, 3970 bp, Homo sapiens
tccgctccggcctcggcttcgacgtaggccaacgcttcctccccagtagctcctaggccttctcgtggccgttgttttgaaaacggcgctctgattggctaggtttccgggcccgcgcccgttgccccacgcactgaccaattggcactcatgtaacatcggacgaggcacgagtgaggggggaggcggtggcggcggccattttgagccgctgccgccattggagtgggccccccccctttcccccttcgcctcctgacaggaaaggtttaagggggacagagccctgggaggccgggccgggctcgggggccaccccgggggcccgggccatggatgtgcgccgtctgaaggtgaacgaacttcgcgaggagctgcagcgccgcggcctggacactcgaggcctcaaggccgagcttgctgagcggctgcaggcggcgttggaggccgaggagcctgacgacgagcgggagctcgacgccgacgacgaaccggggcgacccgggcacatcaacgaggaggtcgagaccgaggggggctccgagctggaggggaccgcgcagccaccgccgcccgggctgcagccgcacgcggagcccggcggctactcggggccggacggacattatgccatggacaatattaccaggcagaaccaattctacgatacccaagtcatcaaacaagaaaacgagtcaggctacgagaggagaccactggaaatggagcagcagcaggcctatcgtccagaaatgaagacagagatgaagcaaggagcacccaccagcttcctcccgcctgaagcttctcaactcaagccagacaggcagcaattccagagtcgaaagaggccttatgaagaaaaccggggacgggggtactttgagcaccgagaggataggaggggccgctctcctcagcctcctgctgaagaggatgaagatgactttgatgatacccttgttgctattgacacctataactgcgacctccacttcaaggtggcccgagatcggagtagtggctatccgctcacaattgagggctttgcatacctgtggtcaggagcccgtgccagctatggggtcagaaggggccgtgtatgcttcgagatgaagatcaatgaggaaatctccgtgaagcaccttccgtctacagagcctgacccccacgtggtccgtatcggctggtccctggactcctgcagcacccagctaggcgaagagcctttctcctatggctatggaggcactgggaagaagtccaccaatagccggtttgaaaactacggagacaagtttgcagagaacgatgtgattggctgctttgcggattttgaatgtggaaatgacgtggaactgtcttttaccaagaatggaaagtggatgggcattgctttccgaatccagaaggaagccttggggggtcaggccctctatcctcatgtcctggtgaagaattgcgcagtggagttcaacttcggacagagagcagagccctactgttctgtcctcccggggtttaccttcatccagcaccttccccttagtgagcgtatccggggcaccgttggaccaaagagcaaggcagaatgtgagattctgatgatggtgggcctgcctgctgctggcaagaccacatgggccatcaaacatgcagcctccaacccttccaagaagtacaacatcctgggtaccaatgccatcatggataagatgcgggtgatgggcctacgccggcagcggaactatgctggccgctgggatgtcctgatccagcaggccacccagtgcctcaaccgcctcatccagattgctgcccgcaagaaacgcaactatatcctagatcagacaaatgtttatgggtcagcccagagacgaaaaatgagaccatttgaaggcttccagcgcaaagctattgtaatttgtcccactgacgaggacctaaaagaccgaacaataaagcgaaccgacgaggaagggaaggatgtcccagatcatgcggtcttagaaatgaaagccaacttcacgttgccagatgttggggacttcctggatgaggttctgttcattgagctgcagcgggaggaagcggacaagctagtgaggcagtacaacgaggaaggccgcaaggctgggccaccccctgaaaagcgctttgacaaccgaggtggtggtggcttccggggccgcgggggtggtggtggcttccagcgctatgaaaaccgaggaccccctggaggcaaccgtggcggcttccagaaccgagggggaggcagcggtggaggaggcaactaccgaggaggtttcaaccgcagcggaggtggtggctatagccagaaccgctggggtaacaacaaccgggataacaacaactccaacaacagaggcagctacaaccgggctccccagcaacagccgccaccacagcagcctccgcccgagttacagccagccaccctacaaccagggaggttacagccagggctacacagccccaccgcctccacctccaccaccacctgcctacaactatgggagctacggcggttacaacccggccccctataccccaccgccaccccccaccgcacagacctaccctcagcccagctataaccagtatcagcagtatgcccagcagtggaaccagtactatcagaaccagggccagtggccgccatactacgggaactacgactacgggagctactccgggaacacacagggtggcacaagtacacagtagccagtgtgacccagaggctcccggaggcccctgccggcttcctccaccagcgcctgcctcggcccctcctctgcccccgccagatcccgtggtgctggggatggggtcatcccagggctgcctccctccagcccactgcctcccctctgaggggcttccttcccctccatagggccaggcatttttttctggattcaaacaggcaacaatgaccttttattttctgtttgtccccacctccccagccttccacctcctgttcttcctaccttcttcctttttgactaaataatccccacctcccttgatcatacagtgaggctacagtgactgaggggagaatcccctcctgttcactctcccaaccctgctccagcccctcagcttcccagaccctcatgcagttggttgtaaattctcccaggagctgttttactgtctacttttcaggattaaaaaaaaaatcaaaacttaaaaaaaaaaaagtttaaaaagcaaaatggggagggggaggaagcagtgacttttttttggtaattatgcgcttttttttaatttttagaatttgtctttttactgtgggtgggctgttgatatttcatcaagataagcatttctttcctgagttcaggtgactgaggaagagccacaaaacaaaacacaacaaaaccaaaccacagaatcatctttaacccaactttttatacgatgccccagttccccataactttgcacacaagcttctgtgttcagttgaattgtaactgctttttgtatttggagagagtgactattgaacttgaaaccttttattccgggcgtcttggtagtttctggtgggattcagtgggtgagagggaagaaggggaggttggggggctccttcccttcagaacttgaagtttctcccactgcctcctctccagtggtctcccaggtgccagacccaaaagcttttcctacagtgataccctttatttttacttccccttgactcatatgttttaacatgattttaacaaactgcacttattaagaaatgtgtttgccctgttttgtttggtttcgttttgttttctttgaataaatgacatggcacctcctagcaggaaggaagcagggttgaaaccctgaagtgttactgcagttggccgttaattggggtgggggcctctttaaagggaaattatttactcattcattaaacaacttaactgaggga

SEQ ID NO: 365666 - DNA, 3844 bp, Homo sapiens
caggtactcacaaccccgaacgttcagactgacatagaaacacaggcacagaacacctccgatcatcacggacccacaaagggcctccagcgaagaccagcccaccgtgtctggcacgcactcgcgagcgggcgttcgcgggtgtggccggcagcaaatggagaaacccttggcagcgcccggacgccctccagtggcggctcctgagaaccggggacagttcaatccgggccacaaacttttttagaacaaatcattgtgggaagctgggaggagagagagagagaggaagtcggacgtgggcgaggggcggggtgtctggactggaacctctgggcccacatgccatggacaatattaccaggcagaaccaattctacgatacccaagtcatcaaacaagaaaacgagtcaggctacgagaggagaccactggaaatggagcagcagcaggcctatcgtccagaaatgaagacagagatgaagcaaggagcacccaccagcttcctcccgcctgaagcttctcaactcaagccagacaggcagcaattccagagtcgaaagaggccttatgaagaaaaccggggacgggggtactttgagcaccgagaggataggaggggccgctctcctcagcctcctgctgaagaggatgaagatgactttgatgatacccttgttgctattgacacctataactgcgacctccacttcaaggtggcccgagatcggagtagtggctatccgctcacaattgagggctttgcatacctgtggtcaggagcccgtgccagctatggggtcagaaggggccgtgtatgcttcgagatgaagatcaatgaggaaatctccgtgaagcaccttccgtctacagagcctgacccccacgtggtccgtatcggctggtccctggactcctgcagcacccagctaggcgaagagcctttctcctatggctatggaggcactgggaagaagtccaccaatagccggtttgaaaactacggagacaagtttgcagagaacgatgtgattggctgctttgcggattttgaatgtggaaatgacgtggaactgtcttttaccaagaatggaaagtggatgggcattgctttccgaatccagaaggaagccttggggggtcaggccctctatcctcatgtcctggtgaagaattgcgcagtggagttcaacttcggacagagagcagagccctactgttctgtcctcccggggtttaccttcatccagcaccttccccttagtgagcgtatccggggcaccgttggaccaaagagcaaggcagaatgtgagattctgatgatggtgggcctgcctgctgctggcaagaccacatgggccatcaaacatgcagcctccaacccttccaagaagtacaacatcctgggtaccaatgccatcatggataagatgcgggtgatgggcctacgccggcagcggaactatgctggccgctgggatgtcctgatccagcaggccacccagtgcctcaaccgcctcatccagattgctgcccgcaagaaacgcaactatatcctagatcagacaaatgtttatgggtcagcccagagacgaaaaatgagaccatttgaaggcttccagcgcaaagctattgtaatttgtcccactgacgaggacctaaaagaccgaacaataaagcgaaccgacgaggaagggaaggatgtcccagatcatgcggtcttagaaatgaaagaaagccaacttcacgttgccagatgttggggacttcctggatgaggttctgttcattgagctgcagcgggaggaagcggacaagctagtgaggcagtacaacgaggaaggccgcaaggctgggccaccccctgaaaagcgctttgacaaccgaggtggtggtggcttccggggccgcgggggtggtggtggcttccagcgctatgaaaaccgaggaccccctggaggcaaccgtggcggcttccagaaccgagggggaggcagcggtggaggaggcaactaccgaggaggtttcaaccgcagcggaggtggtggctatagccagaaccgctggggtaacaacaaccgggataacaacaactccaacaacagaggcagctacaaccgggctccccagcaacagccgccaccacagcagcctccgccaccacagccaccaccccagcagccaccgccaccacccagctacagccctgctcggaaccccccaggggccagcacctacaataagaacagcaacatccctggctcaagcgccaataccagcacccccaccgtcagcagctacagccctccacagccgagttacagccagccaccctacaaccagggaggttacagccagggctacacagccccaccgcctccacctccaccaccacctgcctacaactatgggagctacggcggttacaacccggccccctataccccaccgccaccccccaccgcacagacctaccctcagcccagctataaccagtatcagcagtatgcccagcagtggaaccagtactatcagaaccagggccagtggccgccatactacgggaactacgactacgggagctactccgggaacacacagggtggcacaagtacacagtagccagtgtgacccagaggctcccggaggcccctgccggcttcctccaccagcgcctgcctcggcccctcctctgcccccgccagatcccgtggtgctggggatggggtcatcccagggctgcctccctccagcccactgcctcccctctgaggggcttccttcccctccatagggccaggcatttttttctggattcaaacaggcaacaatgaccttttattttctgtttgtccccacctccccagccttccacctcctgttcttcctaccttcttcctttttgactaaataatccccacctcccttgatcatacagtgaggctacagtgactgaggggagaatcccctcctgttcactctcccaaccctgctccagcccctcagcttcccagaccctcatgcagttggttgtaaattctcccaggagctgttttactgtctacttttcaggattaaaaaaaaaatcaaaacttaaaaaaaaaaaagtttaaaaagcaaaatggggagggggaggaagcagtgacttttttttggtaattatgcgcttttttttaatttttagaatttgtctttttactgtgggtgggctgttgatatttcatcaagataagcatttctttcctgagttcaggtgactgaggaagagccacaaaacaaaacacaacaaaaccaaaccacagaatcatctttaacccaactttttatacgatgccccagttccccataactttgcacacaagcttctgtgttcagttgaattgtaactgctttttgtatttggagagagtgactattgaacttgaaaccttttattccgggcgtcttggtagtttctggtgggattcagtgggtgagagggaagaaggggaggttggggggctccttcccttcagaacttgaagtttctcccactgcctcctctccagtggtctcccaggtgccagacccaaaagcttttcctacagtgataccctttatttttacttccccttgactcatatgttttaacatgattttaacaaactgcacttattaagaaatgtgtttgccctgttttgtttggtttcgttttgttttctttgaataaatgacatggcacctcctagcaggaaggaagcagggttgaaaccctgaagtgttactgcagttggccgttaattggggtgggggcctctttaaagggaaattatttactcattcattaaacaacttaactgaggga

SEQ ID NO: 365667 - DNA, 3528 bp, Homo sapiens
tccgctccggcctcggcttcgacgtaggccaacgcttcctccccagtagctcctaggccttctcgtggccgttgttttgaaaacggcgctctgattggctaggtttccgggcccgcgcccgttgccccacgcactgaccaattggcactcatgtaacatcggacgaggcacgagtgaggggggaggcggtggcggcggccattttgagccgctgccgccattggagtgggccccccccctttcccccttcgcctcctgacaggaaaggtttaagggggacagagccctgggaggccgggccgggctcgggggccaccccgggggcccgggccatggatgtgcgccgtctgaaggtgaacgaacttcgcgaggagctgcagcgccgcggcctggacactcgaggcctcaaggccgagcttgctgagcggctgcaggcggcgttggaggccgaggagcctgacgacgagcgggagctcgacgccgacgacgaaccggggcgacccgggcacatcaacgaggaggtcgagaccgaggggggctccgagctggaggggaccgcgcagccaccgccgcccgggctgcagccgcacgcggagcccggcggctactcggggccggacggacattatgccatggacaatattaccaggcagaaccaattctacgatacccaagtcatcaaacaagaaaacgagtcaggctacgagaggagaccactggaaatggagcagcagcaggcctatcgtccagaaatgaagacagagatgaagcaaggagcacccaccagcttcctcccgcctgaagcttctcaactcaagccagacaggcagcaattccagagtcgaaagaggccttatgaagaaaaccggggacgggggtactttgagcaccgagaggataggaggggccgctctcctcagcctcctgctgaagaggatgaagatgactttgatgatacccttgttgctattgacacctataactgcgacctccacttcaaggtggcccgagatcggagtagtggctatccgctcacaattgagggctttgcatacctgtggtcaggagcccgtgccagctatggggtcagaaggggccgtgtatgcttcgagatgaagatcaatgaggaaatctccgtgaagcaccttccgtctacagagcctgacccccacgtggtccgtatcggctggtccctggactcctgcagcacccagctaggcgaagagcctttctcctatggctatggaggcactgggaagaagtccaccaatagccggtttgaaaactacggagacaagtttgcagagaacgatgtgattggctgctttgcggattttgaatgtggaaatgacgtggaactgtcttttaccaagaatggaaagtggatgggcattgctttccgaatccagaaggaagccttggggggtcaggccctctatcctcatgtcctggtgaagaattgcgcagtggagttcaacttcggacagagagcagagccctactgttctgtcctcccggggtttaccttcatccagcaccttccccttagtgagcgtatccggggcaccgttggaccaaagagcaaggcagaatgtgagattctgatgatggtgggcctgcctgctgctggcaagaccacatgggccatcaaacatgcagcctccaacccttccaagaagtacaacatcctgggtaccaatgccatcatggataagatgcgggtgatgggcctacgccggcagcggaactatgctggccgctgggatgtcctgatccagcaggccacccagtgcctcaaccgcctcatccagattgctgcccgcaagaaacgcaactatatcctagatcagacaaatgtttatgggtcagcccagagacgaaaaatgagaccatttgaaggcttccagcgcaaagctattgtaatttgtcccactgacgaggacctaaaagaccgaacaataaagcgaaccgacgaggaagggaaggatgtcccagatcatgcggtcttagaaatgaaagccaacttcacgttgccagatgttggggacttcctggatgaggttctgttcattgagctgcagcgggaggaagcggacaagctagtgaggcagtacaacgaggaaggccgcaaggctgggccaccccctgaaaagcgctttgacaaccgaggtggtggtggcttccggggccgcgggggtggtggtggcttccagcgctatgaaaaccgaggaccccctggaggcaaccgtggcggcttccagaaccgagggggaggcagcggtggaggaggcaactaccgaggaggtttcaaccgcagcggaggtggtggctatagccagaaccgctggggtaacaacaaccgggataacaacaactccaacaacagaggcagctacaaccgggctccccagcaacagccgccaccacagcagcctccgccaccacagccaccaccccagcagccaccgccaccacccagctacagccctgctcggaaccccccaggggccagcacctacaataagaacagcaacatccctggctcaagcgccaataccagcacccccaccgtcagcagctacagccctccacagccgagttacagccagccaccctacaaccagggaggttacagccagggctacacagccccaccgcctccacctccaccaccacctgcctacaactatgggagctacggcggttacaacccggccccctatacccacaaagaacaaacaaaagaaaagaatactaagacagcttcaactccttgtagttcactacaattctttcatattttgacataaaataaattcagacaccttcccattgcattcatacacgatgacggcataacaggtgcgtgaaggggaggagtcaggtcaagtgtgtaatacttcacaaaacaatgttcaaggcaaaatcagattacacaaagaaaacagaactgagatggatttgtagattatccatggagctgttttactgtctacttttcaggattaaaaaaaaaatcaaaacttaaaaaaaaaaaagtttaaaaagcaaaatggggagggggaggaagcagtgacttttttttggtaattatgcgcttttttttaatttttagaatttgtctttttactgtgggtgggctgttgatatttcatcaagataagcatttctttcctgagttcaggtgactgaggaagagccacaaaacaaaacacaacaaaaccaaaccacagaatcatctttaacccaactttttatacgatgccccagttccccataactttgcacacaagcttctgtgttcagttgaattgtaactgctttttgtatttggagagagtgactattgaacttgaaaccttttattccgggcgtcttggtagtttctggtgggattcagtgggtgagagggaagaaggggaggttgtcttatagggttatttaccctgaattcctttttaatatctttattgctacttgttaaccctgcctggggcccataccctttgtaatatcctagtttttccc

SEQ ID NO: 365668 - DNA, 2797 bp, Homo sapiens
tccgctccggcctcggcttcgacgtaggccaacgcttcctccccagtagctcctaggccttctcgtggccgttgttttgaaaacggcgctctgattggctaggtttccgggcccgcgcccgttgccccacgcactgaccaattggcactcatgtaacatcggacgaggcacgagtgaggggggaggcggtggcggcggccattttgagccgctgccgccattggagtgggccccccccctttcccccttcgcctcctgacaggaaaggtttaagggggacagagccctgggaggccgggccgggctcgggggccaccccgggggcccgggccatggatgtgcgccgtctgaaggtgaacgaacttcgcgaggagctgcagcgccgcggcctggacactcgaggcctcaaggccgagcttgctgagcggctgcaggcggcgttggaggccgaggagcctgacgacgagcgggagctcgacgccgacgacgaaccggggcgacccgggcacatcaacgaggaggtcgagaccgaggggggctccgagctggaggggaccgcgcagccaccgccgcccgggctgcagccgcacgcggagcccggcggctactcggggccggacggacattatgccatggacaatattaccaggcagaaccaattctacgatacccaagtcatcaaacaagaaaacgagtcaggctacgagaggagaccactggaaatggagcagcagcaggcctatcgtccagaaatgaagacagagatgaagcaaggagcacccaccagcttcctcccgcctgaagcttctcaactcaagccagacaggcagcaattccagagtcgaaagaggccttatgaagaaaaccggggacgggggtactttgagcaccgagaggataggaggggccgctctcctcagcctcctgctgaagaggatgaagatgactttgatgatacccttgttgctattgacacctataactgcgacctccacttcaaggtggcccgagatcggagtagtggctatccgctcacaattgagggctttgcatacctgtggtcaggagcccgtgccagctatggggtcagaaggggccgtgtatgcttcgagatgaagatcaatgaggaaatctccgtgaagcaccttccgtctacagagcctgacccccacgtggtccgtatcggctggtccctggactcctgcagcacccagctaggcgaagagcctttctcctatggctatggaggcactgggaagaagtccaccaatagccggtttgaaaactacggagacaagtttgcagagaacgatgtgattggctgctttgcggattttgaatgtggaaatgacgtggaactgtcttttaccaagaatggaaagtggatgggcattgctttccgaatccagaaggaagccttggggggtcaggccctctatcctcatgtcctggtgaagaattgcgcagtggagttcaacttcggacagagagcagagccctactgttctgtcctcccggggtttaccttcatccagcaccttccccttagtgagcgtatccggggcaccgttggaccaaagagcaaggcagaatgtgagattctgatgatggtgggcctgcctgctgctggcaagaccacatgggccatcaaacatgcagcctccaacccttccaagaagtacaacatcctgggtaccaatgccatcatggataagatgcgggtgatgggcctacgccggcagcggaactatgctggccgctgggatgtcctgatccagcaggccacccagtgcctcaaccgcctcatccagattgctgcccgcaagaaacgcaactatatcctagatcagacaaatgtttatgggtcagcccagagacgaaaaatgagaccatttgaaggcttccagcgcaaagctattgtaatttgtcccactgacgaggacctaaaagaccgaacaataaagcgaaccgacgaggaagggaaggatgtcccagatcatgcggtcttagaaatgaaagccaacttcacgttgccagatgttggggacttcctggatgaggttctgttcattgagctgcagcgggaggaagcggacaagctagtgaggcagtacaacgaggaaggccgcaaggctgggccaccccctgaaaagcgctttgacaaccgaggtggtggtggcttccggggccgcgggggtggtggtggcttccagcgctatgaaaaccgaggaccccctggaggcaaccgtggcggcttccagaaccgagggggaggcagcggtggaggaggcaactaccgaggaggtttcaaccgcagcggaggtggtggctatagccagaaccgctggggtaacaacaaccgggataacaacaactccaacaacagaggcagctacaaccgggctccccagcaacagccgccaccacagcagcctccgccaccacagccaccaccccagcagccaccgccaccacccagctacagccctgctcggaacccccggtctcccaggtgccagacccaaaagcttttcctacagtgataccctttatttttacttccccttgactcatatgttttaacatgattttaacaaactgcacttattaagaaatgtgtttgccctgttttgtttggtttcgttttgttttctttgaataaatgacatggcacctcctagcaggaaggaagcagggttgaaaccctgaagtgttactgcagttggccgttaattggggtgggggcctctttaaagggaaattatttactcattcattaaacaacttaactgaggga

SEQ ID NO: 365669 - DNA, 2784 bp, Homo sapiens
tccgctccggcctcggcttcgacgtaggccaacgcttcctccccagtagctcctaggccttctcgtggccgttgttttgaaaacggcgctctgattggctaggtttccgggcccgcgcccgttgccccacgcactgaccaattggcactcatgtaacatcggacgaggcacgagtgaggggggaggcggtggcggcggccattttgagccgctgccgccattggagtgggccccccccctttcccccttcgcctcctgacaggaaaggtttaagggggacagagccctgggaggccgggccgggctcgggggccaccccgggggcccgggccatggatgtgcgccgtctgaaggtgaacgaacttcgcgaggagctgcagcgccgcggcctggacactcgaggcctcaaggccgagcttgctgagcggctgcaggcggcgttggaggccgaggagcctgacgacgagcgggagctcgacgccgacgacgaaccggggcgacccgggcacatcaacgaggaggtcgagaccgaggggggctccgagctggaggggaccgcgcagccaccgccgcccgggctgcagccgcacgcggagcccggcggctactcggggccggacggacattatgccatggacaatattaccaggcagaaccaattctacgatacccaaaaagccaacttcacgttgccagatgttggggacttcctggatgaggttctgttcattgagctgcagcgggaggaagcggacaagctagtgaggcagtacaacgaggaaggccgcaaggctgggccaccccctgaaaagcgctttgacaaccgaggtggtggtggcttccggggccgcgggggtggtggtggcttccagcgctatgaaaaccgaggaccccctggaggcaaccgtggcggcttccagaaccgagggggaggcagcggtggaggaggcaactaccgaggaggtttcaaccgcagcggaggtggtggctatagccagaaccgctggggtaacaacaaccgggataacaacaactccaacaacagaggcagctacaaccgggctccccagcaacagccgccaccacagcagcctccgccaccacagccaccaccccagcagccaccgccaccacccagctacagccctgctcggaaccccccaggggccagcacctacaataagaacagcaacatccctggctcaagcgccaataccagcacccccaccgtcagcagctacagccctccacagccgagttacagccagccaccctacaaccagggaggttacagccagggctacacagccccaccgcctccacctccaccaccacctgcctacaactatgggagctacggcggttacaacccggccccctataccccaccgccaccccccaccgcacagacctaccctcagcccagctataaccagtatcagcagtatgcccagcagtggaaccagtactatcagaaccagggccagtggccgccatactacgggaactacgactacgggagctactccgggaacacacagggtggcacaagtacacagtagccagtgtgacccagaggctcccggaggcccctgccggcttcctccaccagcgcctgcctcggcccctcctctgcccccgccagatcccgtggtgctggggatggggtcatcccagggctgcctccctccagcccactgcctcccctctgaggggcttccttcccctccatagggccaggcatttttttctggattcaaacaggcaacaatgaccttttattttctgtttgtccccacctccccagccttccacctcctgttcttcctaccttcttcctttttgactaaataatccccacctcccttgatcatacagtgaggctacagtgactgaggggagaatcccctcctgttcactctcccaaccctgctccagcccctcagcttcccagaccctcatgcagttggttgtaaattctcccaggagctgttttactgtctacttttcaggattaaaaaaaaaatcaaaacttaaaaaaaaaaaagtttaaaaagcaaaatggggagggggaggaagcagtgacttttttttggtaattatgcgcttttttttaatttttagaatttgtctttttactgtgggtgggctgttgatatttcatcaagataagcatttctttcctgagttcaggtgactgaggaagagccacaaaacaaaacacaacaaaaccaaaccacagaatcatctttaacccaactttttatacgatgccccagttccccataactttgcacacaagcttctgtgttcagttgaattgtaactgctttttgtatttggagagagtgactattgaacttgaaaccttttattccgggcgtcttggtagtttctggtgggattcagtgggtgagagggaagaaggggaggttggggggctccttcccttcagaacttgaagtttctcccactgcctcctctccagtggtctcccaggtgccagacccaaaagcttttcctacagtgataccctttatttttacttccccttgactcatatgttttaacatgattttaacaaactgcacttattaagaaatgtgtttgccctgttttgtttggtttcgttttgttttctttgaataaatgacatggcacctcctagcaggaaggaagcagggttgaaaccctgaagtgttactgcagttggccgttaattggggtgggggcctctttaaagggaaattatttactcattcattaaacaacttaactgaggga

SEQ ID NO: 365670 - DNA, 2526 bp, Homo sapiens
tccgctccggcctcggcttcgacgtaggccaacgcttcctccccagtagctcctaggccttctcgtggccgttgttttgaaaacggcgctctgattggctaggtttccgggcccgcgcccgttgccccacgcactgaccaattggcactcatgtaacatcggacgaggcacgagtgaggggggaggcggtggcggcggccattttgagccgctgccgccattggagtgggccccccccctttcccccttcgcctcctgacaggaaaggtttaagggggacagagccctgggaggccgggccgggctcgggggccaccccgggggcccgggccatggatgtgcgccgtctgaaggtgaacgaacttcgcgaggagctgcagcgccgcggcctggacactcgaggcctcaaggccgagcttgctgagcggctgcaggcggcgttggaggccgaggagcctgacgacgagcgggagctcgacgccgacgacgaaccggggcgacccgggcacatcaacgaggaggtcgagaccgaggggggctccgagctggaggggaccgcgcagccaccgccgcccgggctgcaccggggccgcgggggtggtggtggcttccagcgctatgaaaaccgaggaccccctggaggcaaccgtggcggcttccagaaccgagggggaggcagcggtggaggaggcaactaccgaggaggtttcaaccgcagcggaggtggtggctatagccagaaccgctggggtaacaacaaccgggataacaacaactccaacaacagaggcagctacaaccgggctccccagcaacagccgccaccacagcagcctccgccaccacagccaccaccccagcagccaccgccaccacccagctacagccctgctcggaaccccccaggggccagcacctacaataagaacagcaacatccctggctcaagcgccaataccagcacccccaccgtcagcagctacagccctccacagccgagttacagccagccaccctacaaccagggaggttacagccagggctacacagccccaccgcctccacctccaccaccacctgcctacaactatgggagctacggcggttacaacccggccccctataccccaccgccaccccccaccgcacagacctaccctcagcccagctataaccagtatcagcagtatgcccagcagtggaaccagtactatcagaaccagggccagtggccgccatactacgggaactacgactacgggagctactccgggaacacacagggtggcacaagtacacagtagccagtgtgacccagaggctcccggaggcccctgccggcttcctccaccagcgcctgcctcggcccctcctctgcccccgccagatcccgtggtgctggggatggggtcatcccagggctgcctccctccagcccactgcctcccctctgaggggcttccttcccctccatagggccaggcatttttttctggattcaaacaggcaacaatgaccttttattttctgtttgtccccacctccccagccttccacctcctgttcttcctaccttcttcctttttgactaaataatccccacctcccttgatcatacagtgaggctacagtgactgaggggagaatcccctcctgttcactctcccaaccctgctccagcccctcagcttcccagaccctcatgcagttggttgtaaattctcccaggagctgttttactgtctacttttcaggattaaaaaaaaaatcaaaacttaaaaaaaaaaaagtttaaaaagcaaaatggggagggggaggaagcagtgacttttttttggtaattatgcgcttttttttaatttttagaatttgtctttttactgtgggtgggctgttgatatttcatcaagataagcatttctttcctgagttcaggtgactgaggaagagccacaaaacaaaacacaacaaaaccaaaccacagaatcatctttaacccaactttttatacgatgccccagttccccataactttgcacacaagcttctgtgttcagttgaattgtaactgctttttgtatttggagagagtgactattgaacttgaaaccttttattccgggcgtcttggtagtttctggtgggattcagtgggtgagagggaagaaggggaggttggggggctccttcccttcagaacttgaagtttctcccactgcctcctctccagtggtctcccaggtgccagacccaaaagcttttcctacagtgataccctttatttttacttccccttgactcatatgttttaacatgattttaacaaactgcacttattaagaaatgtgtttgccctgttttgtttggtttcgttttgttttctttgaataaatgacatggcacctcctagcaggaaggaagcagggttgaaaccctgaagtgttactgcagttggccgttaattggggtgggggcctctttaaagggaaattatttactcattcattaaacaacttaactgaggga

SEQ ID NO: 365671 - DNA, 2408 bp, Homo sapiens
atttttagtagagatggggttttgccatgttggccaggctggtcttgaactcctgacctcaggtgatccacccgcctcggcctcccaaagtgctgggattacaggcgtgagccaccgcgcccgcccttctgtctttgtctttcttattcactattccagttttcttcaccttctcccttctggaaggccactcttctgggtggaggggaccagacttcagaaggtactgacctcttcttcttgttctctttggggcacttccttcctcctagccaacttcacgttgccagatgttggggacttcctggatgaggttctgttcattgagctgcagcgggaggaagcggacaagctagtgaggcagtacaacgaggaaggccgcaaggctgggccaccccctgaaaagcgctttgacaaccgaggtggtggtggcttccggggccgcgggggtggtggtggcttccagcgctatgaaaaccgaggaccccctggaggcaaccgtggcggcttccagaaccgagggggaggcagcggtggaggaggcaactaccgaggaggtttcaaccgcagcggaggtggtggctatagccagaaccgctggggtaacaacaaccgggataacaacaactccaacaacagaggcagctacaaccgggctccccagcaacagccgccaccacagcagcctccgccaccacagccaccaccccagcagccaccgccaccacccagctacagccctgctcggaaccccccaggggccagcacctacaataagaacagcaacatccctggctcaagcgccaataccagcacccccaccgtcagcagctacagccctccacagagctttggcttttttccctccactttccagccgagttacagccagccaccctacaaccagggaggttacagccagggctacacagccccaccgcctccacctccaccaccacctgcctacaactatgggagctacggcggttacaacccggccccctataccccaccgccaccccccaccgcacagacctaccctcagcccagctataaccagtatcagcagtatgcccagcagtggaaccagtactatcagaaccagggccagtggccgccatactacgggaactacgactacgggagctactccgggaacacacagggtggcacaagtacacagtagccagtgtgacccagaggctcccggaggcccctgccggcttcctccaccagcgcctgcctcggcccctcctctgcccccgccagatcccgtggtgctggggatggggtcatcccagggctgcctccctccagcccactgcctcccctctgaggggcttccttcccctccatagggccaggcatttttttctggattcaaacaggcaacaatgaccttttattttctgtttgtccccacctccccagccttccacctcctgttcttcctaccttcttcctttttgactaaataatccccacctcccttgatcatacagtgaggctacagtgactgaggggagaatcccctcctgttcactctcccaaccctgctccagcccctcagcttcccagaccctcatgcagttggttgtaaattctcccaggagctgttttactgtctacttttcaggattaaaaaaaaaatcaaaacttaaaaaaaaaaaagtttaaaaagcaaaatggggagggggaggaagcagtgacttttttttggtaattatgcgcttttttttaatttttagaatttgtctttttactgtgggtgggctgttgatatttcatcaagataagcatttctttcctgagttcaggtgactgaggaagagccacaaaacaaaacacaacaaaaccaaaccacagaatcatctttaacccaactttttatacgatgccccagttccccataactttgcacacaagcttctgtgttcagttgaattgtaactgctttttgtatttggagagagtgactattgaacttgaaaccttttattccgggcgtcttggtagtttctggtgggattcagtgggtgagagggaagaaggggaggttggggggctccttcccttcagaacttgaagtttctcccactgcctcctctccagtggtctcccaggtgccagacccaaaagcttttcctacagtgataccctttatttttacttccccttgactcatatgttttaacatgattttaacaaactgcacttattaagaaatgtgtttgccctgttttgtttggtttcgttttgttttctttgaataaatgacatggcacctcctagcaggaaggaagcagggttgaaaccctgaagtgttactgcagttggccgttaattggggtgggggcctctttaaagggaaattatttactcattcattaaacaacttaactgaggga

SEQ ID NO: 365672 - DNA, 3317 bp, Homo sapiens
tccgctccggcctcggcttcgacgtaggccaacgcttcctccccagtagctcctaggccttctcgtggccgttgttttgaaaacggcgctctgattggctaggtttccgggcccgcgcccgttgccccacgcactgaccaattggcactcatgtaacatcggacgaggcacgagtgaggggggaggcggtggcggcggccattttgagccgctgccgccattggagtgggccccccccctttcccccttcgcctcctgacaggaaaggtttaagggggacagagccctgggaggccgggccgggctcgggggccaccccgggggcccgggccatggatgtgcgccgtctgaaggtgaacgaacttcgcgaggagctgcagcgccgcggcctggacactcgaggcctcaaggccgagcttgctgagcggctgcaggcggcgttggaggccgaggagcctgacgacgagcgggagctcgacgccgacgacgaaccggggcgacccgggcacatcaacgaggaggtcgagaccgaggggggctccgagctggaggggaccgcgcagccaccgccgcccgggctgcagccgcacgcggagcccggcggctactcggggccggacggacattatgccatggacaatattaccaggcagaaccaattctacgatacccaagtcatcaaacaagaaaacgagtcaggctacgagaggagaccactggaaatggagcagcagcaggcctatcgtccagaaatgaagacagagatgaagcaaggagcacccaccagcttcctcccgcctgaagcttctcaactcaagccagacaggcagcaattccagagtcgaaagaggccttatgaagaaaaccggggacgggggtactttgagcaccgagaggataggaggggccgctctcctcagcctcctgctgaagaggatgaagatgactttgatgatacccttgttgctattgacacctataactgcgacctccacttcaaggtggcccgagatcggagtagtggctatccgctcacaattgagggctttgcatacctgtggtcaggagcccgtgccagctatggggtcagaaggggccgtgtatgcttcgagatgaagatcaatgaggaaatctccgtgaagcaccttccgtctacagagcctgacccccacgtggtccgtatcggctggtccctggactcctgcagcacccagctaggcgaagagcctttctcctatggctatggaggcactgggaagaagtccaccaatagccggtttgaaaactacggagacaagtttgcagagaacgatgtgattggctgctttgcggattttgaatgtggaaatgacgtggaactgtcttttaccaagaatggaaagtggatgggcattgctttccgaatccagaaggaagccttggggggtcaggccctctatcctcatgtcctggtgaagaattgcgcagtggagttcaacttcggacagagagcagagccctactgttctgtcctcccggggtttaccttcatccagcaccttccccttagtgagcgtatccggggcaccgttggaccaaagagcaaggcagaatgtgagattctgatgatggtgggcctgcctgctgctggcaagaccacatgggccatcaaacatgcagcctccaacccttccaagaagtacaacatcctgggtaccaatgccatcatggataagatgcgggtgatgggcctacgccggcagcggaactatgctggccgctgggatgtcctgatccagcaggccacccagtgcctcaaccgcctcatccagattgctgcccgcaagaaacgcaactatatcctagatcagacaaatgtttatgggtcagcccagagacgaaaaatgagaccatttgaaggcttccagcgcaaagctattgtaatttgtcccactgacgaggacctaaaagaccgaacaataaagcgaaccgacgaggaagggaaggatgtcccagatcatgcggtcttagaaatgaaagaaaggtaggaaatgagtgcttcccagaggaacgtcaatgcagggtcctggagagaagaagctctttactcagtttgtccttccctggctccccagtgatttcttttttgatcttactctttctttgcttctgctttgtcccttccttgtctaccacagctgtgaatggaaaagctacccatctgtcttatgttggggttttcaggctggatggggctggggcagcacaagggaaaggatgtatgggagctaaagctgaaagtcctgtgtgctcaccctgcctctggtcccagatgggctgactgtgggcaggcctcagtttgtttctctgtaaatatagggatggtgatgccatctgtctgacccattccctggggtgaggcctgagggagctgtgcactgtgtctaggtgggtcttagccacctcttcagaaaacggaggagtctttgttacccctcagcttcccagaccctcatgcagttggttgtaaattctcccaggagctgttttactgtctacttttcaggattaaaaaaaaaatcaaaacttaaaaaaaaaaaagtttaaaaagcaaaatggggagggggaggaagcagtgacttttttttggtaattatgcgcttttttttaatttttagaatttgtctttttactgtgggtgggctgttgatatttcatcaagataagcatttctttcctgagttcaggtgactgaggaagagccacaaaacaaaacacaacaaaaccaaaccacagaatcatctttaacccaactttttatacgatgccccagttccccataactttgcacacaagcttctgtgttcagttgaattgtaactgctttttgtatttggagagagtgactattgaacttgaaaccttttattccgggcgtcttggtagtttctggtgggattcagtgggtgagagggaagaaggggaggttggggggctccttcccttcagaacttgaagtttctcccactgcctcctctccagtggtctcccaggtgccagacccaaaagcttttcctacagtgataccctttatttttacttccccttgactcatatgttttaacatgattttaacaaactgcacttattaagaaatgtgtttgccctgttttgtttggtttcgttttgttttctttgaataaatgacatggcacctcctagcaggaaggaagcagggttgaaaccctgaagtgttactgcagttggccgttaattggggtgggggcctctttaaagggaaattatttactcattcattaaacaacttaactgaggga

SEQ ID NO: 365673 - DNA, 2079 bp, Homo sapiens
gtattactgttggtgatgtggttggtagtattactgttggtggtgatggtggtggttggtagtattactgttggtggtgatggtggtggttggtagtattactgttccggggccgcgggggtggtggtggcttccagcgctatgaaaaccgaggaccccctggaggcaaccgtggcggcttccagaaccgagggggaggcagcggtggaggaggcaactaccgaggaggtttcaaccgcagcggaggtggtggctatagccagaaccgctggggtaacaacaaccgggataacaacaactccaacaacagaggcagctacaaccgggctccccagcaacagccgccaccacagcagcctccgccaccacagccaccaccccagcagccaccgccaccacccagctacagccctgctcggaaccccccaggggccagcacctacaataagaacagcaacatccctggctcaagcgccaataccagcacccccaccgtcagcagctacagccctccacagagctttggcttttttccctccactttccagccgagttacagccagccaccctacaaccagggaggttacagccagggctacacagccccaccgcctccacctccaccaccacctgcctacaactatgggagctacggcggttacaacccggccccctataccccaccgccaccccccaccgcacagacctaccctcagcccagctataaccagtatcagcagtatgcccagcagtggaaccagtactatcagaaccagggccagtggccgccatactacgggaactacgactacgggagctactccgggaacacacagggtggcacaagtacacagtagccagtgtgacccagaggctcccggaggcccctgccggcttcctccaccagcgcctgcctcggcccctcctctgcccccgccagatcccgtggtgctggggatggggtcatcccagggctgcctccctccagcccactgcctcccctctgaggggcttccttcccctccatagggccaggcatttttttctggattcaaacaggcaacaatgaccttttattttctgtttgtccccacctccccagccttccacctcctgttcttcctaccttcttcctttttgactaaataatccccacctcccttgatcatacagtgaggctacagtgactgaggggagaatcccctcctgttcactctcccaaccctgctccagcccctcagcttcccagaccctcatgcagttggttgtaaattctcccaggagctgttttactgtctacttttcaggattaaaaaaaaaatcaaaacttaaaaaaaaaaaagtttaaaaagcaaaatggggagggggaggaagcagtgacttttttttggtaattatgcgcttttttttaatttttagaatttgtctttttactgtgggtgggctgttgatatttcatcaagataagcatttctttcctgagttcaggtgactgaggaagagccacaaaacaaaacacaacaaaaccaaaccacagaatcatctttaacccaactttttatacgatgccccagttccccataactttgcacacaagcttctgtgttcagttgaattgtaactgctttttgtatttggagagagtgactattgaacttgaaaccttttattccgggcgtcttggtagtttctggtgggattcagtgggtgagagggaagaaggggaggttggggggctccttcccttcagaacttgaagtttctcccactgcctcctctccagtggtctcccaggtgccagacccaaaagcttttcctacagtgataccctttatttttacttccccttgactcatatgttttaacatgattttaacaaactgcacttattaagaaatgtgtttgccctgttttgtttggtttcgttttgttttctttgaataaatgacatggcacctcctagcaggaaggaagcagggttgaaaccctgaagtgttactgcagttggccgttaattggggtgggggcctctttaaagggaaattatttactcattcattaaacaacttaactgaggga

SEQ ID NO: 365674 - DNA, 2310 bp, Homo sapiens
tccgctccggcctcggcttcgacgtaggccaacgcttcctccccagtagctcctaggccttctcgtggccgttgttttgaaaacggcgctctgattggctaggtttccgggcccgcgcccgttgccccacgcactgaccaattggcactcatgtaacatcggacgaggcacgagtgaggggggaggcggtggcggcggccattttgagccgctgccgccattggagtgggccccccccctttcccccttcgcctcctgacaggaaaggtttaagggggacagagccctgggaggccgggccgggctcgggggccaccccgggggcccgggccatggatgtgcgccgtctgaaggtgaacgaacttcgcgaggagctgcagcgccgcggcctggacactcgaggcctcaaggccgagcttgctgagcggctgcaggcggcgttggaggccgaggagcctgacgacgagcgggagctcgacgccgacgacgaaccggggcgacccgggcacatcaacgaggaggtcgagaccgaggggggctccgagctggaggggaccgcgcagccaccgccgcccgggctgcagccgcacgcggagcccggcggctactcggggccggacggacattatgccatggacaatattaccaggcagaaccaattctacgatacccaagtcatcaaacaagaaaacgagtcaggctacgagaggagaccactggaaatggagcagcagcaggcctatcgtccagaaatgaagacagagatgaagcaaggagcacccaccagcttcctcccgcctgaagcttctcaactcaagccagacaggcagcaattccagacgcctccacctccaccaccacctgcctacaactatgggagctacggcggttacaacccggccccctataccccaccgccaccccccaccgcacagacctaccctcagcccagctataaccagtatcagcagtatgcccagcagtggaaccagtactatcagaaccagggccagtggccgccatactacgggaactacgactacgggagctactccgggaacacacagggtggcacaagtacacagtagccagtgtgacccagaggctcccggaggcccctgccggcttcctccaccagcgcctgcctcggcccctcctctgcccccgccagatcccgtggtgctggggatggggtcatcccagggctgcctccctccagcccactgcctcccctctgaggggcttccttcccctccatagggccaggcatttttttctggattcaaacaggcaacaatgaccttttattttctgtttgtccccacctccccagccttccacctcctgttcttcctaccttcttcctttttgactaaataatccccacctcccttgatcatacagtgaggctacagtgactgaggggagaatcccctcctgttcactctcccaaccctgctccagcccctcagcttcccagaccctcatgcagttggttgtaaattctcccaggagctgttttactgtctacttttcaggattaaaaaaaaaatcaaaacttaaaaaaaaaaaagtttaaaaagcaaaatggggagggggaggaagcagtgacttttttttggtaattatgcgcttttttttaatttttagaatttgtctttttactgtgggtgggctgttgatatttcatcaagataagcatttctttcctgagttcaggtgactgaggaagagccacaaaacaaaacacaacaaaaccaaaccacagaatcatctttaacccaactttttatacgatgccccagttccccataactttgcacacaagcttctgtgttcagttgaattgtaactgctttttgtatttggagagagtgactattgaacttgaaaccttttattccgggcgtcttggtagtttctggtgggattcagtgggtgagagggaagaaggggaggttggggggctccttcccttcagaacttgaagtttctcccactgcctcctctccagtggtctcccaggtgccagacccaaaagcttttcctacagtgataccctttatttttacttccccttgactcatatgttttaacatgattttaacaaactgcacttattaagaaatgtgtttgccctgttttgtttggtttcgttttgttttctttgaataaatgacatggcacctcctagcaggaaggaagcagggttgaaaccctgaagtgttactgcagttggccgttaattggggtgggggcctctttaaagggaaattatttactcattcattaaacaacttaactgaggga

SEQ ID NO: 365675 - DNA, 1942 bp, Homo sapiens
gctcggttctcggtattggcgcttgagccagggatgttgctgttcttattgtaggtgctggcccctgtggggttccgagcagggctgtagctgggtggtggcggtggctgctggggtggtggctgtggtggcttccacgctatgaaccgggataacaacaactccaacaacagaggcagctacaaccgggctccccagcaacagccgccaccacagcagcctccgccaccacagccaccaccccagcagccaccgccaccacccagctacagccctgctcggaaccccccaggggccagcacctacaataagaacagcaacatccctggctcaagcgccaataccagcacccccaccgtcagcagctacagccctccacagagctttggcttttttccctccactttccagccgagttacagccagccaccctacaaccagggaggttacagccagggctacacagccccaccgcctccacctccaccaccacctgcctacaactatgggagctacggcggttacaacccggccccctataccccaccgccaccccccaccgcacagacctaccctcagcccagctataaccagtatcagcagtatgcccagcagtggaaccagtactatcagaaccagggccagtggccgccatactacgggaactacgactacgggagctactccgggaacacacagggtggcacaagtacacagtagccagtgtgacccagaggctcccggaggcccctgccggcttcctccaccagcgcctgcctcggcccctcctctgcccccgccagatcccgtggtgctggggatggggtcatcccagggctgcctccctccagcccactgcctcccctctgaggggcttccttcccctccatagggccaggcatttttttctggattcaaacaggcaacaatgaccttttattttctgtttgtccccacctccccagccttccacctcctgttcttcctaccttcttcctttttgactaaataatccccacctcccttgatcatacagtgaggctacagtgactgaggggagaatcccctcctgttcactctcccaaccctgctccagcccctcagcttcccagaccctcatgcagttggttgtaaattctcccaggagctgttttactgtctacttttcaggattaaaaaaaaaatcaaaacttaaaaaaaaaaaagtttaaaaagcaaaatggggagggggaggaagcagtgacttttttttggtaattatgcgcttttttttaatttttagaatttgtctttttactgtgggtgggctgttgatatttcatcaagataagcatttctttcctgagttcaggtgactgaggaagagccacaaaacaaaacacaacaaaaccaaaccacagaatcatctttaacccaactttttatacgatgccccagttccccataactttgcacacaagcttctgtgttcagttgaattgtaactgctttttgtatttggagagagtgactattgaacttgaaaccttttattccgggcgtcttggtagtttctggtgggattcagtgggtgagagggaagaaggggaggttggggggctccttcccttcagaacttgaagtttctcccactgcctcctctccagtggtctcccaggtgccagacccaaaagcttttcctacagtgataccctttatttttacttccccttgactcatatgttttaacatgattttaacaaactgcacttattaagaaatgtgtttgccctgttttgtttggtttcgttttgttttctttgaataaatgacatggcacctcctagcaggaaggaagcagggttgaaaccctgaagtgttactgcagttggccgttaattggggtgggggcctctttaaagggaaattatttactcattcattaaacaacttaactgaggga

SEQ ID NO: 365676 - DNA, 1418 bp, Homo sapiens
  misc_feature (21)..(21): n is a, c, g, or t
  misc_feature (44)..(44): n is a, c, g, or t
  misc_feature (46)..(46): n is a, c, g, or t
  misc_feature (48)..(48): n is a, c, g, or t
  misc_feature (57)..(57): n is a, c, g, or t
agtactgatacaatcagctcngtaccccaggtagacctaactanancntaccctcancagctataaccagtatcagcagtatgcccagcagtggaaccagtactatcagaaccagggccagtggccgccatactacgggaactacgactacgggagctactccgggaacacacagggtggcacaagtacacagtagccagtgtgacccagaggctcccggaggcccctgccggcttcctccaccagcgcctgcctcggcccctcctctgcccccgccagatcccgtggtgctggggatggggtcatcccagggctgcctccctccagcccactgcctcccctctgaggggcttccttcccctccatagggccaggcatttttttctggattcaaacaggcaacaatgaccttttattttctgtttgtccccacctccccagccttccacctcctgttcttcctaccttcttcctttttgactaaataatccccacctcccttgatcatacagtgaggctacagtgactgaggggagaatcccctcctgttcactctcccaaccctgctccagcccctcagcttcccagaccctcatgcagttggttgtaaattctcccaggagctgttttactgtctacttttcaggattaaaaaaaaaatcaaaacttaaaaaaaaaaaagtttaaaaagcaaaatggggagggggaggaagcagtgacttttttttggtaattatgcgcttttttttaatttttagaatttgtctttttactgtgggtgggctgttgatatttcatcaagataagcatttctttcctgagttcaggtgactgaggaagagccacaaaacaaaacacaacaaaaccaaaccacagaatcatctttaacccaactttttatacgatgccccagttccccataactttgcacacaagcttctgtgttcagttgaattgtaactgctttttgtatttggagagagtgactattgaacttgaaaccttttattccgggcgtcttggtagtttctggtgggattcagtgggtgagagggaagaaggggaggttggggggctccttcccttcagaacttgaagtttctcccactgcctcctctccagtggtctcccaggtgccagacccaaaagcttttcctacagtgataccctttatttttacttccccttgactcatatgttttaacatgattttaacaaactgcacttattaagaaatgtgtttgccctgttttgtttggtttcgttttgttttctttgaataaatgacatggcacctcctagcaggaaggaagcagggttgaaaccctgaagtgttactgcagttggccgttaattggggtgggggcctctttaaagggaaattatttactcattcattaaacaacttaactgaggga

SEQ ID NO: 365677 - DNA, 1235 bp, Homo sapiens
gggacgggggtggcggggaggattccgtaccgtagggatcggagaccggaaactgctttctggagccgaagagagtcggaagaacaagagatgccatggacaatattaccaggcagaaccaattctacgatacccaagtcatcaaacaagaaaacgagtctgaggggcttccttcccctccatagggccaggcatttttttctggattcaaacaggcaacaatgaccttttattttctgtttgtccccacctccccagccttccacctcctgttcttcctaccttcttcctttttgactaaataatccccacctcccttgatcatacagtgaggctacagtgactgaggggagaatcccctcctgttcactctcccaaccctgctccagcccctcagcttcccagaccctcatgcagttggttgtaaattctcccaggagctgttttactgtctacttttcaggattaaaaaaaaaatcaaaacttaaaaaaaaaaaagtttaaaaagcaaaatggggagggggaggaagcagtgacttttttttggtaattatgcgcttttttttaatttttagaatttgtctttttactgtgggtgggctgttgatatttcatcaagataagcatttctttcctgagttcaggtgactgaggaagagccacaaaacaaaacacaacaaaaccaaaccacagaatcatctttaacccaactttttatacgatgccccagttccccataactttgcacacaagcttctgtgttcagttgaattgtaactgctttttgtatttggagagagtgactattgaacttgaaaccttttattccgggcgtcttggtagtttctggtgggattcagtgggtgagagggaagaaggggaggttggggggctccttcccttcagaacttgaagtttctcccactgcctcctctccagtggtctcccaggtgccagacccaaaagcttttcctacagtgataccctttatttttacttccccttgactcatatgttttaacatgattttaacaaactgcacttattaagaaatgtgtttgccctgttttgtttggtttcgttttgttttctttgaataaatgacatggcacctcctagcaggaaggaagcagggttgaaaccctgaagtgttactgcagttggccgttaattggggtgggggcctctttaaagggaaattatttactcattcattaaacaacttaactgaggga

SEQ ID NO: 365678 - DNA, 1325 bp, Homo sapiens
acacacgagcacacagcacacaaacgcacagcaccgcacacacatgcacacacaggggccagcacctacaataagaacagcaacatccctggctcaagcgccaataccagcacccccaccgtcagcagctacagccctccacagccgagttacagccagccaccctacaaccagggaggttacagccagggctacacagccccaccgcctccacctccaccaccacctgcctacaactatgggagctacggcggttacaacccggccccctatacccacaaagaacaaacaaaagaaaagaatactaagacagcttcaactccttgtagttcactacaattctttcatattttgacataaaataaattcagacaccttcccattgcattcatacacgatgacggcataacaggtgcgtgaaggggaggagtcaggtcaagtgtgtaatacttcacaaaacaatgttcaaggcaaaatcagattacacaaagaaaacagaactgagatggatttgtagattatccatggagctgttttactgtctacttttcaggattaaaaaaaaaatcaaaacttaaaaaaaaaaaagtttaaaaagcaaaatggggagggggaggaagcagtgacttttttttggtaattatgcgcttttttttaatttttagaatttgtctttttactgtgggtgggctgttgatatttcatcaagataagcatttctttcctgagttcaggtgactgaggaagagccacaaaacaaaacacaacaaaaccaaaccacagaatcatctttaacccaactttttatacgatgccccagttccccataactttgcacacaagcttctgtgttcagttgaattgtaactgctttttgtatttggagagagtgactattgaacttgaaaccttttattccgggcgtcttggtagtttctggtgggattcagtgggtgagagggaagaaggggaggttggggggctccttcccttcagaacttgaagtttctcccactgcctcctctccagtggtctcccaggtgccagacccaaaagcttttcctacagtgataccctttatttttacttccccttgactcatatgttttaacatgattttaacaaactgcacttattaagaaatgtgtttgccctgttttgtttggtttcgttttgttttctttgaataaatgacatggcacctcctagcaggaaggaagcagggttgaaaccctgaagtgttactgcagttggccgttaattggggtgggggcctctttaaagggaaattatttactcattcattaaacaacttaactgaggga

SEQ ID NO: 365679 - DNA, 272 bp, Homo sapiens
cattaggaatcctttgccctgtgcctgtctgcagccacttacctaagtcaattcatttgctgagggtgactcaagaatcttctaagtaaagaagagctgtttcctgagtttctctgcttacaaggagcactgatatccttttctcagtccctggcctacataatacccctcagaggaaaaaaccaactcttaatgtaccatctcttgcctcttctgttaccttacccttagacaaatgtttatgggtcagcccagagacgaaaaatgagacc

SEQ ID NO: 365680 - DNA, 331 bp, Homo sapiens
gttttttgtttttgttttcccccgaaagtcctgggattataggcgtgagctaccgtgcctggccagcacttgacttaatgctcaccctgtcccaggcactgtgctcagagtctgacaagcctgatctttttgaatcccgataccagtactgtgaggtagatggtattactgcttccgctttgtagaggcagccacagctcagaggtccagagtcacactcacagtcaccaccgagccaagtggtgccataccaccatgccgcaacaccttccctgtcttgttcttgtagattctgatgatggtgggcctgcctgctgctggcaagaccaca

SEQ ID NO: 365681 - DNA, 424 bp, Homo sapiens
ctgggaagaagtccaccaatagccggtttgaaaactacggagacaagtttgcagagaacgatgtgattggctgctttgcggtgagtgctagcagcctgtgggagttggcagaaccagatgttgggctacagacttctttttcaggatacctctatccattgtctgccccatatccagccactctcgccatacttctttgtctctgcttgacagactggaatgtttactgtcattttgtgggaaattctgtcattccatctcctctggtcttgtgtgcaaagttttcagatgacaccctgaagaggtttggggacttcaggtgtgcatagccttcctccgttcctaggtaccagagtaacattttctaaacaaacctaggaatttcttatctttcattgctaggaaatagcctgtctgctcctga

SEQ ID NO: 365682 - DNA, 1188 bp, Homo sapiens
gcgtgagctggcgtatgttgacactattgcgttgtgtcgttggtcacgctggtattcgtgcaccatcctccatggcttgtgtgcatgttgatcgtggccgctgtcttggttgtgctgcgcgtgtgcatgtttatgagtcgcgtggactgttcagtccattggcgcctccatctttctgcgtcccgtatgatcgctgctgtacctacgccacgtcgttttctgtgctggggcgggtgctctcatcgtctgtgtaaatattgtttcatcaacggcgtcgaaaagagtggttccaaaacaaacgccggtggccagaccttcaccccaaacaaatccccctggggtaacacaatacacgctgaaggtaaattttgcccccacaccttaaatctcttataggagtgtgcccaacatatgtcaccccccccaaaatatgggtccttctcccccaagagtccccaacgaagcccggtttcccacctcaaccttgttacaaccaaggcgcgcccctcccgcttgctttcatattatctccccctcctcctttatggggcccccttttgtaccaaaacaaagggggccccaatgggcccccccggggaattttttgcccccccccccttttttttttttttttttttttttttttttttttttttaacccaactttttatacgatgccccagttccccataactttgcacacaagcttctgtgttcagttgaattgtaactgctttttgtatttggagagagtgactattgaacttgaaaccttttattccgggcgtcttggtagtttctggtgggattcagtgggtgagagggaagaaggggaggttggggggctccttcccttcagaacttgaagtttctcccactgcctcctctccagtggtctcccaggtgccagacccaaaagcttttcctacagtgataccctttatttttacttccccttgactcatatgttttaacatgattttaacaaactgcacttattaagaaatgtgtttgccctgttttgtttggtttcgttttgttttctttgaataaatgacatggcacctcctagcaggaaggaagcagggttgaaaccctgaagtgttactgcagttggccgttaattggggtgggggcctctttaaagggaaattatttactcattcattaaacaacttaactgaggga

SEQ ID NO: 365683 - DNA, 677 bp, Homo sapiens
gggacgggggtggcggggaggattccgtaccgtagggatcggagaccggaaactgctttctggagccgaagagagtcggaagaacaagaggttttccgtttgggttggggagggtctcgaaaatggggatcctagggtacggagctccgtgggcttggcggtcgtgctagcccagcgtgtgggctggggggtggggagccgtgtttccagggtggggaaggaatgtccaggtgtgcggggctgcgagagttctgaggaaggaggatcctggaatatgccgctggatgcgatcctgggcgttctcctatttggatgccatggacaatattaccaggcagaaccaattctacgatacccaagtcatcaaacaagaaaacgagtcggtctcccaggtgccagacccaaaagcttttcctacagtgataccctttatttttacttccccttgactcatatgttttaacatgattttaacaaactgcacttattaagaaatgtgtttgccctgttttgtttggtttcgttttgttttctttgaataaatgacatggcacctcctagcaggaaggaagcagggttgaaaccctgaagtgttactgcagttggccgttaattggggtgggggcctctttaaagggaaattatttactcattcattaaacaacttaactgaggga

SEQ ID NO: 365684 - DNA, 3818 bp, Homo sapiens
aagacaagaatgattgaacagtcgagccgtgtttcaatcatgcacgagggcctcctgacaggaaaggtttaagggggacagagccctgggaggccgggccgggctcgggggccaccccgggggcccgggccatggatgtgcgccgtctgaaggtgaacgaacttcgcgaggagctgcagcgccgcggcctggacactcgaggcctcaaggccgagcttgctgagcggctgcaggcggcgttggaggccgaggagcctgacgacgagcgggagctcgacgccgacgacgaaccggggcgacccgggcacatcaacgaggagatgccatggacaatattaccaggcagaaccaattctacgatacccaagtcatcaaacaagaaaacgagtcaggctacgagaggagaccactggaaatggagcagcagcaggcctatcgtccagaaatgaagacagagatgaagcaaggagcacccaccagcttcctcccgcctgaagcttctcaactcaagccagacaggcagcaattccagagtcgaaagaggccttatgaagaaaaccggggacgggggtactttgagcaccgagaggataggaggggccgctctcctcagcctcctgctgaagaggatgaagatgactttgatgatacccttgttgctattgacacctataactgcgacctccacttcaaggtggcccgagatcggagtagtggctatccgctcacaattgagggctttgcatacctgtggtcaggagcccgtgccagctatggggtcagaaggggccgtgtatgcttcgagatgaagatcaatgaggaaatctccgtgaagcaccttccgtctacagagcctgacccccacgtggtccgtatcggctggtccctggactcctgcagcacccagctaggcgaagagcctttctcctatggctatggaggcactgggaagaagtccaccaatagccggtttgaaaactacggagacaagtttgcagagaacgatgtgattggctgctttgcggattttgaatgtggaaatgacgtggaactgtcttttaccaagaatggaaagtggatgggcattgctttccgaatccagaaggaagccttggggggtcaggccctctatcctcatgtcctggtgaagaattgcgcagtggagttcaacttcggacagagagcagagccctactgttctgtcctcccggggtttaccttcatccagcaccttccccttagtgagcgtatccggggcaccgttggaccaaagagcaaggcagaatgtgagattctgatgatggtgggcctgcctgctgctggcaagaccacatgggccatcaaacatgcagcctccaacccttccaagaagtacaacatcctgggtaccaatgccatcatggataagatgcgggtgatgggcctacgccggcagcggaactatgctggccgctgggatgtcctgatccagcaggccacccagtgcctcaaccgcctcatccagattgctgcccgcaagaaacgcaactatatcctagatcagacaaatgtttatgggtcagcccagagacgaaaaatgagaccatttgaaggcttccagcgcaaagctattgtaatttgtcccactgacgaggacctaaaagaccgaacaataaagcgaaccgacgaggaagggaaggatgtcccagatcatgcggtcttagaaatgaaagccaacttcacgttgccagatgttggggacttcctggatgaggttctgttcattgagctgcagcgggaggaagcggacaagctagtgaggcagtacaacgaggaaggccgcaaggctgggccaccccctgaaaagcgctttgacaaccgaggtggtggtggcttccggggccgcgggggtggtggtggcttccagcgctatgaaaaccgaggaccccctggaggcaaccgtggcggcttccagaaccgagggggaggcagcggtggaggaggcaactaccgaggaggtttcaaccgcagcggaggtggtggctatagccagaaccgctggggtaacaacaaccgggataacaacaactccaacaacagaggcagctacaaccgggctccccagcaacagccgccaccacagcagcctccgccaccacagccaccaccccagcagccaccgccaccacccagctacagccctgctcggaaccccccaggggccagcacctacaataagaacagcaacatccctggctcaagcgccaataccagcacccccaccgtcagcagctacagccctccacagccgagttacagccagccaccctacaaccagggaggttacagccagggctacacagccccaccgcctccacctccaccaccacctgcctacaactatgggagctacggcggttacaacccggccccctataccccaccgccaccccccaccgcacagacctaccctcagcccagctataaccagtatcagcagtatgcccagcagtggaaccagtactatcagaaccagggccagtggccgccatactacgggaactacgactacgggagctactccgggaacacacagggtggcacaagtacacagtagccagtgtgacccagaggctcccggaggcccctgccggcttcctccaccagcgcctgcctcggcccctcctctgcccccgccagatcccgtggtgctggggatggggtcatcccagggctgcctccctccagcccactgcctcccctctgaggggcttccttcccctccatagggccaggcatttttttctggattcaaacaggcaacaatgaccttttattttctgtttgtccccacctccccagccttccacctcctgttcttcctaccttcttcctttttgactaaataatccccacctcccttgatcatacagtgaggctacagtgactgaggggagaatcccctcctgttcactctcccaaccctgctccagcccctcagcttcccagaccctcatgcagttggttgtaaattctcccaggagctgttttactgtctacttttcaggattaaaaaaaaaatcaaaacttaaaaaaaaaaaagtttaaaaagcaaaatggggagggggaggaagcagtgacttttttttggtaattatgcgcttttttttaatttttagaatttgtctttttactgtgggtgggctgttgatatttcatcaagataagcatttctttcctgagttcaggtgactgaggaagagccacaaaacaaaacacaacaaaaccaaaccacagaatcatctttaacccaactttttatacgatgccccagttccccataactttgcacacaagcttctgtgttcagttgaattgtaactgctttttgtatttggagagagtgactattgaacttgaaaccttttattccgggcgtcttggtagtttctggtgggattcagtgggtgagagggaagaaggggaggttggggggctccttcccttcagaacttgaagtttctcccactgcctcctctccagtggtctcccaggtgccagacccaaaagcttttcctacagtgataccctttatttttacttccccttgactcatatgttttaacatgattttaacaaactgcacttattaagaaatgtgtttgccctgttttgtttggtttcgttttgttttctttgaataaatgacatggcacctcctagcaggaaggaagcagggttgaaaccctgaagtgttactgcagttggccgttaattggggtgggggcctctttaaagggaaattatttactcattcattaaacaacttaactgaggga

SEQ ID NO: 365685 - DNA, 3588 bp, Homo sapiens
gggacgggggtggcggggaggattccgtaccgtagggatcggagaccggaaactgctttctggagccgaagagagtcggaagaacaagagatgccatggacaatattaccaggcagaaccaattctacgatacccaagtcatcaaacaagaaaacgagtcaggctacgagaggagaccactggaaatggagcagcagcaggcctatcgtccagaaatgaagacagagatgaagcaaggagcacccaccagcttcctcccgcctgaagcttctcaactcaagccagacaggcagcaattccagagtcgaaagaggccttatgaagaaaaccggggacgggggtactttgagcaccgagaggataggaggggccgctctcctcagcctcctgctgaagaggatgaagatgactttgatgatacccttgttgctattgacacctataactgcgacctccacttcaaggtggcccgagatcggagtagtggctatccgctcacaattgagggctttgcatacctgtggtcaggagcccgtgccagctatggggtcagaaggggccgtgtatgcttcgagatgaagatcaatgaggaaatctccgtgaagcaccttccgtctacagagcctgacccccacgtggtccgtatcggctggtccctggactcctgcagcacccagctaggcgaagagcctttctcctatggctatggaggcactgggaagaagtccaccaatagccggtttgaaaactacggagacaagtttgcagagaacgatgtgattggctgctttgcggattttgaatgtggaaatgacgtggaactgtcttttaccaagaatggaaagtggatgggcattgctttccgaatccagaaggaagccttggggggtcaggccctctatcctcatgtcctggtgaagaattgcgcagtggagttcaacttcggacagagagcagagccctactgttctgtcctcccggggtttaccttcatccagcaccttccccttagtgagcgtatccggggcaccgttggaccaaagagcaaggcagaatgtgagattctgatgatggtgggcctgcctgctgctggcaagaccacatgggccatcaaacatgcagcctccaacccttccaagaagtacaacatcctgggtaccaatgccatcatggataagatgcgggtgatgggcctacgccggcagcggaactatgctggccgctgggatgtcctgatccagcaggccacccagtgcctcaaccgcctcatccagattgctgcccgcaagaaacgcaactatatcctagatcagacaaatgtttatgggtcagcccagagacgaaaaatgagaccatttgaaggcttccagcgcaaagctattgtaatttgtcccactgacgaggacctaaaagaccgaacaataaagcgaaccgacgaggaagggaaggatgtcccagatcatgcggtcttagaaatgaaagccaacttcacgttgccagatgttggggacttcctggatgaggttctgttcattgagctgcagcgggaggaagcggacaagctagtgaggcagtacaacgaggaaggccgcaaggctgggccaccccctgaaaagcgctttgacaaccgaggtggtggtggcttccggggccgcgggggtggtggtggcttccagcgctatgaaaaccgaggaccccctggaggcaaccgtggcggcttccagaaccgagggggaggcagcggtggaggaggcaactaccgaggaggtttcaaccgcagcggaggtggtggctatagccagaaccgctggggtaacaacaaccgggataacaacaactccaacaacagaggcagctacaaccgggctccccagcaacagccgccaccacagcagcctccgccaccacagccaccaccccagcagccaccgccaccacccagctacagccctgctcggaaccccccaggggccagcacctacaataagaacagcaacatccctggctcaagcgccaataccagcacccccaccgtcagcagctacagccctccacagccgagttacagccagccaccctacaaccagggaggttacagccagggctacacagccccaccgcctccacctccaccaccacctgcctacaactatgggagctacggcggttacaacccggccccctataccccaccgccaccccccaccgcacagacctaccctcagcccagctataaccagtatcagcagtatgcccagcagtggaaccagtactatcagaaccagggccagtggccgccatactacgggaactacgactacgggagctactccgggaacacacagggtggcacaagtacacagtagccagtgtgacccagaggctcccggaggcccctgccggcttcctccaccagcgcctgcctcggcccctcctctgcccccgccagatcccgtggtgctggggatggggtcatcccagggctgcctccctccagcccactgcctcccctctgaggggcttccttcccctccatagggccaggcatttttttctggattcaaacaggcaacaatgaccttttattttctgtttgtccccacctccccagccttccacctcctgttcttcctaccttcttcctttttgactaaataatccccacctcccttgatcatacagtgaggctacagtgactgaggggagaatcccctcctgttcactctcccaaccctgctccagcccctcagcttcccagaccctcatgcagttggttgtaaattctcccaggagctgttttactgtctacttttcaggattaaaaaaaaaatcaaaacttaaaaaaaaaaaagtttaaaaagcaaaatggggagggggaggaagcagtgacttttttttggtaattatgcgcttttttttaatttttagaatttgtctttttactgtgggtgggctgttgatatttcatcaagataagcatttctttcctgagttcaggtgactgaggaagagccacaaaacaaaacacaacaaaaccaaaccacagaatcatctttaacccaactttttatacgatgccccagttccccataactttgcacacaagcttctgtgttcagttgaattgtaactgctttttgtatttggagagagtgactattgaacttgaaaccttttattccgggcgtcttggtagtttctggtgggattcagtgggtgagagggaagaaggggaggttggggggctccttcccttcagaacttgaagtttctcccactgcctcctctccagtggtctcccaggtgccagacccaaaagcttttcctacagtgataccctttatttttacttccccttgactcatatgttttaacatgattttaacaaactgcacttattaagaaatgtgtttgccctgttttgtttggtttcgttttgttttctttgaataaatgacatggcacctcctagcaggaaggaagcagggttgaaaccctgaagtgttactgcagttggccgttaattggggtgggggcctctttaaagggaaattatttactcattcattaaacaacttaactgaggga

SEQ ID NO: 365686 - DNA, 3643 bp, Homo sapiens
tagtatgcatgccatgaatagttaatattattattcttaccactcttagttgagctcctggacctgcagatgccttctggatgctttggtccagggttcttcatgaaccgcccctctaattggccatttttaattttgttttaagatgccatggacaatattaccaggcagaaccaattctacgatacccaagtcatcaaacaagaaaacgagtcaggctacgagaggagaccactggaaatggagcagcagcaggcctatcgtccagaaatgaagacagagatgaagcaaggagcacccaccagcttcctcccgcctgaagcttctcaactcaagccagacaggcagcaattccagagtcgaaagaggccttatgaagaaaaccggggacgggggtactttgagcaccgagaggataggaggggccgctctcctcagcctcctgctgaagaggatgaagatgactttgatgatacccttgttgctattgacacctataactgcgacctccacttcaaggtggcccgagatcggagtagtggctatccgctcacaattgagggctttgcatacctgtggtcaggagcccgtgccagctatggggtcagaaggggccgtgtatgcttcgagatgaagatcaatgaggaaatctccgtgaagcaccttccgtctacagagcctgacccccacgtggtccgtatcggctggtccctggactcctgcagcacccagctaggcgaagagcctttctcctatggctatggaggcactgggaagaagtccaccaatagccggtttgaaaactacggagacaagtttgcagagaacgatgtgattggctgctttgcggattttgaatgtggaaatgacgtggaactgtcttttaccaagaatggaaagtggatgggcattgctttccgaatccagaaggaagccttggggggtcaggccctctatcctcatgtcctggtgaagaattgcgcagtggagttcaacttcggacagagagcagagccctactgttctgtcctcccggggtttaccttcatccagcaccttccccttagtgagcgtatccggggcaccgttggaccaaagagcaaggcagaatgtgagattctgatgatggtgggcctgcctgctgctggcaagaccacatgggccatcaaacatgcagcctccaacccttccaagaagtacaacatcctgggtaccaatgccatcatggataagatgcgggtgatgggcctacgccggcagcggaactatgctggccgctgggatgtcctgatccagcaggccacccagtgcctcaaccgcctcatccagattgctgcccgcaagaaacgcaactatatcctagatcagacaaatgtttatgggtcagcccagagacgaaaaatgagaccatttgaaggcttccagcgcaaagctattgtaatttgtcccactgacgaggacctaaaagaccgaacaataaagcgaaccgacgaggaagggaaggatgtcccagatcatgcggtcttagaaatgaaagccaacttcacgttgccagatgttggggacttcctggatgaggttctgttcattgagctgcagcgggaggaagcggacaagctagtgaggcagtacaacgaggaaggccgcaaggctgggccaccccctgaaaagcgctttgacaaccgaggtggtggtggcttccggggccgcgggggtggtggtggcttccagcgctatgaaaaccgaggaccccctggaggcaaccgtggcggcttccagaaccgagggggaggcagcggtggaggaggcaactaccgaggaggtttcaaccgcagcggaggtggtggctatagccagaaccgctggggtaacaacaaccgggataacaacaactccaacaacagaggcagctacaaccgggctccccagcaacagccgccaccacagcagcctccgccaccacagccaccaccccagcagccaccgccaccacccagctacagccctgctcggaaccccccaggggccagcacctacaataagaacagcaacatccctggctcaagcgccaataccagcacccccaccgtcagcagctacagccctccacagccgagttacagccagccaccctacaaccagggaggttacagccagggctacacagccccaccgcctccacctccaccaccacctgcctacaactatgggagctacggcggttacaacccggccccctataccccaccgccaccccccaccgcacagacctaccctcagcccagctataaccagtatcagcagtatgcccagcagtggaaccagtactatcagaaccagggccagtggccgccatactacgggaactacgactacgggagctactccgggaacacacagggtggcacaagtacacagtagccagtgtgacccagaggctcccggaggcccctgccggcttcctccaccagcgcctgcctcggcccctcctctgcccccgccagatcccgtggtgctggggatggggtcatcccagggctgcctccctccagcccactgcctcccctctgaggggcttccttcccctccatagggccaggcatttttttctggattcaaacaggcaacaatgaccttttattttctgtttgtccccacctccccagccttccacctcctgttcttcctaccttcttcctttttgactaaataatccccacctcccttgatcatacagtgaggctacagtgactgaggggagaatcccctcctgttcactctcccaaccctgctccagcccctcagcttcccagaccctcatgcagttggttgtaaattctcccaggagctgttttactgtctacttttcaggattaaaaaaaaaatcaaaacttaaaaaaaaaaaagtttaaaaagcaaaatggggagggggaggaagcagtgacttttttttggtaattatgcgcttttttttaatttttagaatttgtctttttactgtgggtgggctgttgatatttcatcaagataagcatttctttcctgagttcaggtgactgaggaagagccacaaaacaaaacacaacaaaaccaaaccacagaatcatctttaacccaactttttatacgatgccccagttccccataactttgcacacaagcttctgtgttcagttgaattgtaactgctttttgtatttggagagagtgactattgaacttgaaaccttttattccgggcgtcttggtagtttctggtgggattcagtgggtgagagggaagaaggggaggttggggggctccttcccttcagaacttgaagtttctcccactgcctcctctccagtggtctcccaggtgccagacccaaaagcttttcctacagtgataccctttatttttacttccccttgactcatatgttttaacatgattttaacaaactgcacttattaagaaatgtgtttgccctgttttgtttggtttcgttttgttttctttgaataaatgacatggcacctcctagcaggaaggaagcagggttgaaaccctgaagtgttactgcagttggccgttaattggggtgggggcctctttaaagggaaattatttactcattcattaaacaacttaactgaggga

SEQ ID NO: 365687 - DNA, 4155 bp, Homo sapiens
tccgctccggcctcggcttcgacgtaggccaacgcttcctccccagtagctcctaggccttctcgtggccgttgttttgaaaacggcgctctgattggctaggtttccgggcccgcgcccgttgccccacgcactgaccaattggcactcatgtaacatcggacgaggcacgagtgaggggggaggcggtggcggcggccattttgagccgctgccgccattggagtgggccccccccctttcccccttcgcctcctgacaggaaaggtttaagggggacagagccctgggaggccgggccgggctcgggggccaccccgggggcccgggccatggatgtgcgccgtctgaaggtgaacgaacttcgcgaggagctgcagcgccgcggcctggacactcgaggcctcaaggccgagcttgctgagcggctgcaggcggcgttggaggccgaggagcctgacgacgagcgggagctcgacgccgacgacgaaccggggcgacccgggcacatcaacgaggaggtcgagaccgaggggggctccgagctggaggggaccgcgcagccaccgccgcccgggctgcagccgcacgcggagcccggcggctactcggggccggacggacattatgccatggacaatattaccaggcagaaccaattctacgatacccaagtcatcaaacaagaaaacgagtcaggctacgagaggagaccactggaaatggagcagcagcaggcctatcgtccagaaatgaagacagagatgaagcaaggagcacccaccagcttcctcccgcctgaagcttctcaactcaagccagacaggcagcaattccagagtcgaaagaggccttatgaagaaaaccggggacgggggtactttgagcaccgagaggataggaggggccgctctcctcagcctcctgctgaagaggatgaagatgactttgatgatacccttgttgctattgacacctataactgcgacctccacttcaaggtggcccgagatcggagtagtggctatccgctcacaattgagggctttgcatacctgtggtcaggagcccgtgccagctatggggtcagaaggggccgtgtatgcttcgagatgaagatcaatgaggaaatctccgtgaagcaccttccgtctacagagcctgacccccacgtggtccgtatcggctggtccctggactcctgcagcacccagctaggcgaagagcctttctcctatggctatggaggcactgggaagaagtccaccaatagccggtttgaaaactacggagacaagtttgcagagaacgatgtgattggctgctttgcggattttgaatgtggaaatgacgtggaactgtcttttaccaagaatggaaagtggatgggcattgctttccgaatccagaaggaagccttggggggtcaggccctctatcctcatgtcctggtgaagaattgcgcagtggagttcaacttcggacagagagcagagccctactgttctgtcctcccggggtttaccttcatccagcaccttccccttagtgagcgtatccggggcaccgttggaccaaagagcaaggcagaatgtgagattctgatgatggtgggcctgcctgctgctggcaagaccacatgggccatcaaacatgcagcctccaacccttccaagaagtacaacatcctgggtaccaatgccatcatggataagatgcgggtgatgggcctacgccggcagcggaactatgctggccgctgggatgtcctgatccagcaggccacccagtgcctcaaccgcctcatccagattgctgcccgcaagaaacgcaactatatcctagatcagacaaatgtttatgggtcagcccagagacgaaaaatgagaccatttgaaggcttccagcgcaaagctattgtaatttgtcccactgacgaggacctaaaagaccgaacaataaagcgaaccgacgaggaagggaaggatgtcccagatcatgcggtcttagaaatgaaagccaacttcacgttgccagatgttggggacttcctggatgaggttctgttcattgagctgcagcgggaggaagcggacaagctagtgaggcagtacaacgaggaaggccgcaaggctgggccaccccctgaaaagcgctttgacaaccgaggtggtggtggcttccggggccgcgggggtggtggtggcttccagcgctatgaaaaccgaggaccccctggaggcaaccgtggcggcttccagaaccgagggggaggcagcggtggaggaggcaactaccgaggaggtttcaaccgcagcggaggtggtggctatagccagaaccgctggggtaacaacaaccgggataacaacaactccaacaacagaggcagctacaaccgggctccccagcaacagccgccaccacagcagcctccgccaccacagccaccaccccagcagccaccgccaccacccagctacagccctgctcggaaccccccaggggccagcacctacaataagaacagcaacatccctggctcaagcgccaataccagcacccccaccgtcagcagctacagccctccacagagctttggcttttttccctccactttccagccgagttacagccagccaccctacaaccagggaggttacagccagggctacacagccccaccgcctccacctccaccaccacctgcctacaactatgggagctacggcggttacaacccggccccctataccccaccgccaccccccaccgcacagacctaccctcagcccagctataaccagtatcagcagtatgcccagcagtggaaccagtactatcagaaccagggccagtggccgccatactacgggaactacgactacgggagctactccgggaacacacagggtggcacaagtacacagtagccagtgtgacccagaggctcccggaggcccctgccggcttcctccaccagcgcctgcctcggcccctcctctgcccccgccagatcccgtggtgctggggatggggtcatcccagggctgcctccctccagcccactgcctcccctctgaggggcttccttcccctccatagggccaggcatttttttctggattcaaacaggcaacaatgaccttttattttctgtttgtccccacctccccagccttccacctcctgttcttcctaccttcttcctttttgactaaataatccccacctcccttgatcatacagtgaggctacagtgactgaggggagaatcccctcctgttcactctcccaaccctgctccagcccctcagcttcccagaccctcatgcagttggttgtaaattctcccaggagctgttttactgtctacttttcaggattaaaaaaaaaatcaaaacttaaaaaaaaaaaagtttaaaaagcaaaatggggagggggaggaagcagtgacttttttttggtaattatgcgcttttttttaatttttagaatttgtctttttactgtgggtgggctgttgatatttcatcaagataagcatttctttcctgagttcaggtgactgaggaagagccacaaaacaaaacacaacaaaaccaaaccacagaatcatctttaacccaactttttatacgatgccccagttccccataactttgcacacaagcttctgtgttcagttgaattgtaactgctttttgtatttggagagagtgactattgaacttgaaaccttttattccgggcgtcttggtagtttctggtgggattcagtgggtgagagggaagaaggggaggttggggggctccttcccttcagaacttgaagtttctcccactgcctcctctccagtggtctcccaggtgccagacccaaaagcttttcctacagtgataccctttatttttacttccccttgactcatatgttttaacatgattttaacaaactgcacttattaagaaatgtgtttgccctgttttgtttggtttcgttttgttttctttgaataaatgacatggcacctcctagcaggaaggaagcagggttgaaaccctgaagtgttactgcagttggccgttaattggggtgggggcctctttaaagggaaattatttactcattcattaaacaacttaactgaggga

SEQ ID NO: 365688 - DNA, 3181 bp, Homo sapiens
  misc_feature (12)..(12): n is a, c, g, or t
  misc_feature (25)..(27): n is a, c, g, or t
aactggctaggnacgaggctgggtnnngtgaactataactgcgacctccacttcaaggtggcccgagatcggagtagtggctatccgctcacaattgagggctttgcatacctgtggtcaggagcccgtgccagctatggggtcagaaggggccgtgtatgcttcgagatgaagatcaatgaggaaatctccgtgaagcaccttccgtctacagagcctgacccccacgtggtccgtatcggctggtccctggactcctgcagcacccagctaggcgaagagcctttctcctatggctatggaggcactgggaagaagtccaccaatagccggtttgaaaactacggagacaagtttgcagagaacgatgtgattggctgctttgcggattttgaatgtggaaatgacgtggaactgtcttttaccaagaatggaaagtggatgggcattgctttccgaatccagaaggaagccttggggggtcaggccctctatcctcatgtcctggtgaagaattgcgcagtggagttcaacttcggacagagagcagagccctactgttctgtcctcccggggtttaccttcatccagcaccttccccttagtgagcgtatccggggcaccgttggaccaaagagcaaggcagaatgtgagattctgatgatggtgggcctgcctgctgctggcaagaccacatgggccatcaaacatgcagcctccaacccttccaagaagtacaacatcctgggtaccaatgccatcatggataagatgcgggtgatgggcctacgccggcagcggaactatgctggccgctgggatgtcctgatccagcaggccacccagtgcctcaaccgcctcatccagattgctgcccgcaagaaacgcaactatatcctagatcagacaaatgtttatgggtcagcccagagacgaaaaatgagaccatttgaaggcttccagcgcaaagctattgtaatttgtcccactgacgaggacctaaaagaccgaacaataaagcgaaccgacgaggaagggaaggatgtcccagatcatgcggtcttagaaatgaaagccaacttcacgttgccagatgttggggacttcctggatgaggttctgttcattgagctgcagcgggaggaagcggacaagctagtgaggcagtacaacgaggaaggccgcaaggctgggccaccccctgaaaagcgctttgacaaccgaggtggtggtggcttccggggccgcgggggtggtggtggcttccagcgctatgaaaaccgaggaccccctggaggcaaccgtggcggcttccagaaccgagggggaggcagcggtggaggaggcaactaccgaggaggtttcaaccgcagcggaggtggtggctatagccagaaccgctggggtaacaacaaccgggataacaacaactccaacaacagaggcagctacaaccgggctccccagcaacagccgccaccacagcagcctccgccaccacagccaccaccccagcagccaccgccaccacccagctacagccctgctcggaaccccccaggggccagcacctacaataagaacagcaacatccctggctcaagcgccaataccagcacccccaccgtcagcagctacagccctccacagccgagttacagccagccaccctacaaccagggaggttacagccagggctacacagccccaccgcctccacctccaccaccacctgcctacaactatgggagctacggcggttacaacccggccccctataccccaccgccaccccccaccgcacagacctaccctcagcccagctataaccagtatcagcagtatgcccagcagtggaaccagtactatcagaaccagggccagtggccgccatactacgggaactacgactacgggagctactccgggaacacacagggtggcacaagtacacagtagccagtgtgacccagaggctcccggaggcccctgccggcttcctccaccagcgcctgcctcggcccctcctctgcccccgccagatcccgtggtgctggggatggggtcatcccagggctgcctccctccagcccactgcctcccctctgaggggcttccttcccctccatagggccaggcatttttttctggattcaaacaggcaacaatgaccttttattttctgtttgtccccacctccccagccttccacctcctgttcttcctaccttcttcctttttgactaaataatccccacctcccttgatcatacagtgaggctacagtgactgaggggagaatcccctcctgttcactctcccaaccctgctccagcccctcagcttcccagaccctcatgcagttggttgtaaattctcccaggagctgttttactgtctacttttcaggattaaaaaaaaaatcaaaacttaaaaaaaaaaaagtttaaaaagcaaaatggggagggggaggaagcagtgacttttttttggtaattatgcgcttttttttaatttttagaatttgtctttttactgtgggtgggctgttgatatttcatcaagataagcatttctttcctgagttcaggtgactgaggaagagccacaaaacaaaacacaacaaaaccaaaccacagaatcatctttaacccaactttttatacgatgccccagttccccataactttgcacacaagcttctgtgttcagttgaattgtaactgctttttgtatttggagagagtgactattgaacttgaaaccttttattccgggcgtcttggtagtttctggtgggattcagtgggtgagagggaagaaggggaggttggggggctccttcccttcagaacttgaagtttctcccactgcctcctctccagtggtctcccaggtgccagacccaaaagcttttcctacagtgataccctttatttttacttccccttgactcatatgttttaacatgattttaacaaactgcacttattaagaaatgtgtttgccctgttttgtttggtttcgttttgttttctttgaataaatgacatggcacctcctagcaggaaggaagcagggttgaaaccctgaagtgttactgcagttggccgttaattggggtgggggcctctttaaagggaaattatttactcattcattaaacaacttaactgaggga

SEQ ID NO: 365689 - DNA, 3016 bp, Homo sapiens
ttttaaacgggcccccctcgaggccgaggtattataactgatcagacagcggatgacccccacgtggtccgtatcggctggtccctggactcctgcagcacccagctaggcgaagagcctttctcctatggctatggaggcactgggaagaagtccaccaatagccggtttgaaaactacggagacaagtttgcagagaacgatgtgattggctgctttgcggattttgaatgtggaaatgacgtggaactgtcttttaccaagaatggaaagtggatgggcattgctttccgaatccagaaggaagccttggggggtcaggccctctatcctcatgtcctggtgaagaattgcgcagtggagttcaacttcggacagagagcagagccctactgttctgtcctcccggggtttaccttcatccagcaccttccccttagtgagcgtatccggggcaccgttggaccaaagagcaaggcagaatgtgagattctgatgatggtgggcctgcctgctgctggcaagaccacatgggccatcaaacatgcagcctccaacccttccaagaagtacaacatcctgggtaccaatgccatcatggataagatgcgggtgatgggcctacgccggcagcggaactatgctggccgctgggatgtcctgatccagcaggccacccagtgcctcaaccgcctcatccagattgctgcccgcaagaaacgcaactatatcctagatcagacaaatgtttatgggtcagcccagagacgaaaaatgagaccatttgaaggcttccagcgcaaagctattgtaatttgtcccactgacgaggacctaaaagaccgaacaataaagcgaaccgacgaggaagggaaggatgtcccagatcatgcggtcttagaaatgaaagccaacttcacgttgccagatgttggggacttcctggatgaggttctgttcattgagctgcagcgggaggaagcggacaagctagtgaggcagtacaacgaggaaggccgcaaggctgggccaccccctgaaaagcgctttgacaaccgaggtggtggtggcttccggggccgcgggggtggtggtggcttccagcgctatgaaaaccgaggaccccctggaggcaaccgtggcggcttccagaaccgagggggaggcagcggtggaggaggcaactaccgaggaggtttcaaccgcagcggaggtggtggctatagccagaaccgctggggtaacaacaaccgggataacaacaactccaacaacagaggcagctacaaccgggctccccagcaacagccgccaccacagcagcctccgccaccacagccaccaccccagcagccaccgccaccacccagctacagccctgctcggaaccccccaggggccagcacctacaataagaacagcaacatccctggctcaagcgccaataccagcacccccaccgtcagcagctacagccctccacagccgagttacagccagccaccctacaaccagggaggttacagccagggctacacagccccaccgcctccacctccaccaccacctgcctacaactatgggagctacggcggttacaacccggccccctataccccaccgccaccccccaccgcacagacctaccctcagcccagctataaccagtatcagcagtatgcccagcagtggaaccagtactatcagaaccagggccagtggccgccatactacgggaactacgactacgggagctactccgggaacacacagggtggcacaagtacacagtagccagtgtgacccagaggctcccggaggcccctgccggcttcctccaccagcgcctgcctcggcccctcctctgcccccgccagatcccgtggtgctggggatggggtcatcccagggctgcctccctccagcccactgcctcccctctgaggggcttccttcccctccatagggccaggcatttttttctggattcaaacaggcaacaatgaccttttattttctgtttgtccccacctccccagccttccacctcctgttcttcctaccttcttcctttttgactaaataatccccacctcccttgatcatacagtgaggctacagtgactgaggggagaatcccctcctgttcactctcccaaccctgctccagcccctcagcttcccagaccctcatgcagttggttgtaaattctcccaggagctgttttactgtctacttttcaggattaaaaaaaaaatcaaaacttaaaaaaaaaaaagtttaaaaagcaaaatggggagggggaggaagcagtgacttttttttggtaattatgcgcttttttttaatttttagaatttgtctttttactgtgggtgggctgttgatatttcatcaagataagcatttctttcctgagttcaggtgactgaggaagagccacaaaacaaaacacaacaaaaccaaaccacagaatcatctttaacccaactttttatacgatgccccagttccccataactttgcacacaagcttctgtgttcagttgaattgtaactgctttttgtatttggagagagtgactattgaacttgaaaccttttattccgggcgtcttggtagtttctggtgggattcagtgggtgagagggaagaaggggaggttggggggctccttcccttcagaacttgaagtttctcccactgcctcctctccagtggtctcccaggtgccagacccaaaagcttttcctacagtgataccctttatttttacttccccttgactcatatgttttaacatgattttaacaaactgcacttattaagaaatgtgtttgccctgttttgtttggtttcgttttgttttctttgaataaatgacatggcacctcctagcaggaaggaagcagggttgaaaccctgaagtgttactgcagttggccgttaattggggtgggggcctctttaaagggaaattatttactcattcattaaacaacttaactgaggga

SEQ ID NO: 365690 - DNA, 4129 bp, Homo sapiens
tccgctccggcctcggcttcgacgtaggccaacgcttcctccccagtagctcctaggccttctcgtggccgttgttttgaaaacggcgctctgattggctaggtttccgggcccgcgcccgttgccccacgcactgaccaattggcactcatgtaacatcggacgaggcacgagtgaggggggaggcggtggcggcggccattttgagccgctgccgccattggagtgggccccccccctttcccccttcgcctcctgacaggaaaggtttaagggggacagagccctgggaggccgggccgggctcgggggccaccccgggggcccgggccatggatgtgcgccgtctgaaggtgaacgaacttcgcgaggagctgcagcgccgcggcctggacactcgaggcctcaaggccgagcttgctgagcggctgcaggcggcgttggaggccgaggagcctgacgacgagcgggagctcgacgccgacgacgaaccggggcgacccgggcacatcaacgaggaggtcgagaccgaggggggctccgagctggaggggaccgcgcagccaccgccgcccgggctgcagccgcacgcggagcccggcggctactcggggccggacggacattatgccatggacaatattaccaggcagaaccaattctacgatacccaagtcatcaaacaagaaaacgagtcaggctacgagaggagaccactggaaatggagcagcagcaggcctatcgtccagaaatgaagacagagatgaagcaaggagcacccaccagcttcctcccgcctgaagcttctcaactcaagccagacaggcagcaattccagagtcgaaagaggccttatgaagaaaaccggggacgggggtactttgagcaccgagaggataggaggggccgctctcctcagcctcctgctgaagaggatgaagatgactttgatgatacccttgttgctattgacacctataactgcgacctccacttcaaggtggcccgagatcggagtagtggctatccgctcacaattgagggctttgcatacctgtggtcaggagcccgtgccagctatggggtcagaaggggccgtgtatgcttcgagatgaagatcaatgaggaaatctccgtgaagcaccttccgtctacagagcctgacccccacgtggtccgtatcggctggtccctggactcctgcagcacccagctaggcgaagagcctttctcctatggctatggaggcactgggaagaagtccaccaatagccggtttgaaaactacggagacaagtttgcagagaacgatgtgattggctgctttgcggattttgaatgtggaaatgacgtggaactgtcttttaccaagaatggaaagtggatgggcattgctttccgaatccagaaggaagccttggggggtcaggccctctatcctcatgtcctggtgaagaattgcgcagtggagttcaacttcggacagagagcagagccctactgttctgtcctcccggggtttaccttcatccagcaccttccccttagtgagcgtatccggggcaccgttggaccaaagagcaaggcagaatgtgagattctgatgatggtgggcctgcctgctgctggcaagaccacatgggccatcaaacatgcagcctccaacccttccaagaagtacaacatcctgggtaccaatgccatcatggataagatgcgggtgatgggcctacgccggcagcggaactatgctggccgctgggatgtcctgatccagcaggccacccagtgcctcaaccgcctcatccagattgctgcccgcaagaaacgcaactatatcctagatcagacaaatgtttatgggtcagcccagagacgaaaaatgagaccatttgaaggcttccagcgcaaagctattgtaatttgtcccactgacgaggacctaaaagaccgaacaataaagcgaaccgacgaggaagggaaggatgtcccagatcatgcggtcttagaaatgaaagaaagccaacttcacgttgccagatgttggggacttcctggatgaggttctgttcattgagctgcagcgggaggaagcggacaagctagtgaggcagtacaacgaggaaggccgcaaggctgggccaccccctgaaaagcgctttgacaaccgaggtggtggtggcttccggggccgcgggggtggtggtggcttccagcgctatgaaaaccgaggaccccctggaggcaaccgtggcggcttccagaaccgagggggaggcagcggtggaggaggcaactaccgaggaggtttcaaccgcagcggaggtggtggctatagccagaaccgctggggtaacaacaaccgggataacaacaactccaacaacagaggcagctacaaccgggctccccagcaacagccgccaccacagcagcctccgccaccacagccaccaccccagcagccaccgccaccacccagctacagccctgctcggaaccccccaggggccagcacctacaataagaacagcaacatccctggctcaagcgccaataccagcacccccaccgtcagcagctacagccctccacagccgagttacagccagccaccctacaaccagggaggttacagccagggctacacagccccaccgcctccacctccaccaccacctgcctacaactatgggagctacggcggttacaacccggccccctataccccaccgccaccccccaccgcacagacctaccctcagcccagctataaccagtatcagcagtatgcccagcagtggaaccagtactatcagaaccagggccagtggccgccatactacgggaactacgactacgggagctactccgggaacacacagggtggcacaagtacacagtagccagtgtgacccagaggctcccggaggcccctgccggcttcctccaccagcgcctgcctcggcccctcctctgcccccgccagatcccgtggtgctggggatggggtcatcccagggctgcctccctccagcccactgcctcccctctgaggggcttccttcccctccatagggccaggcatttttttctggattcaaacaggcaacaatgaccttttattttctgtttgtccccacctccccagccttccacctcctgttcttcctaccttcttcctttttgactaaataatccccacctcccttgatcatacagtgaggctacagtgactgaggggagaatcccctcctgttcactctcccaaccctgctccagcccctcagcttcccagaccctcatgcagttggttgtaaattctcccaggagctgttttactgtctacttttcaggattaaaaaaaaaatcaaaacttaaaaaaaaaaaagtttaaaaagcaaaatggggagggggaggaagcagtgacttttttttggtaattatgcgcttttttttaatttttagaatttgtctttttactgtgggtgggctgttgatatttcatcaagataagcatttctttcctgagttcaggtgactgaggaagagccacaaaacaaaacacaacaaaaccaaaccacagaatcatctttaacccaactttttatacgatgccccagttccccataactttgcacacaagcttctgtgttcagttgaattgtaactgctttttgtatttggagagagtgactattgaacttgaaaccttttattccgggcgtcttggtagtttctggtgggattcagtgggtgagagggaagaaggggaggttggggggctccttcccttcagaacttgaagtttctcccactgcctcctctccagtggtctcccaggtgccagacccaaaagcttttcctacagtgataccctttatttttacttccccttgactcatatgttttaacatgattttaacaaactgcacttattaagaaatgtgtttgccctgttttgtttggtttcgttttgttttctttgaataaatgacatggcacctcctagcaggaaggaagcagggttgaaaccctgaagtgttactgcagttggccgttaattggggtgggggcctctttaaagggaaattatttactcattcattaaacaacttaactgaggga

SEQ ID NO: 365691 - DNA, 2832 bp, Homo sapiens
  misc_feature (2761)..(2761): n is a, c, g, or t
  misc_feature (2764)..(2764): n is a, c, g, or t
  misc_feature (2767)..(2767): n is a, c, g, or t
  misc_feature (2830)..(2830): n is a, c, g, or t
tccgctccggcctcggcttcgacgtaggccaacgcttcctccccagtagctcctaggccttctcgtggccgttgttttgaaaacggcgctctgattggctaggtttccgggcccgcgcccgttgccccacgcactgaccaattggcactcatgtaacatcggacgaggcacgagtgaggggggaggcggtggcggcggccattttgagccgctgccgccattggagtgggccccccccctttcccccttcgcctcctgacaggaaaggtttaagggggacagagccctgggaggccgggccgggctcgggggccaccccgggggcccgggccatggatgtgcgccgtctgaaggtgaacgaacttcgcgaggagctgcagcgccgcggcctggacactcgaggcctcaaggccgagcttgctgagcggctgcaggcggcgttggaggccgaggagcctgacgacgagcgggagctcgacgccgacgacgaaccggggcgacccgggcacatcaacgaggaggtcgagaccgaggggggctccgagctggaggggaccgcgcagccaccgccgcccgggctgcagccgcacgcggagcccggcggctactcggggccggacggacattatgccatggacaatattaccaggcagaaccaattctacgatacccaagtcatcaaacaagaaaacgagtcaggctacgagaggagaccactggaaatggagcagcagcaggcctatcgtccagaaatgaagacagagatgaagcaaggagcacccaccagcttcctcccgcctgaagcttctcaactcaagccagacaggcagcaattccagagtcgaaagaggccttatgaagaaaaccggggacgggggtactttgagcaccgagaggataggaggggccgctctcctcagcctcctgctgaagaggatgaagatgactttgatgatacccttgttgctattgacacctataactgcgacctccacttcaaggtggcccgagatcggagtagtggctatccgctcacaattgagggctttgcatacctgtggtcaggagcccgtgccagctatggggtcagaaggggccgtgtatgcttcgagatgaagatcaatgaggaaatctccgtgaagcaccttccgtctacagagcctgacccccacgtggtccgtatcggctggtccctggactcctgcagcacccagctaggcgaagagcctttctcctatggctatggaggcactgggaagaagtccaccaatagccggtttgaaaactacggagacaagtttgcagagaacgatgtgattggctgctttgcggattttgaatgtggaaatgacgtggaactgtcttttaccaagaatggaaagtggatgggcattgctttccgaatccagaaggaagccttggggggtcaggccctctatcctcatgtcctggtgaagaattgcgcagtggagttcaacttcggacagagagcagagccctactgttctgtcctcccggggtttaccttcatccagcaccttccccttagtgagcgtatccggggcaccgttggaccaaagagcaaggcagaatgtgagattctgatgatggtgggcctgcctgctgctggcaagaccacatgggccatcaaacatgcagcctccaacccttccaagaagtacaacatcctgggtaccaatgccatcatggataagatgcgggtgatgggcctacgccggcagcggaactatgctggccgctgggatgtcctgatccagcaggccacccagtgcctcaaccgcctcatccagattgctgcccgcaagaaacgcaactatatcctagatcagacaaatgtttatgggtcagcccagagacgaaaaatgagaccatttgaaggcttccagcgcaaagctattgtaatttgtcccactgacgaggacctaaaagaccgaacaataaagcgaaccgacgaggaagggaaggatgtcccagatcatgcggtcttagaaatgaaagccaacttcacgttgccagatgttggggacttcctggatgaggttctgttcattgagctgcagcgggaggaagcggacaagctagtgaggcagtacaacgaggaaggccgcaaggctgggccaccccctgaaaagcgctttgacaaccgaggtggtggtggcttccggggccgcgggggtggtggtggcttccagcgctatgaaaaccgaggaccccctggaggcaaccgtggcggcttccagaaccgagggggaggcagcggtggaggaggcaactaccgaggaggtttcaaccgcagcggaggtggtggctatagccagaaccgctggggtaacaacaaccgggataacaacaactccaacaacagaggcagctacaaccgggctccccagcaacagccgccaccacagcagcctccgccaccacagccaccaccccagcagccaccgccaccacccagctacagccctgctcggaaccccccaggggccagcacctacaataagaacagcaacatccctggctcaagcgccaataccagcacccccaccgtcagcagctacagccctccacagccgagttacagccagccaccctacaaccagggaggttacagccagggctacacagccccaccgcctccacctccaccaccacctgcctacaactatgggagctacggcggttacaacccggccccctataccccaccgccaccccccaccgcacagacctacccctntcnccngccctgactaaactaccacctcaggtgacttttaaaaaatgctggtttaagaaagtaaccaanaa

SEQ ID NO: 365692 - DNA, 2579 bp, Homo sapiens
tccgctccggcctcggcttcgacgtaggccaacgcttcctccccagtagctcctaggccttctcgtggccgttgttttgaaaacggcgctctgattggctaggtttccgggcccgcgcccgttgccccacgcactgaccaattggcactcatgtaacatcggacgaggcacgagtgaggggggaggcggtggcggcggccattttgagccgctgccgccattggagtgggccccccccctttcccccttcgcctcctgacaggaaaggtttaagggggacagagccctgggaggccgggccgggctcgggggccaccccgggggcccgggccatggatgtgcgccgtctgaaggtgaacgaacttcgcgaggagctgcagcgccgcggcctggacactcgaggcctcaaggccgagcttgctgagcggctgcaggcggcgttggaggccgaggagcctgacgacgagcgggagctcgacgccgacgacgaaccggggcgacccgggcacatcaacgaggaggtcgagaccgaggggggctccgagctggaggggaccgcgcagccaccgccgcccgggctgcagccgcacgcggagcccggcggctactcggggccggacggacattatgccatggacaatattaccaggcagaaccaattctacgatacccaagtcatcaaacaagaaaacgagtcaggctacgagaggagaccactggaaatggagcagcagcaggcctatcgtccagaaatgaagacagagatgaagcaaggagcacccaccagcttcctcccgcctgaagcttctcaactcaagccagacaggcagcaattccagagtcgaaagaggccttatgaagaaaaccggggacgggggtactttgagcaccgagaggataggaggggccgctctcctcagcctcctgctgaagaggatgaagatgactttgatgatacccttgttgctattgacacctataactgcgacctccacttcaaggtggcccgagatcggagtagtggctatccgctcacaattgagggctttgcatacctgtggtcaggagcccgtgccagctatggggtcagaaggggccgtgtatgcttcgagatgaagatcaatgaggaaatctccgtgaagcaccttccgtctacagagcctgacccccacgtggtccgtatcggctggtccctggactcctgcagcacccagctaggcgaagagcctttctcctatggctatggaggcactgggaagaagtccaccaatagccggtttgaaaactacggagacaagtttgcagagaacgatgtgattggctgctttgcggattttgaatgtggaaatgacgtggaactgtcttttaccaagaatggaaagtggatgggcattgctttccgaatccagaaggaagccttggggggtcaggccctctatcctcatgtcctggtgaagaattgcgcagtggagttcaacttcggacagagagcagagccctactgttctgtcctcccggggtttaccttcatccagcaccttccccttagtgagcgtatccggggcaccgttggaccaaagagcaaggcagaatgtgagattctgatgatggtgggcctgcctgctgctggcaagaccacatgggccatcaaacatgcagcctccaacccttccaagaagtacaacatcctgggtaccaatgccatcatggataagatgcgggtgatgggcctacgccggcagcggaactatgctggccgctgggatgtcctgatccagcaggccacccagtgcctcaaccgcctcatccagattgctgcccgcaagaaacgcaactatatcctagatcagacaaatgtttatgggtcagcccagagacgaaaaatgagaccatttgaaggcttccagcgcaaagctattgtaatttgtcccactgacgaggacctaaaagaccgaacaataaagcgaaccgacgaggaagggaaggatgtcccagatcatgcggtcttagaaatgaaagccaacttcacgttgccagatgttggggacttcctggatgaggttctgttcattgagctgcagcgggaggaagcggacaagctagtgaggcagtacaacgaggaaggccgcaaggctgggccaccccctgaaaagcgctttgacaaccgaggtggtggtggcttccggggccgcgggggtggtggtggcttccagcgctatgaaaaccgaggaccccctggaggcaaccgtggcggcttccagaaccgagggggaggcagcggtggaggaggcaactaccgaggaggtttcaaccgcagcggaggtggtggctatagccagaaccgctggggtaacaacaaccgggataacaacaactccaacaacagaggcagctacaaccgggctccccagcaacagccgccaccacagcagcctccgccaccacagccaccaccccagcagccaccgccaccacccagctacagccctgctcggaacccccagggcagactacaatagacagacatcctggtcaggcatacaggacccacgagagtaagctcaagagttgttttcctc

SEQ ID NO: 365693 - DNA, 2378 bp, Homo sapiens
atttttagtagagatggggttttgccatgttggccaggctggtcttgaactcctgacctcaggtgatccacccgcctcggcctcccaaagtgctgggattacaggcgtgagccaccgcgcccgcccttctgtctttgtctttcttattcactattccagttttcttcaccttctcccttctggaaggccactcttctgggtggaggggaccagacttcagaaggtactgacctcttcttcttgttctctttggggcacttccttcctcctagccaacttcacgttgccagatgttggggacttcctggatgaggttctgttcattgagctgcagcgggaggaagcggacaagctagtgaggcagtacaacgaggaaggccgcaaggctgggccaccccctgaaaagcgctttgacaaccgaggtggtggtggcttccggggccgcgggggtggtggtggcttccagcgctatgaaaaccgaggaccccctggaggcaaccgtggcggcttccagaaccgagggggaggcagcggtggaggaggcaactaccgaggaggtttcaaccgcagcggaggtggtggctatagccagaaccgctggggtaacaacaaccgggataacaacaactccaacaacagaggcagctacaaccgggctccccagcaacagccgccaccacagcagcctccgccaccacagccaccaccccagcagccaccgccaccacccagctacagccctgctcggaaccccccaggggccagcacctacaataagaacagcaacatccctggctcaagcgccaataccagcacccccaccgtcagcagctacagccctccacagccgagttacagccagccaccctacaaccagggaggttacagccagggctacacagccccaccgcctccacctccaccaccacctgcctacaactatgggagctacggcggttacaacccggccccctataccccaccgccaccccccaccgcacagacctaccctcagcccagctataaccagtatcagcagtatgcccagcagtggaaccagtactatcagaaccagggccagtggccgccatactacgggaactacgactacgggagctactccgggaacacacagggtggcacaagtacacagtagccagtgtgacccagaggctcccggaggcccctgccggcttcctccaccagcgcctgcctcggcccctcctctgcccccgccagatcccgtggtgctggggatggggtcatcccagggctgcctccctccagcccactgcctcccctctgaggggcttccttcccctccatagggccaggcatttttttctggattcaaacaggcaacaatgaccttttattttctgtttgtccccacctccccagccttccacctcctgttcttcctaccttcttcctttttgactaaataatccccacctcccttgatcatacagtgaggctacagtgactgaggggagaatcccctcctgttcactctcccaaccctgctccagcccctcagcttcccagaccctcatgcagttggttgtaaattctcccaggagctgttttactgtctacttttcaggattaaaaaaaaaatcaaaacttaaaaaaaaaaaagtttaaaaagcaaaatggggagggggaggaagcagtgacttttttttggtaattatgcgcttttttttaatttttagaatttgtctttttactgtgggtgggctgttgatatttcatcaagataagcatttctttcctgagttcaggtgactgaggaagagccacaaaacaaaacacaacaaaaccaaaccacagaatcatctttaacccaactttttatacgatgccccagttccccataactttgcacacaagcttctgtgttcagttgaattgtaactgctttttgtatttggagagagtgactattgaacttgaaaccttttattccgggcgtcttggtagtttctggtgggattcagtgggtgagagggaagaaggggaggttggggggctccttcccttcagaacttgaagtttctcccactgcctcctctccagtggtctcccaggtgccagacccaaaagcttttcctacagtgataccctttatttttacttccccttgactcatatgttttaacatgattttaacaaactgcacttattaagaaatgtgtttgccctgttttgtttggtttcgttttgttttctttgaataaatgacatggcacctcctagcaggaaggaagcagggttgaaaccctgaagtgttactgcagttggccgttaattggggtgggggcctctttaaagggaaattatttactcattcattaaacaacttaactgaggga

SEQ ID NO: 365694 - DNA, 2052 bp, Homo sapiens
tccgctccggcctcggcttcgacgtaggccaacgcttcctccccagtagctcctaggccttctcgtggccgttgttttgaaaacggcgctctgattggctaggtttccgggcccgcgcccgttgccccacgcactgaccaattggcactcatgtaacatcggacgaggcacgagtgaggggggaggcggtggcggcggccattttgagccgctgccgccattggagtgggccccccccctttcccccttcgcctcctgacaggaaaggtttaagggggacagagccctgggaggccgggccgggctcgggggccaccccgggggcccgggccatggatgtgcgccgtctgaaggtgaacgaacttcgcgaggagctgcagcgccgcggcctggacactcgaggcctcaaggccgagcttgctgagcggctgcaggcggcgttggaggccgaggagcctgacgacgagcgggagctcgacgccgacgacgaaccggggcgacccgggcacatcaacgaggagccgagttacagccagccaccctacaaccagggaggttacagccagggctacacagccccaccgcctccacctccaccaccacctgcctacaactatgggagctacggcggttacaacccggccccctataccccaccgccaccccccaccgcacagacctaccctcagcccagctataaccagtatcagcagtatgcccagcagtggaaccagtactatcagaaccagggccagtggccgccatactacgggaactacgactacgggagctactccgggaacacacagggtggcacaagtacacagtagccagtgtgacccagaggctcccggaggcccctgccggcttcctccaccagcgcctgcctcggcccctcctctgcccccgccagatcccgtggtgctggggatggggtcatcccagggctgcctccctccagcccactgcctcccctctgaggggcttccttcccctccatagggccaggcatttttttctggattcaaacaggcaacaatgaccttttattttctgtttgtccccacctccccagccttccacctcctgttcttcctaccttcttcctttttgactaaataatccccacctcccttgatcatacagtgaggctacagtgactgaggggagaatcccctcctgttcactctcccaaccctgctccagcccctcagcttcccagaccctcatgcagttggttgtaaattctcccaggagctgttttactgtctacttttcaggattaaaaaaaaaatcaaaacttaaaaaaaaaaaagtttaaaaagcaaaatggggagggggaggaagcagtgacttttttttggtaattatgcgcttttttttaatttttagaatttgtctttttactgtgggtgggctgttgatatttcatcaagataagcatttctttcctgagttcaggtgactgaggaagagccacaaaacaaaacacaacaaaaccaaaccacagaatcatctttaacccaactttttatacgatgccccagttccccataactttgcacacaagcttctgtgttcagttgaattgtaactgctttttgtatttggagagagtgactattgaacttgaaaccttttattccgggcgtcttggtagtttctggtgggattcagtgggtgagagggaagaaggggaggttggggggctccttcccttcagaacttgaagtttctcccactgcctcctctccagtggtctcccaggtgccagacccaaaagcttttcctacagtgataccctttatttttacttccccttgactcatatgttttaacatgattttaacaaactgcacttattaagaaatgtgtttgccctgttttgtttggtttcgttttgttttctttgaataaatgacatggcacctcctagcaggaaggaagcagggttgaaaccctgaagtgttactgcagttggccgttaattggggtgggggcctctttaaagggaaattatttactcattcattaaacaacttaactgaggga

SEQ ID NO: 365695 - DNA, 1797 bp, Homo sapiens
  misc_feature (29)..(29): n is a, c, g, or t
aataaggtctaggtacgaggctgggtggngcccgggataacaacaactccaacaacagaggcagctacaaccgggctccccagcaacagccgccaccacagcagcctccgccaccacagccaccaccccagcagccaccgccaccacccagctacagccctgctcggaaccccccaggggccagcacctacaataagaacagcaacatccctggctcaagcgccaataccagcacccccaccgtcagcagctacagccctccacagccgagttacagccagccaccctacaaccagggaggttacagccagggctacacagccccaccgcctccacctccaccaccacctgcctacaactatgggagctacggcggttacaacccggccccctataccccaccgccaccccccaccgcacagacctaccctcagcccagctataaccagtatcagcagtatgcccagcagtggaaccagtactatcagaaccagggccagtggccgccatactacgggaactacgactacgggagctactccgggaacacacagggtggcacaagtacacagtagccagtgtgacccagaggctcccggaggcccctgccggcttcctccaccagcgcctgcctcggcccctcctctgcccccgccagatcccgtggtgctggggatggggtcatcccagggctgcctccctccagcccactgcctcccctctgaggggcttccttcccctccatagggccaggcatttttttctggattcaaacaggcaacaatgaccttttattttctgtttgtccccacctccccagccttccacctcctgttcttcctaccttcttcctttttgactaaataatccccacctcccttgatcatacagtgaggctacagtgactgaggggagaatcccctcctgttcactctcccaaccctgctccagcccctcagcttcccagaccctcatgcagttggttgtaaattctcccaggagctgttttactgtctacttttcaggattaaaaaaaaaatcaaaacttaaaaaaaaaaaagtttaaaaagcaaaatggggagggggaggaagcagtgacttttttttggtaattatgcgcttttttttaatttttagaatttgtctttttactgtgggtgggctgttgatatttcatcaagataagcatttctttcctgagttcaggtgactgaggaagagccacaaaacaaaacacaacaaaaccaaaccacagaatcatctttaacccaactttttatacgatgccccagttccccataactttgcacacaagcttctgtgttcagttgaattgtaactgctttttgtatttggagagagtgactattgaacttgaaaccttttattccgggcgtcttggtagtttctggtgggattcagtgggtgagagggaagaaggggaggttggggggctccttcccttcagaacttgaagtttctcccactgcctcctctccagtggtctcccaggtgccagacccaaaagcttttcctacagtgataccctttatttttacttccccttgactcatatgttttaacatgattttaacaaactgcacttattaagaaatgtgtttgccctgttttgtttggtttcgttttgttttctttgaataaatgacatggcacctcctagcaggaaggaagcagggttgaaaccctgaagtgttactgcagttggccgttaattggggtgggggcctctttaaagggaaattatttactcattcattaaacaacttaactgaggga

SEQ ID NO: 365696 - DNA, 1802 bp, Homo sapiens
aaactataggctaggtacgaggctgggtgttaatcggccgaggcccggggccgcgggggtggtggtggcttccagcgctatgaaaaccgaggaccccctggaggcaaccgtggcggcaccacagccaccaccccagcagccaccgccaccacccagctacagccctgctcggaaccccccaggggccagcacctacaataagaacagcaacatccctggctcaagcgccaataccagcacccccaccgtcagcagctacagccctccacagccgagttacagccagccaccctacaaccagggaggttacagccagggctacacagccccaccgcctccacctccaccaccacctgcctacaactatgggagctacggcggttacaacccggccccctataccccaccgccaccccccaccgcacagacctaccctcagcccagctataaccagtatcagcagtatgcccagcagtggaaccagtactatcagaaccagggccagtggccgccatactacgggaactacgactacgggagctactccgggaacacacagggtggcacaagtacacagtagccagtgtgacccagaggctcccggaggcccctgccggcttcctccaccagcgcctgcctcggcccctcctctgcccccgccagatcccgtggtgctggggatggggtcatcccagggctgcctccctccagcccactgcctcccctctgaggggcttccttcccctccatagggccaggcatttttttctggattcaaacaggcaacaatgaccttttattttctgtttgtccccacctccccagccttccacctcctgttcttcctaccttcttcctttttgactaaataatccccacctcccttgatcatacagtgaggctacagtgactgaggggagaatcccctcctgttcactctcccaaccctgctccagcccctcagcttcccagaccctcatgcagttggttgtaaattctcccaggagctgttttactgtctacttttcaggattaaaaaaaaaatcaaaacttaaaaaaaaaaaagtttaaaaagcaaaatggggagggggaggaagcagtgacttttttttggtaattatgcgcttttttttaatttttagaatttgtctttttactgtgggtgggctgttgatatttcatcaagataagcatttctttcctgagttcaggtgactgaggaagagccacaaaacaaaacacaacaaaaccaaaccacagaatcatctttaacccaactttttatacgatgccccagttccccataactttgcacacaagcttctgtgttcagttgaattgtaactgctttttgtatttggagagagtgactattgaacttgaaaccttttattccgggcgtcttggtagtttctggtgggattcagtgggtgagagggaagaaggggaggttggggggctccttcccttcagaacttgaagtttctcccactgcctcctctccagtggtctcccaggtgccagacccaaaagcttttcctacagtgataccctttatttttacttccccttgactcatatgttttaacatgattttaacaaactgcacttattaagaaatgtgtttgccctgttttgtttggtttcgttttgttttctttgaataaatgacatggcacctcctagcaggaaggaagcagggttgaaaccctgaagtgttactgcagttggccgttaattggggtgggggcctctttaaagggaaattatttactcattcattaaacaacttaactgaggga

SEQ ID NO: 365697 - DNA, 1718 bp, Homo sapiens
gctcggttctcggtattggcgcttgagccagggatgttgctgttcttattgtaggtgctggcccctgtggggttccgagcagggctgtagctgggtggtggcggtggctgctggggtggtggctgtggtggcttccacgctatgaaaaccgagcacccccaccgtcagcagctacagccctccacagccgagttacagccagccaccctacaaccagggaggttacagccagggctacacagccccaccgcctccacctccaccaccacctgcctacaactatgggagctacggcggttacaacccggccccctataccccaccgccaccccccaccgcacagacctaccctcagcccagctataaccagtatcagcagtatgcccagcagtggaaccagtactatcagaaccagggccagtggccgccatactacgggaactacgactacgggagctactccgggaacacacagggtggcacaagtacacagtagccagtgtgacccagaggctcccggaggcccctgccggcttcctccaccagcgcctgcctcggcccctcctctgcccccgccagatcccgtggtgctggggatggggtcatcccagggctgcctccctccagcccactgcctcccctctgaggggcttccttcccctccatagggccaggcatttttttctggattcaaacaggcaacaatgaccttttattttctgtttgtccccacctccccagccttccacctcctgttcttcctaccttcttcctttttgactaaataatccccacctcccttgatcatacagtgaggctacagtgactgaggggagaatcccctcctgttcactctcccaaccctgctccagcccctcagcttcccagaccctcatgcagttggttgtaaattctcccaggagctgttttactgtctacttttcaggattaaaaaaaaaatcaaaacttaaaaaaaaaaaagtttaaaaagcaaaatggggagggggaggaagcagtgacttttttttggtaattatgcgcttttttttaatttttagaatttgtctttttactgtgggtgggctgttgatatttcatcaagataagcatttctttcctgagttcaggtgactgaggaagagccacaaaacaaaacacaacaaaaccaaaccacagaatcatctttaacccaactttttatacgatgccccagttccccataactttgcacacaagcttctgtgttcagttgaattgtaactgctttttgtatttggagagagtgactattgaacttgaaaccttttattccgggcgtcttggtagtttctggtgggattcagtgggtgagagggaagaaggggaggttggggggctccttcccttcagaacttgaagtttctcccactgcctcctctccagtggtctcccaggtgccagacccaaaagcttttcctacagtgataccctttatttttacttccccttgactcatatgttttaacatgattttaacaaactgcacttattaagaaatgtgtttgccctgttttgtttggtttcgttttgttttctttgaataaatgacatggcacctcctagcaggaaggaagcagggttgaaaccctgaagtgttactgcagttggccgttaattggggtgggggcctctttaaagggaaattatttactcattcattaaacaacttaactgaggga

SEQ ID NO: 365698 - DNA, 2314 bp, Homo sapiens
tccgctccggcctcggcttcgacgtaggccaacgcttcctccccagtagctcctaggccttctcgtggccgttgttttgaaaacggcgctctgattggctaggtttccgggcccgcgcccgttgccccacgcactgaccaattggcactcatgtaacatcggacgaggcacgagtgaggggggaggcggtggcggcggccattttgagccgctgccgccattggagtgggccccccccctttcccccttcgcctcctgacaggaaaggtttaagggggacagagccctgggaggccgggccgggctcgggggccaccccgggggcccgggccatggatgtgcgccgtctgaaggtgaacgaacttcgcgaggagctgcagcgccgcggcctggacactcgaggcctcaaggccgagcttgctgagcggctgcaggcggcgttggaggccgaggagcctgacgacgagcgggagctcgacgccgacgacgaaccggggcgacccgggcacatcaacgaggaggtcgagaccgaggggggctccgagctggaggggaccgcgcagccaccgccgcccgggctgcagccgcacgcggagcccggcggctactcggggccggacggacattatgccatggacaatattaccaggcagaaccaattctacgatacccaagtcatcaaacaagaaaacgagtcaggctacgagaggagaccactggaaatggagcagcagcaggcctatcgtccagaaatgaagacagagatgaagcaaggagcacccaccagcttcctcccgcctgaagcttctcaactcaagccagacaggcagcaattccagagtcgaaagaggccttatgaagaaaaccggggacgggggtactttgagcaccgagaggataggaggggccgctctcctcagcctcctgctgaagaggatgaagatgactttgatgatacccttgttgctattgacacctataactgcgacctccacttcaaggtggcccgagatcggagtagtggctatccgctcacaattgagggctttgcatacctgtggtcaggagcccgtgccagctatggggtcagaaggggccgtgtatgcttcgagatgaagatcaatgaggaaatctccgtgaagcaccttccgtctacagagcctgacccccacgtggtccgtatcggctggtccctggactcctgcagcacccagctaggcgaagagcctttctcctatggctatggaggcactgggaagaagtccaccaatagccggtttgaaaactacggagacaagtttgcagagaacgatgtgattggctgctttgcggattttgaatgtggaaatgacgtggaactgtcttttaccaagaatggaaagtggatgggcattgctttccgaatccagaaggaagccttggggggtcaggccctctatcctcatgtcctggtgaagaattgcgcagtggagttcaacttcggacagagagcagagccctactgttctgtcctcccggggtttaccttcatccagcaccttccccttagtgagcgtatccggggcaccgttggaccaaagagcaaggcagaatgtgagattctgatgatggtgggcctgcctgctgctggcaagaccacatgggccatcaaacatgcagcctccaacccttccaagaagtacaacatcctgggtaccaatgccatcatggataagatgcgggtgatgggcctacgccggcagcggaactatgctggccgctgggatgtcctgatccagcaggccacccagtgcctcaaccgcctcatccagattgctgcccgcaagaaacgcaactatatcctagatcagacaaatgtttatgggtcagcccagagacgaaaaatgagaccatttgaaggcttccagcgcaaagctattgtaatttgtcccactgacgaggacctaaaagaccgaacaataaagcgaaccgacgaggaagggaaggatgtcccagatcatgcggtcttagaaatgaaagggtctcccaggtgccagacccaaaagcttttcctacagtgataccctttatttttacttccccttgactcatatgttttaacatgattttaacaaactgcacttattaagaaatgtgtttgccctgttttgtttggtttcgttttgttttctttgaataaatgacatggcacctcctagcaggaaggaagcagggttgaaaccctgaagtgttactgcagttggccgttaattggggtgggggcctctttaaagggaaattatttactcattcattaaacaacttaactgaggga

SEQ ID NO: 365699 - DNA, 992 bp, Homo sapiens
tccgctccggcctcggcttcgacgtaggccaacgcttcctccccagtagctcctaggccttctcgtggccgttgttttgaaaacggcgctctgattggctaggtttccgggcccgcgcccgttgccccacgcactgaccaattggcactcatgtaacatcggacgaggcacgagtgaggggggaggcggtggcggcggccattttgagccgctgccgccattggagtgggccccccccctttcccccttcgcctcctgacaggaaaggtttaagggggacagagccctgggaggccgggccgggctcgggggccaccccgggggcccgggccatggatgtgcgccgtctgaaggtgaacgaacttcgcgaggagctgcagcgccgcggcctggacactcgaggcctcaaggccgagcttgctgagcggctgcaggcggcgttggaggccgaggagcctgacgacgagcgggagctcgacgccgacgacgaaccggggcgacccgggcacatcaacgaggaggtcgagaccgaggggggctccgagctggaggggaccgcgcagccaccgccgcccgggctgcagccgcacgcggagcccggcggctactcggggccggacggacattatgccatggacaatattaccaggcagaaccaattctacgatacccaagtcatcaaacaagaaaacgagtcggtctcccaggtgccagacccaaaagcttttcctacagtgataccctttatttttacttccccttgactcatatgttttaacatgattttaacaaactgcacttattaagaaatgtgtttgccctgttttgtttggtttcgttttgttttctttgaataaatgacatggcacctcctagcaggaaggaagcagggttgaaaccctgaagtgttactgcagttggccgttaattggggtgggggcctctttaaagggaaattatttactcattcattaaacaacttaactgaggga

SEQ ID NO: 365700 - DNA, 346 bp, Homo sapiens
ggatgactagcaaccgagcctttttcgaggttcttagagatgattttaacagcactggcttgacagtgtctttgcctcagagattttcttcattttcccaccagctcagtcatgcatatcaaaagaagtttatgcacaattgaaggacaccaactaaaatttgaacaaataagagatttgtaactggggatcccctggaagaatcgtctggaaattacgaccttcatctggcgattgcagctgttaaagtctccaaagaagccattcttacattgtgttgtgaaattattactctatctcaaatctgtgccagaaagaaaataaaatgtgtgtttatgtgtaaaaa

SEQ ID NO: 365701 - DNA, 366 bp, Homo sapiens
ctaaaaccgcaatgctgtggggaaacccagcctagccgcatggagaggctatgtggccatcccagctgtcccagccatttcagcccagtgtctttgcctcagagattttcttcattttcccaccagctcagtcatgcatatcaaaagaagtttatgcacaattgaaggacaccaactaaaatttgaacaaataagaggtgtgtaatcatgttgaatagaaaaactcaacatcatgaagattttaattctccctaatttaatttataaatttgtctcagtaccaataaagtttttttttttaattttagaatgagacaaactagttttgagttcagatggaaaaataaaatagcctggaaagcttta

SEQ ID NO: 365702 - DNA, 772 bp, Homo sapiens
caggatggagacccgggaccctttgagaacatcccagacgttgatagtgtaatcattgtatccagcaaacagcaggcgaccttgaagcaggaaaagttccctttggggcatgaagagaagcaaaggctggggagaaaatgcctgagagcattgtggaagtgaatttctgacacttcattgccttgaaggacagcattaggtcatagaggcgacactggggagcaaataaataaagaagcacttacttctggcttcagtttggtgacgtgatgaccacagagctacagggaaggaacaaattacaaggaggggaatctgctcccgccctggtgttgcacccactggctgtccacaggaccccctccagccttgacttccctcaggaggcctgcatacatccaacaagatgacttaagctagcaaagtagcttatggacacacaaaacctgaaccgaggctgaaatttgggtactcatattttgttggatgctcaaattccctcaatctctcctggcccacacccactagtggctgttccaactcactgctttcctaataacacttgcagtaacttacagtttattttgagacaccaggtccaaacaattttctttaagcaactaccccagtcttgctctttaatttaggaaattttcataccatactgtttgatcaaagaaatgaatagtttttaaaagttaaaagtagatttctaatacttttcaattttgtgtttctgatcttcattataatataagtaaaaataaagttt

SEQ ID NO: 365703 - DNA, 1489 bp, Homo sapiens
caggatggagacccgggaccctttgagaacatcccagacgttgatagtgtaatcattgtatccagcaaacagcaggcgaccttgaagcaggaaaagttccctttggggcatgaagagaagcaaaggctggggagaaaatgcctgagagcattgtggaagtgaatttctgacacttcattgccttgaaggacagcattaggtcatagaggcgacactggggagcaaataaataaagaagcacttacttctggcttcagtttggtgacgtgatgaccacagagctacagggaaggaacaaattacaaggaggggaatctgctcccgccctggtgttgcacccactggctgtccacaggaccccctccagccttgacttccctcaggaggcctgcatacatccaacaagatgacttaagctagcaaagtagcttatggacacacaaaacctgaaccgaggctgaaatttgggtgagaaaaatgaagcacgcagaaattcaaacgctgtctaggatcaccagctagaacacagcggagccaagatccaatcctgctgtctgcctccagagccacccttgacctaccctgcctcccaggccgcgtccccgccgaggtagccagctgtgacttccctttatctccggctaagctgcttgttggaaaagaaagcactttctcacctactggtgccccctttcatccccaaccctgccccggggcaacacagagcgagtctgatgggtctccacagaggggcttcagatgcctgatggtcgtggtagccccctgagcctgccttcatccagcctaaatgtcctctgttgctttggtttgcctcaggcccaaagacatctcattttggccactgcaccagtcagtggccacagcgccccctggtgaacaagtctgcaagattcctgggtaggctcaaataataggtgtaaacaacaggggcacaatggtgacactgcaagtcccaacattcctccagtcagcaattgaacaattacccagccacctgacctccctgcctctaacctccccatccctcctgacatcaattcactgaagccagagtaaactatggaaggctttaatctaactcagacacttttctcttttaaacaaaccaaaatctgactcacccctgcaagggctcccgtcacctacagggtccagcccaggcactcagggagccctgggatctggccccacccacctctcggctgcctgcctcccactgtgctccctcacactctgtggccgcctggagtggcagcggtccctcttcactggcagcagcaagtctgtgaccaacccctcctgctcggagctccccagttcccccactgtccaaccattattggttttcatgaaggtccctgagggccaagactgagcttttggccccagagccacgtggtatctggcaatatgggtagtaggtactgagaaggtttgctgaataagtgtgaataaataaccgatgcgg

SEQ ID NO: 365704 - DNA, 264 bp, Homo sapiens
aatcttaccactgagggagaagtccacgctggatgctccaaatatgatgctttctttggaatagatggcaacctccctatctgcccgcaggtcatagaggcgacactggggagcaaataaataaagaagcacttacttctggcttcagtttggtgacgtgatgaccacagagctacaggtaggtgctagtgacttgcgtagtttaaaagatgaaggaaaaacttcttagttttccctactgttatttcatcctttagtcccgac

SEQ ID NO: 365705 - DNA, 365 bp, Homo sapiens
  misc_feature (1)..(1): n is a, c, g, or t
  misc_feature (67)..(67): n is a, c, g, or t
naccccttagcaggaaaaaggggggggggggggttttggggttttccccccctttccccaaccactnatttctttacaaagccactttgcttgcattttattttatttttttaagagtccttcatagagctcagtcaggaaggggatggggcaccaagccaagcccccagcattgggagcggccaggccacagctgctgctcccgtagtcctcaggctgtaagcaagagacagcactggcccttggccagcgtcctaccctgcccaactccaaggactgggtatggattgctgggccctaggctcttgcttctggggctattggagggtcagtgtctgtgactgaataaagttccattttgtggt

SEQ ID NO: 365706 - DNA, 2123 bp, Homo sapiens
cccgaagtttgaggggtgtggacggtttgtgacccccttagccgaccctactcctcactggccgggacaactggtcttatcacggaggctggggccaggcagcccttcggttcgggtgggcccatggaccccagtccaacgccgagggaataggaccatccaaaagcggaaccttcgcctcagaaaaagggtgcgggacccctcctcaccgtgcggtcacggtacggacagggtagatcacaggctgagggacagagcaaagacccctgaggccggacacctggggtcctgccgggcccctccccacgagagttccctgtgtctgtgccaatcgttttcgtctttctttgccgcagtttcttttcctgtaaatcatggttaatgacattaaccttcttaccatcaggggttagttgtggttgtgataaataattactaccgttattaagcaattgcaatttgcagtgtgccaggcactgtgccaagtattttgcttcgatgatttcacgtcatcttcaaaacaacctcatgagggctgggtcagttagaacctaaacaaactagagacctggttgcaacccctcaggctctgctgatgctgtccccctttgttcctgcagcgtggaccctgccagcagccaggccatggagctctctgatgtcaccctcattgagggtgtgggtaatgaggtgatggtggtggcaggtgtggtggtgctgattctagccttggtcctagcttggctctctacctacgtagcagacagcggtagcaaccagctcctgggcgctattgtgtcagcaggcgacacatccgtcctccacctggggcatgtggaccacctggtggcaggccaaggcaaccccgagccaactgaactcccccatccatcagaggcaaatacttccctggacaagaaagccagatgaaactgatctaccagggccgcctgctacaagacccagcccgcacactgcgttctctgaacattaccgacaactgtgtgattcactgccaccgctcacccccagggtcagctgttccaggcccctcagcctccttggccccctcggccactgagccacccagccttggtgtcaatgtgggcagcctcatggtgcctgtctttgtggtgctgttgggtgtggtctggtacttccgaatcaattaccgccaattcttcacagcacctgccactgtctccctggtgggagtcaccgtcttcttcagcttcctagtatttgggatgtatggacgataaggacataggaagaaaatgaaaggcatggtctttctcctttatggcctccccacttttcctggccagagctgggcccaagggccggggagggaggggtggaaaggatgtgatggaaatctcctccataggacacaggaggcaagtatgcggcctccccttctcatccacaggagtacagatgtccctcccgtgcgagcacaactcaggtagaaatgaggatgtcatcttccttcacttttagggtcctctgaaggagttcaaagctgctggccaagctcagtggggagcctgggctctgagattccctcccacctgtggttctgactcttcccagtgtcctgcatgtctgcccccagcacccagggctgcctgcaagggcagctcagcatggccccagcacaactccgtagggagcctggagtatccttccatttctcagccaaatactcatcttttgagactgaaatcacactggcgggaatgaagattgtgccagccttctcttatgggcacctagccgccttcaccttcttcctctaccccttagcaggaatagggtgtcctcccttctttcaaagcactttgcttgcattttattttatttttttaagagtccttcatagagctcagtcaggaaggggatggggcaccaagccaagcccccagcattgggagcggccaggccacagctgctgctcccgtagtcctcaggctgtaagcaagagacagcactggcccttggccagcgtcctaccctgcccaactccaaggactgggtatggattgctgggccctaggctcttgcttctggggctattggagggtcagtgtctgtgactgaataaagttccattttgtggt

SEQ ID NO: 365707 - DNA, 2394 bp, Homo sapiens
cccgaagtttgaggggtgtggacggtttgtgacccccttagccgaccctactcctcactggccgggacaactggtcttatcacggaggctggggccaggcagcccttcggttcgggtgggcccatggaccccagtccaacgccgagggaataggaccatccaaaagcggaaccttcgcctcagaaaaagggtgcgggacccctcctcaccgtgcggtcacggtacggacagggtagatcacaggctgagggacagagcaaagacccctgaggccggacacctggggtcctgccgggcccctccccacgagagttccctgtgtctgtgccaatcgttttcgtctttctttgccgcagtttcttttcctgtaaatcatggttaatgacattaaccttcttaccatcaggggttagttgtggttgtgataaataattactaccgttattaagcaattgcaatttgcagtgtgccaggcactgtgccaagtattttgcttcgatgatttcacgtcatcttcaaaacaacctcatgagataattctttgagcaactactggggcattatattggacacttcagtaccaagagaaatacatacgatccttgtctaccaggagtctaatagaaagatggacagggctgggtcagttagaacctaaacaaactagagacctggttgcaacccctcaggctctgctgatgctgtccccctttgttcctgcagcgtggaccctgccagcagccaggccatggagctctctgatgtcaccctcattgagggtgtgggtaatgaggtgatggtggtggcaggtgtggtggtgctgattctagccttggtcctagcttggctctctacctacgtagcagacagcggtagcaaccagctcctgggcgctattgtgtcagcaggcgacacatccgtcctccacctggggcatgtggaccacctggtggcaggccaaggcaaccccgagccaactgaactcccccatccatcagaggaagacaagcaggtgcaggcagcagcagtccagaggcccccctgagatctgaggatagcacctgcctccctcccagccctggcctcatcactgtgcggctcaaattcctcaatgataccgaggagctggctgtggctaggccagaggataccgtgggtgccctgaagagcaaatacttccctggacaagaaagccagatgaaactgatctaccagggccgcctgctacaagacccagcccgcacactgcgttctctgaacattaccgacaactgtgtgattcactgccaccgctcacccccagggtcagctgttccaggcccctcagcctccttggccccctcggccactgagccacccagccttggtgtcaatgtgggcagcctcatggtgcctgtctttgtggtgctgttgggtgtggtctggtacttccgaatcaattaccgccaattcttcacagcacctgccactgtctccctggtgggagtcaccgtcttcttcagcttcctagtatttgggatgtatggacgataaggacataggaagaaaatgaaaggcatggtctttctcctttatggcctccccacttttcctggccagagctgggcccaagggccggggagggaggggtggaaaggatgtgatggaaatctcctccataggacacaggaggcaagtatgcggcctccccttctcatccacaggagtacagatgtccctcccgtgcgagcacaactcaggtagaaatgaggatgtcatcttccttcacttttagggtcctctgaaggagttcaaagctgctggccaagctcagtggggagcctgggctctgagattccctcccacctgtggttctgactcttcccagtgtcctgcatgtctgcccccagcacccagggctgcctgcaagggcagctcagcatggccccagcacaactccgtagggagcctggagtatccttccatttctcagccaaatactcatcttttgagactgaaatcacactggcgggaatgaagattgtgccagccttctcttatgggcacctagccgccttcaccttcttcctctaccccttagcaggaatagggtgtcctcccttctttcaaagcactttgcttgcattttattttatttttttaagagtccttcatagagctcagtcaggaaggggatggggcaccaagccaagcccccagcattgggagcggccaggccacagctgctgctcccgtagtcctcaggctgtaagcaagagacagcactggcccttggccagcgtcctaccctgcccaactccaaggactgggtatggattgctgggccctaggctcttgcttctggggctattggagggtcagtgtctgtgactgaataaagttccattttgtggt

SEQ ID NO: 365708 - DNA, 2412 bp, Homo sapiens
cccgaagtttgaggggtgtggacggtttgtgacccccttagccgaccctactcctcactggccgggacaactggtcttatcacggaggctggggccaggcagcccttcggttcgggtgggcccatggaccccagtccaacgccgagggaataggaccatccaaaagcggaaccttcgcctcagaaaaagggtgcgggacccctcctcaccgtgcggtcacggtacggacagggtagatcacaggctgagggacagagcaaagacccctgaggccggacacctggggtcctgccgggcccctccccacgagagttccctgtgtctgtgccaatcgttttcgtctttctttgccgcagtttcttttcctgtaaatcatggttaatgacattaaccttcttaccatcaggggttagttgtggttgtgataaataattactaccgttattaagcaattgcaatttgcagtgtgccaggcactgtgccaagtattttgcttcgatgatttcacgtcatcttcaaaacaacctcatgagggctgggtcagttagaacctaaacaaactagagacctggttgcaacccctcaggctctgctgatgctgtccccctttgttcctgcagcgtggaccctgccagcagccaggccatggagctctctgatgtcaccctcattgagggtgtgggtaatgaggtgatggtggtggcaggtgtggtggtgctgattctagccttggtcctagcttggctctctacctacgtagcagacagcggtagcaaccagctcctgggcgctattgtgtcagcaggcgacacatccgtcctccacctggggcatgtggaccacctggtggcaggccaaggcaaccccgagccaactgaactcccccatccatcagagggtaatgatgagaaggctgaagaggcgggtgaaggtcggggagactccactggggaggctggagctgggggtggtgttgagcccagccttgagcatctccttgacatccaaggcctgcccaaaagacaagcaggtgcaggcagcagcagtccagaggcccccctgagatctgaggatagcacctgcctccctcccagccctggcctcatcactgtgcggctcaaattcctcaatgataccgaggagctggctgtggctaggccagaggataccgtgggtgccctgaagagcaaatacttccctggacaagaaagccagatgaaactgatctaccagggccgcctgctacaagacccagcccgcacactgcgttctctgaacattaccgacaactgtgtgattcactgccaccgctcacccccagggtcagctgttccaggcccctcagcctccttggccccctcggccactgagccacccagccttggtgtcaatgtgggcagcctcatggtgcctgtctttgtggtgctgttgggtgtggtctggtacttccgaatcaattaccgccaattcttcacagcacctgccactgtctccctggtgggagtcaccgtcttcttcagcttcctagtatttgggatgtatggacgataaggacataggaagaaaatgaaaggcatggtctttctcctttatggcctccccacttttcctggccagagctgggcccaagggccggggagggaggggtggaaaggatgtgatggaaatctcctccataggacacaggaggcaagtatgcggcctccccttctcatccacaggagtacagatgtccctcccgtgcgagcacaactcaggtagaaatgaggatgtcatcttccttcacttttagggtcctctgaaggagttcaaagctgctggccaagctcagtggggagcctgggctctgagattccctcccacctgtggttctgactcttcccagtgtcctgcatgtctgcccccagcacccagggctgcctgcaagggcagctcagcatggccccagcacaactccgtagggagcctggagtatccttccatttctcagccaaatactcatcttttgagactgaaatcacactggcgggaatgaagattgtgccagccttctcttatgggcacctagccgccttcaccttcttcctctaccccttagcaggaatagggtgtcctcccttctttcaaagcactttgcttgcattttattttatttttttaagagtccttcatagagctcagtcaggaaggggatggggcaccaagccaagcccccagcattgggagcggccaggccacagctgctgctcccgtagtcctcaggctgtaagcaagagacagcactggcccttggccagcgtcctaccctgcccaactccaaggactgggtatggattgctgggccctaggctcttgcttctggggctattggagggtcagtgtctgtgactgaataaagttccattttgtggt

SEQ ID NO: 365709 - DNA, 1982 bp, Homo sapiens
cccgaagtttgaggggtgtggacggtttgtgacccccttagccgaccctactcctcactggccgggacaactggtcttatcacggaggctggggccaggcagcccttcggttcgggtgggcccatggaccccagtccaacgccgagggaataggaccatccaaaagcggaaccttcgcctcagaaaaaggcgtggaccctgccagcagccaggccatggagctctctgatgtcaccctcattgagggtgtgggtaatgaggtgatggtggtggcaggtgtggtggtgctgattctagccttggtcctagcttggctctctacctacgtagcagacagcggtagcaaccagctcctgggcgctattgtgtcagcaggcgacacatccgtcctccacctggggcatgtggaccacctggtggcaggccaaggcaaccccgagccaactgaactcccccatccatcagagggtaatgatgagaaggctgaagaggcgggtgaaggtcggggagactccactggggaggctggagctgggggtggtgttgagcccagccttgagcatctccttgacatccaaggcctgcccaaaagacaagcaggtgcaggcagcagcagtccagaggcccccctgagatctgaggatagcacctgcctccctcccagccctggcctcatcactgtgcggctcaaattcctcaatgataccgaggagctggctgtggctaggccagaggataccgtgggtgccctgaagagcaaatacttccctggacaagaaagccagatgaaactgatctaccagggccgcctgctacaagacccagcccgcacactgcgttctctgaacattaccgacaactgtgtgattcactgccaccgctcacccccagggtcagctgttccaggcccctcagcctccttggccccctcggccactgagccacccagccttggtgtcaatgtgggcagcctcatggtgcctgtctttgtggtgctgttgggtgtggtctggtacttccgaatcaattaccgccaattcttcacagcacctgccactgtctccctggtgggagtcaccgtcttcttcagcttcctagtatttgggatgtatggacgataaggacataggaagaaaatgaaaggcatggtctttctcctttatggcctccccacttttcctggccagagctgggcccaagggccggggagggaggggtggaaaggatgtgatggaaatctcctccataggacacaggaggcaagtatgcggcctccccttctcatccacaggagtacagatgtccctcccgtgcgagcacaactcaggtagaaatgaggatgtcatcttccttcacttttagggtcctctgaaggagttcaaagctgctggccaagctcagtggggagcctgggctctgagattccctcccacctgtggttctgactcttcccagtgtcctgcatgtctgcccccagcacccagggctgcctgcaagggcagctcagcatggccccagcacaactccgtagggagcctggagtatccttccatttctcagccaaatactcatcttttgagactgaaatcacactggcgggaatgaagattgtgccagccttctcttatgggcacctagccgccttcaccttcttcctctaccccttagcaggaatagggtgtcctcccttctttcaaagcactttgcttgcattttattttatttttttaagagtccttcatagagctcagtcaggaaggggatggggcaccaagccaagcccccagcattgggagcggccaggccacagctgctgctcccgtagtcctcaggctgtaagcaagagacagcactggcccttggccagcgtcctaccctgcccaactccaaggactgggtatggattgctgggccctaggctcttgcttctggggctattggagggtcagtgtctgtgactgaataaagttccattttgtggt

SEQ ID NO: 365710 - DNA, 1921 bp, Homo sapiens
cgggagaagccggaagagaccggaccctgaacagaatcgcagattgccagcccttttcccgacccctacggaaagacgagtccaggggccgtcctggcgaggtcaaaacatttagtctggtcttttcagcgtggaccctgccagcagccaggccatggagctctctgatgtcaccctcattgagggtgtgggtaatgaggtgatggtggtggcaggtgtggtggtgctgattctagccttggtcctagcttggctctctacctacgtagcagacagcggtagcaaccagctcctgggcgctattgtgtcagcaggcgacacatccgtcctccacctggggcatgtggaccacctggtggcaggccaaggcaaccccgagccaactgaactcccccatccatcagagggtaatgatgagaaggctgaagaggcgggtgaaggtcggggagactccactggggaggctggagctgggggtggtgttgagcccagccttgagcatctccttgacatccaaggcctgcccaaaagacaagcaggtgcaggcagcagcagtccagaggcccccctgagatctgaggatagcacctgcctccctcccagccctggcctcatcactgtgcggctcaaattcctcaatgataccgaggagctggctgtggctaggccagaggataccgtgggtgccctgaagagcaaatacttccctggacaagaaagccagatgaaactgatctaccagggccgcctgctacaagacccagcccgcacactgcgttctctgaacattaccgacaactgtgtgattcactgccaccgctcacccccagggtcagctgttccaggcccctcagcctccttggccccctcggccactgagccacccagccttggtgtcaatgtgggcagcctcatggtgcctgtctttgtggtgctgttgggtgtggtctggtacttccgaatcaattaccgccaattcttcacagcacctgccactgtctccctggtgggagtcaccgtcttcttcagcttcctagtatttgggatgtatggacgataaggacataggaagaaaatgaaaggcatggtctttctcctttatggcctccccacttttcctggccagagctgggcccaagggccggggagggaggggtggaaaggatgtgatggaaatctcctccataggacacaggaggcaagtatgcggcctccccttctcatccacaggagtacagatgtccctcccgtgcgagcacaactcaggtagaaatgaggatgtcatcttccttcacttttagggtcctctgaaggagttcaaagctgctggccaagctcagtggggagcctgggctctgagattccctcccacctgtggttctgactcttcccagtgtcctgcatgtctgcccccagcacccagggctgcctgcaagggcagctcagcatggccccagcacaactccgtagggagcctggagtatccttccatttctcagccaaatactcatcttttgagactgaaatcacactggcgggaatgaagattgtgccagccttctcttatgggcacctagccgccttcaccttcttcctctaccccttagcaggaatagggtgtcctcccttctttcaaagcactttgcttgcattttattttatttttttaagagtccttcatagagctcagtcaggaaggggatggggcaccaagccaagcccccagcattgggagcggccaggccacagctgctgctcccgtagtcctcaggctgtaagcaagagacagcactggcccttggccagcgtcctaccctgcccaactccaaggactgggtatggattgctgggccctaggctcttgcttctggggctattggagggtcagtgtctgtgactgaataaagttccattttgtggt

SEQ ID NO: 365711 - DNA, 2325 bp, Homo sapiens
cccgaagtttgaggggtgtggacggtttgtgacccccttagccgaccctactcctcactggccgggacaactggtcttatcacggaggctggggccaggcagcccttcggttcgggtgggcccatggaccccagtccaacgccgagggaataggaccatccaaaagcggaaccttcgcctcagaaaaagggtgcgggacccctcctcaccgtgcggtcacggtacggacagggtagatcacaggctgagggacagagcaaagacccctgaggccggacacctggggtcctgccgggcccctccccacgagagttccctgtgtctgtgccaatcgttttcgtctttctttgccgcagtttcttttcctgtaaatcatggttaatgacattaaccttcttaccatcaggggttagttgtggttgtgataaataattactaccgttattaagcaattgcaatttgcagtgtgccaggcactgtgccaagtattttgcttcgatgatttcacgtcatcttcaaaacaacctcatgagcgtggaccctgccagcagccaggccatggagctctctgatgtcaccctcattgagggtgtgggtaatgaggtgatggtggtggcaggtgtggtggtgctgattctagccttggtcctagcttggctctctacctacgtagcagacagcggtagcaaccagctcctgggcgctattgtgtcagcaggcgacacatccgtcctccacctggggcatgtggaccacctggtggcaggccaaggcaaccccgagccaactgaactcccccatccatcagagggtaatgatgagaaggctgaagaggcgggtgaaggtcggggagactccactggggaggctggagctgggggtggtgttgagcccagccttgagcatctccttgacatccaaggcctgcccaaaagacaagcaggtgcaggcagcagcagtccagaggcccccctgagatctgaggatagcacctgcctccctcccagccctggcctcatcactgtgcggctcaaattcctcaatgataccgaggagctggctgtggctaggccagaggataccgtgggtgccctgaagagcaaatacttccctggacaagaaagccagatgaaactgatctaccagggccgcctgctacaagacccagcccgcacactgcgttctctgaacattaccgacaactgtgtgattcactgccaccgctcacccccagggtcagctgttccaggcccctcagcctccttggccccctcggccactgagccacccagccttggtgtcaatgtgggcagcctcatggtgcctgtctttgtggtgctgttgggtgtggtctggtacttccgaatcaattaccgccaattcttcacagcacctgccactgtctccctggtgggagtcaccgtcttcttcagcttcctagtatttgggatgtatggacgataaggacataggaagaaaatgaaaggcatggtctttctcctttatggcctccccacttttcctggccagagctgggcccaagggccggggagggaggggtggaaaggatgtgatggaaatctcctccataggacacaggaggcaagtatgcggcctccccttctcatccacaggagtacagatgtccctcccgtgcgagcacaactcaggtagaaatgaggatgtcatcttccttcacttttagggtcctctgaaggagttcaaagctgctggccaagctcagtggggagcctgggctctgagattccctcccacctgtggttctgactcttcccagtgtcctgcatgtctgcccccagcacccagggctgcctgcaagggcagctcagcatggccccagcacaactccgtagggagcctggagtatccttccatttctcagccaaatactcatcttttgagactgaaatcacactggcgggaatgaagattgtgccagccttctcttatgggcacctagccgccttcaccttcttcctctaccccttagcaggaatagggtgtcctcccttctttcaaagcactttgcttgcattttattttatttttttaagagtccttcatagagctcagtcaggaaggggatggggcaccaagccaagcccccagcattgggagcggccaggccacagctgctgctcccgtagtcctcaggctgtaagcaagagacagcactggcccttggccagcgtcctaccctgcccaactccaaggactgggtatggattgctgggccctaggctcttgcttctggggctattggagggtcagtgtctgtgactgaataaagttccattttgtggt

SEQ ID NO: 365712 - DNA, 2013 bp, Homo sapiens
cccgaagtttgaggggtgtggacggtttgtgacccccttagccgaccctactcctcactggccgggacaactggtcttatcacggaggctggggccaggcagcccttcggttcgggtgggcccatggaccccagtccaacgccgagggaataggaccatccaaaagcggaaccttcgcctcagaaaaagggtgcgggacccctcctcaccgtgcggtcacgcgtggaccctgccagcagccaggccatggagctctctgatgtcaccctcattgagggtgtgggtaatgaggtgatggtggtggcaggtgtggtggtgctgattctagccttggtcctagcttggctctctacctacgtagcagacagcggtagcaaccagctcctgggcgctattgtgtcagcaggcgacacatccgtcctccacctggggcatgtggaccacctggtggcaggccaaggcaaccccgagccaactgaactcccccatccatcagagggtaatgatgagaaggctgaagaggcgggtgaaggtcggggagactccactggggaggctggagctgggggtggtgttgagcccagccttgagcatctccttgacatccaaggcctgcccaaaagacaagcaggtgcaggcagcagcagtccagaggcccccctgagatctgaggatagcacctgcctccctcccagccctggcctcatcactgtgcggctcaaattcctcaatgataccgaggagctggctgtggctaggccagaggataccgtgggtgccctgaagagcaaatacttccctggacaagaaagccagatgaaactgatctaccagggccgcctgctacaagacccagcccgcacactgcgttctctgaacattaccgacaactgtgtgattcactgccaccgctcacccccagggtcagctgttccaggcccctcagcctccttggccccctcggccactgagccacccagccttggtgtcaatgtgggcagcctcatggtgcctgtctttgtggtgctgttgggtgtggtctggtacttccgaatcaattaccgccaattcttcacagcacctgccactgtctccctggtgggagtcaccgtcttcttcagcttcctagtatttgggatgtatggacgataaggacataggaagaaaatgaaaggcatggtctttctcctttatggcctccccacttttcctggccagagctgggcccaagggccggggagggaggggtggaaaggatgtgatggaaatctcctccataggacacaggaggcaagtatgcggcctccccttctcatccacaggagtacagatgtccctcccgtgcgagcacaactcaggtagaaatgaggatgtcatcttccttcacttttagggtcctctgaaggagttcaaagctgctggccaagctcagtggggagcctgggctctgagattccctcccacctgtggttctgactcttcccagtgtcctgcatgtctgcccccagcacccagggctgcctgcaagggcagctcagcatggccccagcacaactccgtagggagcctggagtatccttccatttctcagccaaatactcatcttttgagactgaaatcacactggcgggaatgaagattgtgccagccttctcttatgggcacctagccgccttcaccttcttcctctaccccttagcaggaatagggtgtcctcccttctttcaaagcactttgcttgcattttattttatttttttaagagtccttcatagagctcagtcaggaaggggatggggcaccaagccaagcccccagcattgggagcggccaggccacagctgctgctcccgtagtcctcaggctgtaagcaagagacagcactggcccttggccagcgtcctaccctgcccaactccaaggactgggtatggattgctgggccctaggctcttgcttctggggctattggagggtcagtgtctgtgactgaataaagttccattttgtggt

SEQ ID NO: 365713 - DNA, 2428 bp, Homo sapiens
cccgaagtttgaggggtgtggacggtttgtgacccccttagccgaccctactcctcactggccgggacaactggtcttatcacggaggctggggccaggcagcccttcggttcgggtgggcccatggaccccagtccaacgccgagggaataggaccatccaaaagcggaaccttcgcctcagaaaaagggtgcgggacccctcctcaccgtgcggtcacggtacggacagggtagatcacaggctgagggacagagcaaagacccctgaggccggacacctggggtcctgccgggcccctccccacgagagttccctgtgtctgtgccaatcgttttcgtctttctttgccgcagtttcttttcctgtaaatcatggttaatgacattaaccttcttaccatcaggggttagttgtggttgtgataaataattactaccgttattaagcaattgcaatttgcagtgtgccaggcactgtgccaagtattttgcttcgatgatttcacgtcatcttcaaaacaacctcatgagataattctttgagcaactactggggcattatattggacacttcagtaccaagagaaatacatacgatccttgtctaccaggagtctaatagaaagatggacagcgtggaccctgccagcagccaggccatggagctctctgatgtcaccctcattgagggtgtgggtaatgaggtgatggtggtggcaggtgtggtggtgctgattctagccttggtcctagcttggctctctacctacgtagcagacagcggtagcaaccagctcctgggcgctattgtgtcagcaggcgacacatccgtcctccacctggggcatgtggaccacctggtggcaggccaaggcaaccccgagccaactgaactcccccatccatcagagggtaatgatgagaaggctgaagaggcgggtgaaggtcggggagactccactggggaggctggagctgggggtggtgttgagcccagccttgagcatctccttgacatccaaggcctgcccaaaagacaagcaggtgcaggcagcagcagtccagaggcccccctgagatctgaggatagcacctgcctccctcccagccctggcctcatcactgtgcggctcaaattcctcaatgataccgaggagctggctgtggctaggccagaggataccgtgggtgccctgaagagcaaatacttccctggacaagaaagccagatgaaactgatctaccagggccgcctgctacaagacccagcccgcacactgcgttctctgaacattaccgacaactgtgtgattcactgccaccgctcacccccagggtcagctgttccaggcccctcagcctccttggccccctcggccactgagccacccagccttggtgtcaatgtgggcagcctcatggtgcctgtctttgtggtgctgttgggtgtggtctggtacttccgaatcaattaccgccaattcttcacagcacctgccactgtctccctggtgggagtcaccgtcttcttcagcttcctagtatttgggatgtatggacgataaggacataggaagaaaatgaaaggcatggtctttctcctttatggcctccccacttttcctggccagagctgggcccaagggccggggagggaggggtggaaaggatgtgatggaaatctcctccataggacacaggaggcaagtatgcggcctccccttctcatccacaggagtacagatgtccctcccgtgcgagcacaactcaggtagaaatgaggatgtcatcttccttcacttttagggtcctctgaaggagttcaaagctgctggccaagctcagtggggagcctgggctctgagattccctcccacctgtggttctgactcttcccagtgtcctgcatgtctgcccccagcacccagggctgcctgcaagggcagctcagcatggccccagcacaactccgtagggagcctggagtatccttccatttctcagccaaatactcatcttttgagactgaaatcacactggcgggaatgaagattgtgccagccttctcttatgggcacctagccgccttcaccttcttcctctaccccttagcaggaatagggtgtcctcccttctttcaaagcactttgcttgcattttattttatttttttaagagtccttcatagagctcagtcaggaaggggatggggcaccaagccaagcccccagcattgggagcggccaggccacagctgctgctcccgtagtcctcaggctgtaagcaagagacagcactggcccttggccagcgtcctaccctgcccaactccaaggactgggtatggattgctgggccctaggctcttgcttctggggctattggagggtcagtgtctgtgactgaataaagttccattttgtggt

SEQ ID NO: 365714 - DNA, 2092 bp, Homo sapiens
cgggagaagccggaagagaccggaccctgaacagaatcgcagattgccagcccttttcccgacccctacggaaagacgagtccaggggccgtcctggcgaggtcaaaacatttagtctggtcttttcagtgtgccaggcactgtgccaagtattttgcttcgatgatttcacgtcatcttcaaaacaacctcatgagataattctttgagcaactactggggcattatattggacacttcagtaccaagagaaatacatacgatccttgtctaccaggagtctaatagaaagatggacagcgtggaccctgccagcagccaggccatggagctctctgatgtcaccctcattgagggtgtgggtaatgaggtgatggtggtggcaggtgtggtggtgctgattctagccttggtcctagcttggctctctacctacgtagcagacagcggtagcaaccagctcctgggcgctattgtgtcagcaggcgacacatccgtcctccacctggggcatgtggaccacctggtggcaggccaaggcaaccccgagccaactgaactcccccatccatcagagggtaatgatgagaaggctgaagaggcgggtgaaggtcggggagactccactggggaggctggagctgggggtggtgttgagcccagccttgagcatctccttgacatccaaggcctgcccaaaagacaagcaggtgcaggcagcagcagtccagaggcccccctgagatctgaggatagcacctgcctccctcccagccctggcctcatcactgtgcggctcaaattcctcaatgataccgaggagctggctgtggctaggccagaggataccgtgggtgccctgaagagcaaatacttccctggacaagaaagccagatgaaactgatctaccagggccgcctgctacaagacccagcccgcacactgcgttctctgaacattaccgacaactgtgtgattcactgccaccgctcacccccagggtcagctgttccaggcccctcagcctccttggccccctcggccactgagccacccagccttggtgtcaatgtgggcagcctcatggtgcctgtctttgtggtgctgttgggtgtggtctggtacttccgaatcaattaccgccaattcttcacagcacctgccactgtctccctggtgggagtcaccgtcttcttcagcttcctagtatttgggatgtatggacgataaggacataggaagaaaatgaaaggcatggtctttctcctttatggcctccccacttttcctggccagagctgggcccaagggccggggagggaggggtggaaaggatgtgatggaaatctcctccataggacacaggaggcaagtatgcggcctccccttctcatccacaggagtacagatgtccctcccgtgcgagcacaactcaggtagaaatgaggatgtcatcttccttcacttttagggtcctctgaaggagttcaaagctgctggccaagctcagtggggagcctgggctctgagattccctcccacctgtggttctgactcttcccagtgtcctgcatgtctgcccccagcacccagggctgcctgcaagggcagctcagcatggccccagcacaactccgtagggagcctggagtatccttccatttctcagccaaatactcatcttttgagactgaaatcacactggcgggaatgaagattgtgccagccttctcttatgggcacctagccgccttcaccttcttcctctaccccttagcaggaatagggtgtcctcccttctttcaaagcactttgcttgcattttattttatttttttaagagtccttcatagagctcagtcaggaaggggatggggcaccaagccaagcccccagcattgggagcggccaggccacagctgctgctcccgtagtcctcaggctgtaagcaagagacagcactggcccttggccagcgtcctaccctgcccaactccaaggactgggtatggattgctgggccctaggctcttgcttctggggctattggagggtcagtgtctgtgactgaataaagttccattttgtggt

SEQ ID NO: 365715 - DNA, 2024 bp, Homo sapiens
cgggagaagccggaagagaccggaccctgaacagaatcgcagattgccagcccttttcccgacccctacggaaagacgagtccaggggccgtcctggcgaggtcaaaacatttagtctggtcttttcagataattctttgagcaactactggggcattatattggacacttcagtaccaagagaaatacatacgatccttgtctaccaggagtctaatagaaagatggacagcgtggaccctgccagcagccaggccatggagctctctgatgtcaccctcattgagggtgtgggtaatgaggtgatggtggtggcaggtgtggtggtgctgattctagccttggtcctagcttggctctctacctacgtagcagacagcggtagcaaccagctcctgggcgctattgtgtcagcaggcgacacatccgtcctccacctggggcatgtggaccacctggtggcaggccaaggcaaccccgagccaactgaactcccccatccatcagagggtaatgatgagaaggctgaagaggcgggtgaaggtcggggagactccactggggaggctggagctgggggtggtgttgagcccagccttgagcatctccttgacatccaaggcctgcccaaaagacaagcaggtgcaggcagcagcagtccagaggcccccctgagatctgaggatagcacctgcctccctcccagccctggcctcatcactgtgcggctcaaattcctcaatgataccgaggagctggctgtggctaggccagaggataccgtgggtgccctgaagagcaaatacttccctggacaagaaagccagatgaaactgatctaccagggccgcctgctacaagacccagcccgcacactgcgttctctgaacattaccgacaactgtgtgattcactgccaccgctcacccccagggtcagctgttccaggcccctcagcctccttggccccctcggccactgagccacccagccttggtgtcaatgtgggcagcctcatggtgcctgtctttgtggtgctgttgggtgtggtctggtacttccgaatcaattaccgccaattcttcacagcacctgccactgtctccctggtgggagtcaccgtcttcttcagcttcctagtatttgggatgtatggacgataaggacataggaagaaaatgaaaggcatggtctttctcctttatggcctccccacttttcctggccagagctgggcccaagggccggggagggaggggtggaaaggatgtgatggaaatctcctccataggacacaggaggcaagtatgcggcctccccttctcatccacaggagtacagatgtccctcccgtgcgagcacaactcaggtagaaatgaggatgtcatcttccttcacttttagggtcctctgaaggagttcaaagctgctggccaagctcagtggggagcctgggctctgagattccctcccacctgtggttctgactcttcccagtgtcctgcatgtctgcccccagcacccagggctgcctgcaagggcagctcagcatggccccagcacaactccgtagggagcctggagtatccttccatttctcagccaaatactcatcttttgagactgaaatcacactggcgggaatgaagattgtgccagccttctcttatgggcacctagccgccttcaccttcttcctctaccccttagcaggaatagggtgtcctcccttctttcaaagcactttgcttgcattttattttatttttttaagagtccttcatagagctcagtcaggaaggggatggggcaccaagccaagcccccagcattgggagcggccaggccacagctgctgctcccgtagtcctcaggctgtaagcaagagacagcactggcccttggccagcgtcctaccctgcccaactccaaggactgggtatggattgctgggccctaggctcttgcttctggggctattggagggtcagtgtctgtgactgaataaagttccattttgtggt

SEQ ID NO: 365716 - DNA, 2008 bp, Homo sapiens
cgggagaagccggaagagaccggaccctgaacagaatcgcagattgccagcccttttcccgacccctacggaaagacgagtccaggggccgtcctggcgaggtcaaaacatttagtctggtcttttcagggctgggtcagttagaacctaaacaaactagagacctggttgcaacccctcaggctctgctgatgctgtccccctttgttcctgcagcgtggaccctgccagcagccaggccatggagctctctgatgtcaccctcattgagggtgtgggtaatgaggtgatggtggtggcaggtgtggtggtgctgattctagccttggtcctagcttggctctctacctacgtagcagacagcggtagcaaccagctcctgggcgctattgtgtcagcaggcgacacatccgtcctccacctggggcatgtggaccacctggtggcaggccaaggcaaccccgagccaactgaactcccccatccatcagagggtaatgatgagaaggctgaagaggcgggtgaaggtcggggagactccactggggaggctggagctgggggtggtgttgagcccagccttgagcatctccttgacatccaaggcctgcccaaaagacaagcaggtgcaggcagcagcagtccagaggcccccctgagatctgaggatagcacctgcctccctcccagccctggcctcatcactgtgcggctcaaattcctcaatgataccgaggagctggctgtggctaggccagaggataccgtgggtgccctgaagagcaaatacttccctggacaagaaagccagatgaaactgatctaccagggccgcctgctacaagacccagcccgcacactgcgttctctgaacattaccgacaactgtgtgattcactgccaccgctcacccccagggtcagctgttccaggcccctcagcctccttggccccctcggccactgagccacccagccttggtgtcaatgtgggcagcctcatggtgcctgtctttgtggtgctgttgggtgtggtctggtacttccgaatcaattaccgccaattcttcacagcacctgccactgtctccctggtgggagtcaccgtcttcttcagcttcctagtatttgggatgtatggacgataaggacataggaagaaaatgaaaggcatggtctttctcctttatggcctccccacttttcctggccagagctgggcccaagggccggggagggaggggtggaaaggatgtgatggaaatctcctccataggacacaggaggcaagtatgcggcctccccttctcatccacaggagtacagatgtccctcccgtgcgagcacaactcaggtagaaatgaggatgtcatcttccttcacttttagggtcctctgaaggagttcaaagctgctggccaagctcagtggggagcctgggctctgagattccctcccacctgtggttctgactcttcccagtgtcctgcatgtctgcccccagcacccagggctgcctgcaagggcagctcagcatggccccagcacaactccgtagggagcctggagtatccttccatttctcagccaaatactcatcttttgagactgaaatcacactggcgggaatgaagattgtgccagccttctcttatgggcacctagccgccttcaccttcttcctctaccccttagcaggaatagggtgtcctcccttctttcaaagcactttgcttgcattttattttatttttttaagagtccttcatagagctcagtcaggaaggggatggggcaccaagccaagcccccagcattgggagcggccaggccacagctgctgctcccgtagtcctcaggctgtaagcaagagacagcactggcccttggccagcgtcctaccctgcccaactccaaggactgggtatggattgctgggccctaggctcttgcttctggggctattggagggtcagtgtctgtgactgaataaagttccattttgtggt

SEQ ID NO: 365717 - DNA, 2521 bp, Homo sapiens
cccgaagtttgaggggtgtggacggtttgtgacccccttagccgaccctactcctcactggccgggacaactggtcttatcacggaggctggggccaggcagcccttcggttcgggtgggcccatggaccccagtccaacgccgagggaataggaccatccaaaagcggaaccttcgcctcagaaaaagggtgcgggacccctcctcaccgtgcggtcacggtacggacagggtagatcacaggctgagggacagagcaaagacccctgaggccggacacctggggtcctgccgggcccctccccacgagagttccctgtgtctgtgccaatcgttttcgtctttctttgccgcagtttcttttcctgtaaatcatggttaatgacattaaccttcttaccatcaggggttagttgtggttgtgataaataattactaccgttattaagcaattgcaatttgcagtgtgccaggcactgtgccaagtattttgcttcgatgatttcacgtcatcttcaaaacaacctcatgagggctgggtcagttagaacctaaacaaactagagacctggttgcaacccctcaggctctgctgatgctgtccccctttgttcctgcagcgtggaccctgccagcagccaggccatggagctctctgatgtcaccctcattgagggtgtgggtaatgaggtgatggtggtggcaggtgtggtggtgctgattctagccttggtcctagcttggctctctacctacgtagcagacagcggtagcaaccagctcctgggcgctattgtgtcagcaggcgacacatccgtcctccacctggggcatgtggaccacctggtggcaggccaaggcaaccccgagccaactgaactcccccatccatcagagggtaatgatgagaaggctgaagaggcgggtgaaggtcggggagactccactggggaggctggagctgggggtggtgttgagcccagccttgagcatctccttgacatccaaggcctgcccaaaagacaagcaggtgcaggcagcagcagtccagaggcccccctgagatctgaggatagcacctgcctccctcccagccctggcctcatcactgtgcggctcaaattcctcaatgataccgaggagctggctgtggctaggccagaggataccgtgggtgccctgaagagcaaatacttccctggacaagaaagccagatgaaactgatctaccagggccgcctgctacaagacccagcccgcacactgcgttctctgaacattaccgacaactgtgtgattcactgccaccgctcacccccagggtcagctgttccaggcccctcagcctccttggccccctcggccactgagccacccagccttggtgtcaatgtgggcagcctcatggtgcctgtctttgtggtgctgttgggtgtggtctggtacttccgaatcaattaccgccaattcttcacagcacctgccactgtctccctggtgggagtcaccgtcttcttcagcttcctagtatttgggatgtatggacgataaggacataggaagaaaatgaaaggcatggtctttctcctttatggcctccccacttttcctggccagagctgggcccaagggccggggagggaggggtggaaaggatgtgatggaaatctcctccataggacacaggaggcaagtatgcggcctccccttctcatccacaggagtacagatgtccctcccgtgcgagcacaactcaggtagaaatgaggatgtcatcttccttcacttttagggtcctctgaaggagttcaaagctgctggccaagctcagtggggagcctgggctctgagattccctcccacctgtggttctgactcttcccagtgtcctgcatgtctgcccccagcacccagggctgcctgcaagggcagctcagcatggccccagcacaactccgtagggagcctggagtatccttccatttctcagccaaatactcatcttttgagactgaaatcacactggcgggaatgaagattgtgccagccttctcttatgggcacctagccgccttcaccttcttcctctaccccttagcaggaatagggtgtcctcccttctttcaaagcactttgcttgcattttattttatttttttaagagtccttcatagagctcagtcaggaaggggatggggcaccaagccaagcccccagcattgggagcggccaggccacagctgctgctcccgtagtcctcaggctgtaagcaagagacagcactggcccttggccagcgtcctaccctgcccaactccaaggactgggtatggattgctgggccctaggctcttgcttctggggctattggagggtcagtgtctgtgactgaataaagttccattttgtggtcctgcagcctctttctgtgacagagaatggctttgcgctgcccccaggaaaatggtaatgagagtaggtaggccggggctaccaacgggagatgcagtttatttacacc

SEQ ID NO: 365718 - DNA, 1868 bp, Homo sapiens
cgggagaagccggaagagaccggaccctgaacagaatcgcagattgccagcccttttcccgacccctacggaaagacgagtccaggggccgtcctggcgaggtcaaaacatttagtctggtcttttcagtgtgccaggcactgtgccaagtattttgcttcgatgatttcacgtcatcttcaaaacaacctcatgagcgtggaccctgccagcagccaggccatggagctctctgatgtcaccctcattgagggtgtgggtaatgaggtgatggtggtggcaggtgtggtggtgctgattctagccttggtcctagcttggctctctacctacgtagcagacagcggtagcaaccagctcctgggcgctattgtgtcagcaggcgacacatccgtcctccacctggggcatgtggaccacctggtggcaggccaaggcaaccccgagccaactgaactcccccatccatcagaggaagacaagcaggtgcaggcagcagcagtccagaggcccccctgagatctgaggatagcacctgcctccctcccagccctggcctcatcactgtgcggctcaaattcctcaatgataccgaggagctggctgtggctaggccagaggataccgtgggtgccctgaagagcaaatacttccctggacaagaaagccagatgaaactgatctaccagggccgcctgctacaagacccagcccgcacactgcgttctctgaacattaccgacaactgtgtgattcactgccaccgctcacccccagggtcagctgttccaggcccctcagcctccttggccccctcggccactgagccacccagccttggtgtcaatgtgggcagcctcatggtgcctgtctttgtggtgctgttgggtgtggtctggtacttccgaatcaattaccgccaattcttcacagcacctgccactgtctccctggtgggagtcaccgtcttcttcagcttcctagtatttgggatgtatggacgataaggacataggaagaaaatgaaaggcatggtctttctcctttatggcctccccacttttcctggccagagctgggcccaagggccggggagggaggggtggaaaggatgtgatggaaatctcctccataggacacaggaggcaagtatgcggcctccccttctcatccacaggagtacagatgtccctcccgtgcgagcacaactcaggtagaaatgaggatgtcatcttccttcacttttagggtcctctgaaggagttcaaagctgctggccaagctcagtggggagcctgggctctgagattccctcccacctgtggttctgactcttcccagtgtcctgcatgtctgcccccagcacccagggctgcctgcaagggcagctcagcatggccccagcacaactccgtagggagcctggagtatccttccatttctcagccaaatactcatcttttgagactgaaatcacactggcgggaatgaagattgtgccagccttctcttatgggcacctagccgccttcaccttcttcctctaccccttagcaggaatagggtgtcctcccttctttcaaagcactttgcttgcattttattttatttttttaagagtccttcatagagctcagtcaggaaggggatggggcaccaagccaagcccccagcattgggagcggccaggccacagctgctgctcccgtagtcctcaggctgtaagcaagagacagcactggcccttggccagcgtcctaccctgcccaactccaaggactgggtatggattgctgggccctaggctcttgcttctggggctattggagggtcagtgtctgtgactgaataaagttccattttgtggt

SEQ ID NO: 365719 - DNA, 1903 bp, Homo sapiens
cgggagaagccggaagagaccggaccctgaacagaatcgcagattgccagcccttttcccgacccctacggaaagacgagtccaggggccgtcctggcgaggtcaaaacatttagtctggtcttttcagataattctttgagcaactactggggcattatattggacacttcagtaccaagagaaatacatacgatccttgtctaccaggagtctaatagaaagatggacagcgtggaccctgccagcagccaggccatggagctctctgatgtcaccctcattgagggtgtgggtaatgaggtgatggtggtggcaggtgtggtggtgctgattctagccttggtcctagcttggctctctacctacgtagcagacagcggtagcaaccagctcctgggcgctattgtgtcagcaggcgacacatccgtcctccacctggggcatgtggaccacctggtggcaggccaaggcaaccccgagccaactgaactcccccatccatcagaggaagacaagcaggtgcaggcagcagcagtccagaggcccccctgagatctgaggatagcacctgcctccctcccagccctggcctcatcactgtgcggctcaaattcctcaatgataccgaggagctggctgtggctaggccagaggataccgtgggtgccctgaagagcaaatacttccctggacaagaaagccagatgaaactgatctaccagggccgcctgctacaagacccagcccgcacactgcgttctctgaacattaccgacaactgtgtgattcactgccaccgctcacccccagggtcagctgttccaggcccctcagcctccttggccccctcggccactgagccacccagccttggtgtcaatgtgggcagcctcatggtgcctgtctttgtggtgctgttgggtgtggtctggtacttccgaatcaattaccgccaattcttcacagcacctgccactgtctccctggtgggagtcaccgtcttcttcagcttcctagtatttgggatgtatggacgataaggacataggaagaaaatgaaaggcatggtctttctcctttatggcctccccacttttcctggccagagctgggcccaagggccggggagggaggggtggaaaggatgtgatggaaatctcctccataggacacaggaggcaagtatgcggcctccccttctcatccacaggagtacagatgtccctcccgtgcgagcacaactcaggtagaaatgaggatgtcatcttccttcacttttagggtcctctgaaggagttcaaagctgctggccaagctcagtggggagcctgggctctgagattccctcccacctgtggttctgactcttcccagtgtcctgcatgtctgcccccagcacccagggctgcctgcaagggcagctcagcatggccccagcacaactccgtagggagcctggagtatccttccatttctcagccaaatactcatcttttgagactgaaatcacactggcgggaatgaagattgtgccagccttctcttatgggcacctagccgccttcaccttcttcctctaccccttagcaggaatagggtgtcctcccttctttcaaagcactttgcttgcattttattttatttttttaagagtccttcatagagctcagtcaggaaggggatggggcaccaagccaagcccccagcattgggagcggccaggccacagctgctgctcccgtagtcctcaggctgtaagcaagagacagcactggcccttggccagcgtcctaccctgcccaactccaaggactgggtatggattgctgggccctaggctcttgcttctggggctattggagggtcagtgtctgtgactgaataaagttccattttgtggt

SEQ ID NO: 365720 - DNA, 1782 bp, Homo sapiens
cccgaagtttgaggggtgtggacggtttgtgacccccttagccgaccctactcctcactggccgggacaactggtcttatcacggaggctggggccaggcagcccttcggttcgggtgggcccatggaccccagtccaacgccgagggaataggaccatccaaaagcggaaccttcgcctcagaaaaagggtgcgggacccctcctcaccgtgcggtcacgcgtggaccctgccagcagccaggccatggagctctctgatgtcaccctcattgagggtgtgggtaatgaggtgatgcgacacatccgtcctccacctggggcatgtggaccacctggtggcaggccaaggcaaccccgagccaactgaactcccccatccatcagaggaagacaagcaggtgcaggcagcagcagtccagaggcccccctgagatctgaggatagcacctgcctccctcccagccctggcctcatcactgtgcggctcaaattcctcaatgataccgaggagctggctgtggctaggccagaggataccgtgggtgccctgaagagcaaatacttccctggacaagaaagccagatgaaactgatctaccagggccgcctgctacaagacccagcccgcacactgcgttctctgaacattaccgacaactgtgtgattcactgccaccgctcacccccagggtcagctgttccaggcccctcagcctccttggccccctcggccactgagccacccagccttggtgtcaatgtgggcagcctcatggtgcctgtctttgtggtgctgttgggtgtggtctggtacttccgaatcaattaccgccaattcttcacagcacctgccactgtctccctggtgggagtcaccgtcttcttcagcttcctagtatttgggatgtatggacgataaggacataggaagaaaatgaaaggcatggtctttctcctttatggcctccccacttttcctggccagagctgggcccaagggccggggagggaggggtggaaaggatgtgatggaaatctcctccataggacacaggaggcaagtatgcggcctccccttctcatccacaggagtacagatgtccctcccgtgcgagcacaactcaggtagaaatgaggatgtcatcttccttcacttttagggtcctctgaaggagttcaaagctgctggccaagctcagtggggagcctgggctctgagattccctcccacctgtggttctgactcttcccagtgtcctgcatgtctgcccccagcacccagggctgcctgcaagggcagctcagcatggccccagcacaactccgtagggagcctggagtatccttccatttctcagccaaatactcatcttttgagactgaaatcacactggcgggaatgaagattgtgccagccttctcttatgggcacctagccgccttcaccttcttcctctaccccttagcaggaatagggtgtcctcccttctttcaaagcactttgcttgcattttattttatttttttaagagtccttcatagagctcagtcaggaaggggatggggcaccaagccaagcccccagcattgggagcggccaggccacagctgctgctcccgtagtcctcaggctgtaagcaagagacagcactggcccttggccagcgtcctaccctgcccaactccaaggactgggtatggattgctgggccctaggctcttgcttctggggctattggagggtcagtgtctgtgactgaataaagttccattttgtggt

SEQ ID NO: 365721 - DNA, 1693 bp, Homo sapiens
cccgaagtttgaggggtgtggacggtttgtgacccccttagccgaccctactcctcactggccgggacaactggtcttatcacggaggctggggccaggcagcccttcggttcgggtgggcccatggaccccagtccaacgccgagggaataggaccatccaaaagcggaaccttcgcctcagaaaaaggcgtggaccctgccagcagccaggccatggagctctctgatgtcaccctcattgagggtgtgggtaatgaggtgatggtggtggcaggtgtggtggtgctgattctagccttggtcctagcttggctctctacctacgtagcagacagcggtagcaaccagctcctgggcgctattgtgtcagcaggcgacacatccgtcctccacctggggcatgtggaccacctggtggcaggccaaggcaaccccgagccaactgaactcccccatccatcagaggcaaatacttccctggacaagaaagccagatgaaactgatctaccagggccgcctgctacaagacccagcccgcacactgcgttctctgaacattaccgacaactgtgtgattcactgccaccgctcacccccagggtcagctgttccaggcccctcagcctccttggccccctcggccactgagccacccagccttggtgtcaatgtgggcagcctcatggtgcctgtctttgtggtgctgttgggtgtggtctggtacttccgaatcaattaccgccaattcttcacagcacctgccactgtctccctggtgggagtcaccgtcttcttcagcttcctagtatttgggatgtatggacgataaggacataggaagaaaatgaaaggcatggtctttctcctttatggcctccccacttttcctggccagagctgggcccaagggccggggagggaggggtggaaaggatgtgatggaaatctcctccataggacacaggaggcaagtatgcggcctccccttctcatccacaggagtacagatgtccctcccgtgcgagcacaactcaggtagaaatgaggatgtcatcttccttcacttttagggtcctctgaaggagttcaaagctgctggccaagctcagtggggagcctgggctctgagattccctcccacctgtggttctgactcttcccagtgtcctgcatgtctgcccccagcacccagggctgcctgcaagggcagctcagcatggccccagcacaactccgtagggagcctggagtatccttccatttctcagccaaatactcatcttttgagactgaaatcacactggcgggaatgaagattgtgccagccttctcttatgggcacctagccgccttcaccttcttcctctaccccttagcaggaatagggtgtcctcccttctttcaaagcactttgcttgcattttattttatttttttaagagtccttcatagagctcagtcaggaaggggatggggcaccaagccaagcccccagcattgggagcggccaggccacagctgctgctcccgtagtcctcaggctgtaagcaagagacagcactggcccttggccagcgtcctaccctgcccaactccaaggactgggtatggattgctgggccctaggctcttgcttctggggctattggagggtcagtgtctgtgactgaataaagttccattttgtggt

SEQ ID NO: 365722 - DNA, 1565 bp, Homo sapiens
cccgaagtttgaggggtgtggacggtttgtgacccccttagccgaccctactcctcactggccgggacaactggtcttatcacggaggctggggccaggcagcccttcggttcgggtgggcccatggaccccagtccaacgccgagggaataggaccatccaaaagcggaaccttcgcctcagaaaaagggtgcgggacccctcctcaccgtgcggtcacggtacggacagggtagatcacaggctgagggacagagcaaagacccctgaggccggacacctggggtcctgccgggcccctccccacgagagttccctgtgtctgtgccaatcgttttcgtctttctttgccgcagtttcttttcctgtaaatcatggttaatgacattaaccttcttaccatcaggggttagttgtggttgtgataaataattactaccgttattaagcaattgcaatttgcagtgtgccaggcactgtgccaagtattttgcttcgatgatttcacgtcatcttcaaaacaacctcatgagcttggtgtcaatgtgggcagcctcatggtgcctgtctttgtggtgctgttgggtgtggtctggtacttccgaatcaattaccgccaattcttcacagcacctgccactgtctccctggtgggagtcaccgtcttcttcagcttcctagtatttgggatgtatggacgataaggacataggaagaaaatgaaaggcatggtctttctcctttatggcctccccacttttcctggccagagctgggcccaagggccggggagggaggggtggaaaggatgtgatggaaatctcctccataggacacaggaggcaagtatgcggcctccccttctcatccacaggagtacagatgtccctcccgtgcgagcacaactcaggtagaaatgaggatgtcatcttccttcacttttagggtcctctgaaggagttcaaagctgctggccaagctcagtggggagcctgggctctgagattccctcccacctgtggttctgactcttcccagtgtcctgcatgtctgcccccagcacccagggctgcctgcaagggcagctcagcatggccccagcacaactccgtagggagcctggagtatccttccatttctcagccaaatactcatcttttgagactgaaatcacactggcgggaatgaagattgtgccagccttctcttatgggcacctagccgccttcaccttcttcctctaccccttagcaggaatagggtgtcctcccttctttcaaagcactttgcttgcattttattttatttttttaagagtccttcatagagctcagtcaggaaggggatggggcaccaagccaagcccccagcattgggagcggccaggccacagctgctgctcccgtagtcctcaggctgtaagcaagagacagcactggcccttggccagcgtcctaccctgcccaactccaaggactgggtatggattgctgggccctaggctcttgcttctggggctattggagggtcagtgtctgtgactgaataaagttccattttgtggt

SEQ ID NO: 365723 - DNA, 2193 bp, Homo sapiens
cccgaagtttgaggggtgtggacggtttgtgacccccttagccgaccctactcctcactggccgggacaactggtcttatcacggaggctggggccaggcagcccttcggttcgggtgggcccatggaccccagtccaacgccgagggaataggaccatccaaaagcggaaccttcgcctcagaaaaagggtgcgggacccctcctcaccgtgcggtcacggtacggacagggtagatcacaggctgagggacagagcaaagacccctgaggccggacacctggggtcctgccgggcccctccccacgagagttccctgtgtctgtgccaatcgttttcgtctttctttgccgcagtttcttttcctgtaaatcatggttaatgacattaaccttcttaccatcaggggttagttgtggttgtgataaataattactaccgttattaagcaattgcaatttgcagtgtgccaggcactgtgccaagtattttgcttcgatgatttcacgtcatcttcaaaacaacctcatgagggctgggtcagttagaacctaaacaaactagagacctggttgcaacccctcaggctctgctgatgctgtccccctttgttcctgcagcgtggaccctgccagcagccaggccatggagctctctgatgtcaccctcattgagggtgtgggtaatgaggtgatggtggtggcaggtgtggtggtgctgattctagccttggtcctagcttggctctctacctacgtagcagacagcggtagcaaccagctcctgggcgctattgtgtcagcaggcgacacatccgtcctccacctggggcatgtggaccacctggtggcaggccaaggcaaccccgagccaactgaactcccccatccatcagagggtaatgatgagaaggctgaagaggcgggtgaaggtcggggagactccactggggaggctggagctgggggtggtgttgagcccagccttgagcatctccttgacatccaaggcctgcccaaaagacaagcaggtgcaggcagcagcagtccagaggcccccctgagatctgaggatagcacctgcctccctcccagccctggcctcatcactgtgcggctcaaattcctcaatgataccgaggagctggctgtggctaggccagaggataccgtgggtgccctgaagagcaaatacttccctggacaagaaagccagatgaaactgatctaccagggccgcctgctacaagacccagcccgcacactgcgttctctgaacattaccgacaactgtgtgattcactgccaccgctcacccccagggtcagctgttccaggcccctcagcctccttggccccctcggccactgagccacccagccttggtgtcaatgtgggcagcctcatggtgcctgtctttgtggtgctgttgggtgtggtctggtacttccgaatcaattaccgccaattcttcacagcacctgccactgtctccctggtgggagtcaccgtcttcttcagcttcctagtatttgggatgtatggacgataaggacataggaagaaaatgaaagggtcctctgaaggagttcaaagctgctggccaagctcagtggggagcctgggctctgagattccctcccacctgtggttctgactcttcccagtgtcctgcatgtctgcccccagcacccagggctgcctgcaagggcagctcagcatggccccagcacaactccgtagggagcctggagtatccttccatttctcagccaaatactcatcttttgagactgaaatcacactggcgggaatgaagattgtgccagccttctcttatgggcacctagccgccttcaccttcttcctctaccccttagcaggaatagggtgtcctcccttctttcaaagcactttgcttgcattttattttatttttttaagagtccttcatagagctcagtcaggaaggggatggggcaccaagccaagcccccagcattgggagcggccaggccacagctgctgctcccgtagtcctcaggctgtaagcaagagacagcactggcccttggccagcgtcctaccctgcccaactccaaggactgggtatggattgctgggccctaggctcttgcttctggggctattggagggtcagtgtctgtgactgaataaagttccattttgtggt

SEQ ID NO: 365724 - DNA, 1949 bp, Homo sapiens
cccgaagtttgaggggtgtggacggtttgtgacccccttagccgaccctactcctcactggccgggacaactggtcttatcacggaggctggggccaggcagcccttcggttcgggtgggcccatggaccccagtccaacgccgagggaataggaccatccaaaagcggaaccttcgcctcagaaaaagggtgcgggacccctcctcaccgtgcggtcacggtacggacagggtagatcacaggctgagggacagagcaaagacccctgaggccggacacctggggtcctgccgggcccctccccacgagagttccctgtgtctgtgccaatcgttttcgtctttctttgccgcagtttcttttcctgtaaatcatggttaatgacattaaccttcttaccatcaggggttagttgtggttgtgataaataattactaccgttattaagcaattgcaatttgcagtgtgccaggcactgtgccaagtattttgcttcgatgatttcacgtcatcttcaaaacaacctcatgagggctgggtcagttagaacctaaacaaactagagacctggttgcaacccctcaggctctgctgatgctgtccccctttgttcctgcagcgtggaccctgccagcagccaggccatggagctctctgatgtcaccctcattgagggtgtgggtaatgaggtgatggtggtggcaggtgtggtggtgctgattctagccttggtcctagcttggctctctacctacgtagcagacagcggtagcaaccagctcctgggcgctattgtgtcagcaggcgacacatccgtcctccacctggggcatgtggaccacctggtggcaggccaaggcaaccccgagccaactgaactcccccatccatcagagggtaatgatgagaaggctgaagaggcgggtgaaggtcggggagactccactggggaggctggagctgggggtggtgttgagcccagccttgagcatctccttgacatccaaggcctgcccaaaagacaagcaggtgcaggcagcagcagtccagaggcccccctgagatctgaggatagcacctgcctccctcccagccctggcctcatcactgtgcggctcaaattcctcaatgataccgaggagctggctgtggctaggccagaggataccgtgggtgccctgaagagggtgagtggcctgggaagtgggaagctgcttgtgctcatcccccagcccttggttgcctctaaggaggctggtgcagacatgggagctgcagcaaagtgtaagatccagcccctaccaagggcaggtagatactttcttagaaatacacccttcaggccgggtgcagtggctcccgggactttgggaggccgaggcgggtgcatcacgaggttaggagttcgagaccagcctgaccaacatggtgaaaccccatctctactaaacatacaaaaatcagccgggcgtggtggcgcacgcctgcaatcccagctactcaggaggctgaggcaggagaatcgcttgaacccaggaggtggaggttgcagtgagccgagattgcgccactgcactccagcctgggcgacagagtgagactccatctaaaaaaacaaaacaaacaaatacacccctcattagttaaggataaagatgaggggggcctgtcgcggtggctcacgcctgtaatcccagcactttgggaggccaaggcgggcagatcacaaggtcaagatatcaagaccatcctggccagcatggtgaaaccctgtctctactaaaaaaaaaaatacaaaaattagctgggcatggtggcgcactcctgtagtcccagctactcgggagggtgaggcaggagaattgcttgaacccgggaggcagaggttgcagtgagccgagatcgcgccactgcactccagcctggcaacagagtgagactccgtctc

SEQ ID NO: 365725 - DNA, 1088 bp, Homo sapiens
cccgaagtttgaggggtgtggacggtttgtgacccccttagccgaccctactcctcactggccgggacaactggtcttatcacggaggctggggccaggcagcccttcggttcgggtgggcccatggaccccagtccaacgccgagggaataggaccatccaaaagcggaaccttcgcctcagaaaaaggcgtggaccctgccagcagccaggccatggagctctctgatgtcaccctcattgagggtgtgggtaatgaggtgatggtggtggcaggtgtggtggtgctgattctagccttggtcctagcttggctctctacctacgtagcagacagcggtagcaaccagctcctgggcgctattgtgtcagcaggcgacacatccgtcctccacctggggcatgtggaccacctggtggcaggccaaggcaaccccgagccaactgaactcccccatccatcagaggggtcctctgaaggagttcaaagctgctggccaagctcagtggggagcctgggctctgagattccctcccacctgtggttctgactcttcccagtgtcctgcatgtctgcccccagcacccagggctgcctgcaagggcagctcagcatggccccagcacaactccgtagggagcctggagtatccttccatttctcagccaaatactcatcttttgagactgaaatcacactggcgggaatgaagattgtgccagccttctcttatgggcacctagccgccttcaccttcttcctctaccccttagcaggaatagggtgtcctcccttctttcaaagcactttgcttgcattttattttatttttttaagagtccttcatagagctcagtcaggaaggggatggggcaccaagccaagcccccagcattgggagcggccaggccacagctgctgctcccgtagtcctcaggctgtaagcaagagacagcactggcccttggccagcgtcctaccctgcccaactccaaggactgggtatggattgctgggccctaggctcttgcttctggggctattggagggtcagtgtctgtgactgaataaagttccattttgtggt

SEQ ID NO: 365726 - DNA, 560 bp, Homo sapiens
cccgaagtttgaggggtgtggacggtttgtgacccccttagccgaccctactcctcactggccgggacaactggtcttatcacggaggctggggccaggcagcccttcggttcgggtgggcccatggaccccagtccaacgccgagggaataggaccatccaaaagcggaaccttcgcctcagaaaaagggtgcgggacccctcctcaccgtgcggtcacggtacggacagggtagatcacaggctgagggacagagcaaagacccctgaggccggacacctggggtcctgccgggcccctccccacgagagttccctgtgtctgtgccaatcgttttcgtctttctttgccgcagtttcttttcctgtaaatcatggttaatgacattaaccttcttaccatcaggggttagttgtggttgtgataaataattactaccgttattaagcaattgcaatttgcagtgtgccaggcactgtgccaagtattttgcttcgatgatttcacgtcatcttcaaaacaacctcatgaggtaggtactgtttttaaccccatttta

SEQ ID NO: 365727 - DNA, 611 bp, Homo sapiens
ctagtaagacgcaagactggggttataattagttgtttttctaactccagggccggtatattaaataaggatgttgatgtgttccacagataattctttgagcaactactggggcattatattggacacttcagtaccaagagaaatacatacgatccttgtctaccaggagtctaatagaaagatggacaggtacataagtataatgaagttttataggtgctgtgagaatagtctgataatggtaatcaccagactggatttgcccagggacagctgtgaaagcagcagattctccaagggaaatagtaggtactccaaggagcaagcagggacccttcctgcctttctaagaaactgcagcagcagaaccttcacagtgaaagaagagagactgagatatggattgtgagagctgttatggaatctttttcaaatcactccacttggggagtggtcattgcaggagtgggcccatggtgacccaggaaggtggtgcttctggtgtctgtcccaagttgctccccagggcttgccagaagtttcagaggcggcacataatgtctgctgcatagtatctgcccgcggtccctacagagttatcgttttag

SEQ ID NO: 365728 - DNA, 2150 bp, Homo sapiens
cccgaagtttgaggggtgtggacggtttgtgacccccttagccgaccctactcctcactggccgggacaactggtcttatcacggaggctggggccaggcagcccttcggttcgggtgggcccatggaccccagtccaacgccgagggaataggaccatccaaaagcggaaccttcgcctcagaaaaagggtgcgggacccctcctcaccgtgcggtcacgtgtgccaggcactgtgccaagtattttgcttcgatgatttcacgtcatcttcaaaacaacctcatgagataattctttgagcaactactggggcattatattggacacttcagtaccaagagaaatacatacgatccttgtctaccaggagtctaatagaaagatggacagggctgggtcagttagaacctaaacaaactagagacctggttgcaacccctcaggctctgctgatgctgtccccctttgttcctgcagcgtggaccctgccagcagccaggccatggagctctctgatgtcaccctcattgagggtgtgggtaatgaggtgatggtggtggcaggtgtggtggtgctgattctagccttggtcctagcttggctctctacctacgtagcagacagcggtagcaaccagctcctgggcgctattgtgtcagcaggcgacacatccgtcctccacctggggcatgtggaccacctggtggcaggccaaggcaaccccgagccaactgaactcccccatccatcagaggaagacaagcaggtgcaggcagcagcagtccagaggcccccctgagatctgaggatagcacctgcctccctcccagccctggcctcatcactgtgcggctcaaattcctcaatgataccgaggagctggctgtggctaggccagaggataccgtgggtgccctgaagagcaaatacttccctggacaagaaagccagatgaaactgatctaccagggccgcctgctacaagacccagcccgcacactgcgttctctgaacattaccgacaactgtgtgattcactgccaccgctcacccccagggtcagctgttccaggcccctcagcctccttggccccctcggccactgagccacccagccttggtgtcaatgtgggcagcctcatggtgcctgtctttgtggtgctgttgggtgtggtctggtacttccgaatcaattaccgccaattcttcacagcacctgccactgtctccctggtgggagtcaccgtcttcttcagcttcctagtatttgggatgtatggacgataaggacataggaagaaaatgaaaggcatggtctttctcctttatggcctccccacttttcctggccagagctgggcccaagggccggggagggaggggtggaaaggatgtgatggaaatctcctccataggacacaggaggcaagtatgcggcctccccttctcatccacaggagtacagatgtccctcccgtgcgagcacaactcaggtagaaatgaggatgtcatcttccttcacttttagggtcctctgaaggagttcaaagctgctggccaagctcagtggggagcctgggctctgagattccctcccacctgtggttctgactcttcccagtgtcctgcatgtctgcccccagcacccagggctgcctgcaagggcagctcagcatggccccagcacaactccgtagggagcctggagtatccttccatttctcagccaaatactcatcttttgagactgaaatcacactggcgggaatgaagattgtgccagccttctcttatgggcacctagccgccttcaccttcttcctctaccccttagcaggaatagggtgtcctcccttctttcaaagcactttgcttgcattttattttatttttttaagagtccttcatagagctcagtcaggaaggggatggggcaccaagccaagcccccagcattgggagcggccaggccacagctgctgctcccgtagtcctcaggctgtaagcaagagacagcactggcccttggccagcgtcctaccctgcccaactccaaggactgggtatggattgctgggccctaggctcttgcttctggggctattggagggtcagtgtctgtgactgaataaagttccattttgtggt

SEQ ID NO: 365729 - DNA, 2058 bp, Homo sapiens
cgggagaagccggaagagaccggaccctgaacagaatcgcagattgccagcccttttcccgacccctacggaaagacgagtccaggggccgtcctggcgaggtcaaaacatttagtctggtcttttcagtgtgccaggcactgtgccaagtattttgcttcgatgatttcacgtcatcttcaaaacaacctcatgagataattctttgagcaactactggggcattatattggacacttcagtaccaagagaaatacatacgatccttgtctaccaggagtctaatagaaagatggacagggctgggtcagttagaacctaaacaaactagagacctggttgcaacccctcaggctctgctgatgctgtccccctttgttcctgcagcgtggaccctgccagcagccaggccatggagctctctgatgtcaccctcattgagggtgtgggtaatgaggtgatggtggtggcaggtgtggtggtgctgattctagccttggtcctagcttggctctctacctacgtagcagacagcggtagcaaccagctcctgggcgctattgtgtcagcaggcgacacatccgtcctccacctggggcatgtggaccacctggtggcaggccaaggcaaccccgagccaactgaactcccccatccatcagaggaagacaagcaggtgcaggcagcagcagtccagaggcccccctgagatctgaggatagcacctgcctccctcccagccctggcctcatcactgtgcggctcaaattcctcaatgataccgaggagctggctgtggctaggccagaggataccgtgggtgccctgaagagcaaatacttccctggacaagaaagccagatgaaactgatctaccagggccgcctgctacaagacccagcccgcacactgcgttctctgaacattaccgacaactgtgtgattcactgccaccgctcacccccagggtcagctgttccaggcccctcagcctccttggccccctcggccactgagccacccagccttggtgtcaatgtgggcagcctcatggtgcctgtctttgtggtgctgttgggtgtggtctggtacttccgaatcaattaccgccaattcttcacagcacctgccactgtctccctggtgggagtcaccgtcttcttcagcttcctagtatttgggatgtatggacgataaggacataggaagaaaatgaaaggcatggtctttctcctttatggcctccccacttttcctggccagagctgggcccaagggccggggagggaggggtggaaaggatgtgatggaaatctcctccataggacacaggaggcaagtatgcggcctccccttctcatccacaggagtacagatgtccctcccgtgcgagcacaactcaggtagaaatgaggatgtcatcttccttcacttttagggtcctctgaaggagttcaaagctgctggccaagctcagtggggagcctgggctctgagattccctcccacctgtggttctgactcttcccagtgtcctgcatgtctgcccccagcacccagggctgcctgcaagggcagctcagcatggccccagcacaactccgtagggagcctggagtatccttccatttctcagccaaatactcatcttttgagactgaaatcacactggcgggaatgaagattgtgccagccttctcttatgggcacctagccgccttcaccttcttcctctaccccttagcaggaatagggtgtcctcccttctttcaaagcactttgcttgcattttattttatttttttaagagtccttcatagagctcagtcaggaaggggatggggcaccaagccaagcccccagcattgggagcggccaggccacagctgctgctcccgtagtcctcaggctgtaagcaagagacagcactggcccttggccagcgtcctaccctgcccaactccaaggactgggtatggattgctgggccctaggctcttgcttctggggctattggagggtcagtgtctgtgactgaataaagttccattttgtggt

SEQ ID NO: 365730 - DNA, 1632 bp, Homo sapiens
cgggagaagccggaagagaccggaccctgaacagaatcgcagattgccagcccttttcccgacccctacggaaagacgagtccaggggccgtcctggcgaggtcaaaacatttagtctggtcttttcagcgtggaccctgccagcagccaggccatggagctctctgatgtcaccctcattgagggtgtgggtaatgaggtgatggtggtggcaggtgtggtggtgctgattctagccttggtcctagcttggctctctacctacgtagcagacagcggtagcaaccagctcctgggcgctattgtgtcagcaggcgacacatccgtcctccacctggggcatgtggaccacctggtggcaggccaaggcaaccccgagccaactgaactcccccatccatcagaggcaaatacttccctggacaagaaagccagatgaaactgatctaccagggccgcctgctacaagacccagcccgcacactgcgttctctgaacattaccgacaactgtgtgattcactgccaccgctcacccccagggtcagctgttccaggcccctcagcctccttggccccctcggccactgagccacccagccttggtgtcaatgtgggcagcctcatggtgcctgtctttgtggtgctgttgggtgtggtctggtacttccgaatcaattaccgccaattcttcacagcacctgccactgtctccctggtgggagtcaccgtcttcttcagcttcctagtatttgggatgtatggacgataaggacataggaagaaaatgaaaggcatggtctttctcctttatggcctccccacttttcctggccagagctgggcccaagggccggggagggaggggtggaaaggatgtgatggaaatctcctccataggacacaggaggcaagtatgcggcctccccttctcatccacaggagtacagatgtccctcccgtgcgagcacaactcaggtagaaatgaggatgtcatcttccttcacttttagggtcctctgaaggagttcaaagctgctggccaagctcagtggggagcctgggctctgagattccctcccacctgtggttctgactcttcccagtgtcctgcatgtctgcccccagcacccagggctgcctgcaagggcagctcagcatggccccagcacaactccgtagggagcctggagtatccttccatttctcagccaaatactcatcttttgagactgaaatcacactggcgggaatgaagattgtgccagccttctcttatgggcacctagccgccttcaccttcttcctctaccccttagcaggaatagggtgtcctcccttctttcaaagcactttgcttgcattttattttatttttttaagagtccttcatagagctcagtcaggaaggggatggggcaccaagccaagcccccagcattgggagcggccaggccacagctgctgctcccgtagtcctcaggctgtaagcaagagacagcactggcccttggccagcgtcctaccctgcccaactccaaggactgggtatggattgctgggccctaggctcttgcttctggggctattggagggtcagtgtctgtgactgaataaagttccattttgtggt

SEQ ID NO: 365731 - DNA, 1989 bp, Homo sapiens
cgggagaagccggaagagaccggaccctgaacagaatcgcagattgccagcccttttcccgacccctacggaaagacgagtccaggggccgtcctggcgaggtcaaaacatttagtctggtcttttcagtgtgccaggcactgtgccaagtattttgcttcgatgatttcacgtcatcttcaaaacaacctcatgagcgtggaccctgccagcagccaggccatggagctctctgatgtcaccctcattgagggtgtgggtaatgaggtgatggtggtggcaggtgtggtggtgctgattctagccttggtcctagcttggctctctacctacgtagcagacagcggtagcaaccagctcctgggcgctattgtgtcagcaggcgacacatccgtcctccacctggggcatgtggaccacctggtggcaggccaaggcaaccccgagccaactgaactcccccatccatcagagggtaatgatgagaaggctgaagaggcgggtgaaggtcggggagactccactggggaggctggagctgggggtggtgttgagcccagccttgagcatctccttgacatccaaggcctgcccaaaagacaagcaggtgcaggcagcagcagtccagaggcccccctgagatctgaggatagcacctgcctccctcccagccctggcctcatcactgtgcggctcaaattcctcaatgataccgaggagctggctgtggctaggccagaggataccgtgggtgccctgaagagcaaatacttccctggacaagaaagccagatgaaactgatctaccagggccgcctgctacaagacccagcccgcacactgcgttctctgaacattaccgacaactgtgtgattcactgccaccgctcacccccagggtcagctgttccaggcccctcagcctccttggccccctcggccactgagccacccagccttggtgtcaatgtgggcagcctcatggtgcctgtctttgtggtgctgttgggtgtggtctggtacttccgaatcaattaccgccaattcttcacagcacctgccactgtctccctggtgggagtcaccgtcttcttcagcttcctagtatttgggatgtatggacgataaggacataggaagaaaatgaaaggcatggtctttctcctttatggcctccccacttttcctggccagagctgggcccaagggccggggagggaggggtggaaaggatgtgatggaaatctcctccataggacacaggaggcaagtatgcggcctccccttctcatccacaggagtacagatgtccctcccgtgcgagcacaactcaggtagaaatgaggatgtcatcttccttcacttttagggtcctctgaaggagttcaaagctgctggccaagctcagtggggagcctgggctctgagattccctcccacctgtggttctgactcttcccagtgtcctgcatgtctgcccccagcacccagggctgcctgcaagggcagctcagcatggccccagcacaactccgtagggagcctggagtatccttccatttctcagccaaatactcatcttttgagactgaaatcacactggcgggaatgaagattgtgccagccttctcttatgggcacctagccgccttcaccttcttcctctaccccttagcaggaatagggtgtcctcccttctttcaaagcactttgcttgcattttattttatttttttaagagtccttcatagagctcagtcaggaaggggatggggcaccaagccaagcccccagcattgggagcggccaggccacagctgctgctcccgtagtcctcaggctgtaagcaagagacagcactggcccttggccagcgtcctaccctgcccaactccaaggactgggtatggattgctgggccctaggctcttgcttctggggctattggagggtcagtgtctgtgactgaataaagttccattttgtggt

SEQ ID NO: 365732 - DNA, 2048 bp, Homo sapiens
cgggagaagccggaagagaccggaccctgaacagaatcgcagattgccagcccttttcccgacccctacggaaagacgagtccaggggccgtcctggcgaggtcaaaacatttagtctggtcttttcaggggttagttgtggttgtgataaataattactaccgttattaagcaattgcaatttgcagtgtgccaggcactgtgccaagtattttgcttcgatgatttcacgtcatcttcaaaacaacctcatgagcgtggaccctgccagcagccaggccatggagctctctgatgtcaccctcattgagggtgtgggtaatgaggtgatggtggtggcaggtgtggtggtgctgattctagccttggtcctagcttggctctctacctacgtagcagacagcggtagcaaccagctcctgggcgctattgtgtcagcaggcgacacatccgtcctccacctggggcatgtggaccacctggtggcaggccaaggcaaccccgagccaactgaactcccccatccatcagagggtaatgatgagaaggctgaagaggcgggtgaaggtcggggagactccactggggaggctggagctgggggtggtgttgagcccagccttgagcatctccttgacatccaaggcctgcccaaaagacaagcaggtgcaggcagcagcagtccagaggcccccctgagatctgaggatagcacctgcctccctcccagccctggcctcatcactgtgcggctcaaattcctcaatgataccgaggagctggctgtggctaggccagaggataccgtgggtgccctgaagagcaaatacttccctggacaagaaagccagatgaaactgatctaccagggccgcctgctacaagacccagcccgcacactgcgttctctgaacattaccgacaactgtgtgattcactgccaccgctcacccccagggtcagctgttccaggcccctcagcctccttggccccctcggccactgagccacccagccttggtgtcaatgtgggcagcctcatggtgcctgtctttgtggtgctgttgggtgtggtctggtacttccgaatcaattaccgccaattcttcacagcacctgccactgtctccctggtgggagtcaccgtcttcttcagcttcctagtatttgggatgtatggacgataaggacataggaagaaaatgaaaggcatggtctttctcctttatggcctccccacttttcctggccagagctgggcccaagggccggggagggaggggtggaaaggatgtgatggaaatctcctccataggacacaggaggcaagtatgcggcctccccttctcatccacaggagtacagatgtccctcccgtgcgagcacaactcaggtagaaatgaggatgtcatcttccttcacttttagggtcctctgaaggagttcaaagctgctggccaagctcagtggggagcctgggctctgagattccctcccacctgtggttctgactcttcccagtgtcctgcatgtctgcccccagcacccagggctgcctgcaagggcagctcagcatggccccagcacaactccgtagggagcctggagtatccttccatttctcagccaaatactcatcttttgagactgaaatcacactggcgggaatgaagattgtgccagccttctcttatgggcacctagccgccttcaccttcttcctctaccccttagcaggaatagggtgtcctcccttctttcaaagcactttgcttgcattttattttatttttttaagagtccttcatagagctcagtcaggaaggggatggggcaccaagccaagcccccagcattgggagcggccaggccacagctgctgctcccgtagtcctcaggctgtaagcaagagacagcactggcccttggccagcgtcctaccctgcccaactccaaggactgggtatggattgctgggccctaggctcttgcttctggggctattggagggtcagtgtctgtgactgaataaagttccattttgtggt

SEQ ID NO: 365733 - DNA, 2151 bp, Homo sapiens
cgggagaagccggaagagaccggaccctgaacagaatcgcagattgccagcccttttcccgacccctacggaaagacgagtccaggggccgtcctggcgaggtcaaaacatttagtctggtcttttcaggggttagttgtggttgtgataaataattactaccgttattaagcaattgcaatttgcagtgtgccaggcactgtgccaagtattttgcttcgatgatttcacgtcatcttcaaaacaacctcatgagataattctttgagcaactactggggcattatattggacacttcagtaccaagagaaatacatacgatccttgtctaccaggagtctaatagaaagatggacagcgtggaccctgccagcagccaggccatggagctctctgatgtcaccctcattgagggtgtgggtaatgaggtgatggtggtggcaggtgtggtggtgctgattctagccttggtcctagcttggctctctacctacgtagcagacagcggtagcaaccagctcctgggcgctattgtgtcagcaggcgacacatccgtcctccacctggggcatgtggaccacctggtggcaggccaaggcaaccccgagccaactgaactcccccatccatcagagggtaatgatgagaaggctgaagaggcgggtgaaggtcggggagactccactggggaggctggagctgggggtggtgttgagcccagccttgagcatctccttgacatccaaggcctgcccaaaagacaagcaggtgcaggcagcagcagtccagaggcccccctgagatctgaggatagcacctgcctccctcccagccctggcctcatcactgtgcggctcaaattcctcaatgataccgaggagctggctgtggctaggccagaggataccgtgggtgccctgaagagcaaatacttccctggacaagaaagccagatgaaactgatctaccagggccgcctgctacaagacccagcccgcacactgcgttctctgaacattaccgacaactgtgtgattcactgccaccgctcacccccagggtcagctgttccaggcccctcagcctccttggccccctcggccactgagccacccagccttggtgtcaatgtgggcagcctcatggtgcctgtctttgtggtgctgttgggtgtggtctggtacttccgaatcaattaccgccaattcttcacagcacctgccactgtctccctggtgggagtcaccgtcttcttcagcttcctagtatttgggatgtatggacgataaggacataggaagaaaatgaaaggcatggtctttctcctttatggcctccccacttttcctggccagagctgggcccaagggccggggagggaggggtggaaaggatgtgatggaaatctcctccataggacacaggaggcaagtatgcggcctccccttctcatccacaggagtacagatgtccctcccgtgcgagcacaactcaggtagaaatgaggatgtcatcttccttcacttttagggtcctctgaaggagttcaaagctgctggccaagctcagtggggagcctgggctctgagattccctcccacctgtggttctgactcttcccagtgtcctgcatgtctgcccccagcacccagggctgcctgcaagggcagctcagcatggccccagcacaactccgtagggagcctggagtatccttccatttctcagccaaatactcatcttttgagactgaaatcacactggcgggaatgaagattgtgccagccttctcttatgggcacctagccgccttcaccttcttcctctaccccttagcaggaatagggtgtcctcccttctttcaaagcactttgcttgcattttattttatttttttaagagtccttcatagagctcagtcaggaaggggatggggcaccaagccaagcccccagcattgggagcggccaggccacagctgctgctcccgtagtcctcaggctgtaagcaagagacagcactggcccttggccagcgtcctaccctgcccaactccaaggactgggtatggattgctgggccctaggctcttgcttctggggctattggagggtcagtgtctgtgactgaataaagttccattttgtggt

SEQ ID NO: 365734 - DNA, 2179 bp, Homo sapiens
cgggagaagccggaagagaccggaccctgaacagaatcgcagattgccagcccttttcccgacccctacggaaagacgagtccaggggccgtcctggcgaggtcaaaacatttagtctggtcttttcagtgtgccaggcactgtgccaagtattttgcttcgatgatttcacgtcatcttcaaaacaacctcatgagataattctttgagcaactactggggcattatattggacacttcagtaccaagagaaatacatacgatccttgtctaccaggagtctaatagaaagatggacagggctgggtcagttagaacctaaacaaactagagacctggttgcaacccctcaggctctgctgatgctgtccccctttgttcctgcagcgtggaccctgccagcagccaggccatggagctctctgatgtcaccctcattgagggtgtgggtaatgaggtgatggtggtggcaggtgtggtggtgctgattctagccttggtcctagcttggctctctacctacgtagcagacagcggtagcaaccagctcctgggcgctattgtgtcagcaggcgacacatccgtcctccacctggggcatgtggaccacctggtggcaggccaaggcaaccccgagccaactgaactcccccatccatcagagggtaatgatgagaaggctgaagaggcgggtgaaggtcggggagactccactggggaggctggagctgggggtggtgttgagcccagccttgagcatctccttgacatccaaggcctgcccaaaagacaagcaggtgcaggcagcagcagtccagaggcccccctgagatctgaggatagcacctgcctccctcccagccctggcctcatcactgtgcggctcaaattcctcaatgataccgaggagctggctgtggctaggccagaggataccgtgggtgccctgaagagcaaatacttccctggacaagaaagccagatgaaactgatctaccagggccgcctgctacaagacccagcccgcacactgcgttctctgaacattaccgacaactgtgtgattcactgccaccgctcacccccagggtcagctgttccaggcccctcagcctccttggccccctcggccactgagccacccagccttggtgtcaatgtgggcagcctcatggtgcctgtctttgtggtgctgttgggtgtggtctggtacttccgaatcaattaccgccaattcttcacagcacctgccactgtctccctggtgggagtcaccgtcttcttcagcttcctagtatttgggatgtatggacgataaggacataggaagaaaatgaaaggcatggtctttctcctttatggcctccccacttttcctggccagagctgggcccaagggccggggagggaggggtggaaaggatgtgatggaaatctcctccataggacacaggaggcaagtatgcggcctccccttctcatccacaggagtacagatgtccctcccgtgcgagcacaactcaggtagaaatgaggatgtcatcttccttcacttttagggtcctctgaaggagttcaaagctgctggccaagctcagtggggagcctgggctctgagattccctcccacctgtggttctgactcttcccagtgtcctgcatgtctgcccccagcacccagggctgcctgcaagggcagctcagcatggccccagcacaactccgtagggagcctggagtatccttccatttctcagccaaatactcatcttttgagactgaaatcacactggcgggaatgaagattgtgccagccttctcttatgggcacctagccgccttcaccttcttcctctaccccttagcaggaatagggtgtcctcccttctttcaaagcactttgcttgcattttattttatttttttaagagtccttcatagagctcagtcaggaaggggatggggcaccaagccaagcccccagcattgggagcggccaggccacagctgctgctcccgtagtcctcaggctgtaagcaagagacagcactggcccttggccagcgtcctaccctgcccaactccaaggactgggtatggattgctgggccctaggctcttgcttctggggctattggagggtcagtgtctgtgactgaataaagttccattttgtggt

SEQ ID NO: 365735 - DNA, 2175 bp, Homo sapiens
gtctagaagtaatcccggtgcacccgtggaacagaatctgaagattgcccggcctttctttgctgaaccccgtacgtgactgacgatgtccacgtgtagtccagtaccgtgtggacggacggctcgagaacagcactattattactaggctgctttttccaagtggggtataagatctggtgtgatcgtgagtaaactaatgtacaaccgactcattaatcctgttgcagtgagctaatgtgcccgagccacagcttaccagaaggtatttatgacgtcttccgaataggagttatcactgtcaatactctcatacaagcagatcacttacattgtagtctgtgagatacgcttggccatactagctcagggtcgcatggaaggacgtctctgcatgatctgccctactgtatgagagtggagatggtattaatgacggctgataggctggttggaaaggtggtggcaggtgtggtggtgctgattctagccttggtcctagcttggctctctacctacgtagcagacagcggtagcaaccagctcctgggcgctattgtgtcagcaggcgacacatccgtcctccacctggggcatgtggaccacctggtggcaggccaaggcaaccccgagccaactgaactcccccatccatcagagggtaatgatgagaaggctgaagaggcgggtgaaggtcggggagactccactggggaggctggagctgggggtggtgttgagcccagccttgagcatctccttgacatccaaggcctgcccaaaagacaagcaggtgcaggcagcagcagtccagaggcccccctgagatctgaggatagcacctgcctccctcccagccctggcctcatcactgtgcggctcaaattcctcaatgataccgaggagctggctgtggctaggccagaggataccgtgggtgccctgaagagcaaatacttccctggacaagaaagccagatgaaactgatctaccagggccgcctgctacaagacccagcccgcacactgcgttctctgaacattaccgacaactgtgtgattcactgccaccgctcacccccagggtcagctgttccaggcccctcagcctccttggccccctcggccactgagccacccagccttggtgtcaatgtgggcagcctcatggtgcctgtctttgtggtgctgttgggtgtggtctggtacttccgaatcaattaccgccaattcttcacagcacctgccactgtctccctggtgggagtcaccgtcttcttcagcttcctagtatttgggatgtatggacgataaggacataggaagaaaatgaaaggcatggtctttctcctttatggcctccccacttttcctggccagagctgggcccaagggccggggagggaggggtggaaaggatgtgatggaaatctcctccataggacacaggaggcaagtatgcggcctccccttctcatccacaggagtacagatgtccctcccgtgcgagcacaactcaggtagaaatgaggatgtcatcttccttcacttttagggtcctctgaaggagttcaaagctgctggccaagctcagtggggagcctgggctctgagattccctcccacctgtggttctgactcttcccagtgtcctgcatgtctgcccccagcacccagggctgcctgcaagggcagctcagcatggccccagcacaactccgtagggagcctggagtatccttccatttctcagccaaatactcatcttttgagactgaaatcacactggcgggaatgaagattgtgccagccttctcttatgggcacctagccgccttcaccttcttcctctaccccttagcaggaatagggtgtcctcccttctttcaaagcactttgcttgcattttattttatttttttaagagtccttcatagagctcagtcaggaaggggatggggcaccaagccaagcccccagcattgggagcggccaggccacagctgctgctcccgtagtcctcaggctgtaagcaagagacagcactggcccttggccagcgtcctaccctgcccaactccaaggactgggtatggattgctgggccctaggctcttgcttctggggctattggagggtcagtgtctgtgactgaataaagttccattttgtggt

SEQ ID NO: 365736 - DNA, 1892 bp, Homo sapiens
cccgaagtttgaggggtgtggacggtttgtgacccccttagccgaccctactcctcactggccgggacaactggtcttatcacggaggctggggccaggcagcccttcggttcgggtgggcccatggaccccagtccaacgccgagggaataggaccatccaaaagcggaaccttcgcctcagaaaaagggtgcgggacccctcctcaccgtgcggtcacgcgtggaccctgccagcagccaggccatggagctctctgatgtcaccctcattgagggtgtgggtaatgaggtgatggtggtggcaggtgtggtggtgctgattctagccttggtcctagcttggctctctacctacgtagcagacagcggtagcaaccagctcctgggcgctattgtgtcagcaggcgacacatccgtcctccacctggggcatgtggaccacctggtggcaggccaaggcaaccccgagccaactgaactcccccatccatcagaggaagacaagcaggtgcaggcagcagcagtccagaggcccccctgagatctgaggatagcacctgcctccctcccagccctggcctcatcactgtgcggctcaaattcctcaatgataccgaggagctggctgtggctaggccagaggataccgtgggtgccctgaagagcaaatacttccctggacaagaaagccagatgaaactgatctaccagggccgcctgctacaagacccagcccgcacactgcgttctctgaacattaccgacaactgtgtgattcactgccaccgctcacccccagggtcagctgttccaggcccctcagcctccttggccccctcggccactgagccacccagccttggtgtcaatgtgggcagcctcatggtgcctgtctttgtggtgctgttgggtgtggtctggtacttccgaatcaattaccgccaattcttcacagcacctgccactgtctccctggtgggagtcaccgtcttcttcagcttcctagtatttgggatgtatggacgataaggacataggaagaaaatgaaaggcatggtctttctcctttatggcctccccacttttcctggccagagctgggcccaagggccggggagggaggggtggaaaggatgtgatggaaatctcctccataggacacaggaggcaagtatgcggcctccccttctcatccacaggagtacagatgtccctcccgtgcgagcacaactcaggtagaaatgaggatgtcatcttccttcacttttagggtcctctgaaggagttcaaagctgctggccaagctcagtggggagcctgggctctgagattccctcccacctgtggttctgactcttcccagtgtcctgcatgtctgcccccagcacccagggctgcctgcaagggcagctcagcatggccccagcacaactccgtagggagcctggagtatccttccatttctcagccaaatactcatcttttgagactgaaatcacactggcgggaatgaagattgtgccagccttctcttatgggcacctagccgccttcaccttcttcctctaccccttagcaggaatagggtgtcctcccttctttcaaagcactttgcttgcattttattttatttttttaagagtccttcatagagctcagtcaggaaggggatggggcaccaagccaagcccccagcattgggagcggccaggccacagctgctgctcccgtagtcctcaggctgtaagcaagagacagcactggcccttggccagcgtcctaccctgcccaactccaaggactgggtatggattgctgggccctaggctcttgcttctggggctattggagggtcagtgtctgtgactgaataaagttccattttgtggt

SEQ ID NO: 365737 - DNA, 2284 bp, Homo sapiens
cccgaagtttgaggggtgtggacggtttgtgacccccttagccgaccctactcctcactggccgggacaactggtcttatcacggaggctggggccaggcagcccttcggttcgggtgggcccatggaccccagtccaacgccgagggaataggaccatccaaaagcggaaccttcgcctcagaaaaagggtgcgggacccctcctcaccgtgcggtcacggtacggacagggtagatcacaggctgagggacagagcaaagacccctgaggccggacacctggggtcctgccgggcccctccccacgagagttccctgtgtctgtgccaatcgttttcgtctttctttgccgcagtttcttttcctgtaaatcatggttaatgacattaaccttcttaccatcaggggttagttgtggttgtgataaataattactaccgttattaagcaattgcaatttgcagtgtgccaggcactgtgccaagtattttgcttcgatgatttcacgtcatcttcaaaacaacctcatgagataattctttgagcaactactggggcattatattggacacttcagtaccaagagaaatacatacgatccttgtctaccaggagtctaatagaaagatggacagggctgggtcagttagaacctaaacaaactagagacctggttgcaacccctcaggctctgctgatgctgtccccctttgttcctgcagcgtggaccctgccagcagccaggccatggagctctctgatgtcaccctcattgagggtgtgggtaatgaggtgatgcgacacatccgtcctccacctggggcatgtggaccacctggtggcaggccaaggcaaccccgagccaactgaactcccccatccatcagaggaagacaagcaggtgcaggcagcagcagtccagaggcccccctgagatctgaggatagcacctgcctccctcccagccctggcctcatcactgtgcggctcaaattcctcaatgataccgaggagctggctgtggctaggccagaggataccgtgggtgccctgaagagcaaatacttccctggacaagaaagccagatgaaactgatctaccagggccgcctgctacaagacccagcccgcacactgcgttctctgaacattaccgacaactgtgtgattcactgccaccgctcacccccagggtcagctgttccaggcccctcagcctccttggccccctcggccactgagccacccagccttggtgtcaatgtgggcagcctcatggtgcctgtctttgtggtgctgttgggtgtggtctggtacttccgaatcaattaccgccaattcttcacagcacctgccactgtctccctggtgggagtcaccgtcttcttcagcttcctagtatttgggatgtatggacgataaggacataggaagaaaatgaaaggcatggtctttctcctttatggcctccccacttttcctggccagagctgggcccaagggccggggagggaggggtggaaaggatgtgatggaaatctcctccataggacacaggaggcaagtatgcggcctccccttctcatccacaggagtacagatgtccctcccgtgcgagcacaactcaggtagaaatgaggatgtcatcttccttcacttttagggtcctctgaaggagttcaaagctgctggccaagctcagtggggagcctgggctctgagattccctcccacctgtggttctgactcttcccagtgtcctgcatgtctgcccccagcacccagggctgcctgcaagggcagctcagcatggccccagcacaactccgtagggagcctggagtatccttccatttctcagccaaatactcatcttttgagactgaaatcacactggcgggaatgaagattgtgccagccttctcttatgggcacctagccgccttcaccttcttcctctaccccttagcaggaatagggtgtcctcccttctttcaaagcactttgcttgcattttattttatttttttaagagtccttcatagagctcagtcaggaaggggatggggcaccaagccaagcccccagcattgggagcggccaggccacagctgctgctcccgtagtcctcaggctgtaagcaagagacagcactggcccttggccagcgtcctaccctgcccaactccaaggactgggtatggattgctgggccctaggctcttgcttctggggctattggagggtcagtgtctgtgactgaataaagttccattttgtggt

SEQ ID NO: 365738 - DNA, 2226 bp, Homo sapiens
cccgaagtttgaggggtgtggacggtttgtgacccccttagccgaccctactcctcactggccgggacaactggtcttatcacggaggctggggccaggcagcccttcggttcgggtgggcccatggaccccagtccaacgccgagggaataggaccatccaaaagcggaaccttcgcctcagaaaaagggtgcgggacccctcctcaccgtgcggtcacggtacggacagggtagatcacaggctgagggacagagcaaagacccctgaggccggacacctggggtcctgccgggcccctccccacgagagttccctgtgtctgtgccaatcgttttcgtctttctttgccgcagtttcttttcctgtaaatcatggttaatgacattaaccttcttaccatcaggggttagttgtggttgtgataaataattactaccgttattaagcaattgcaatttgcagtgtgccaggcactgtgccaagtattttgcttcgatgatttcacgtcatcttcaaaacaacctcatgagataattctttgagcaactactggggcattatattggacacttcagtaccaagagaaatacatacgatccttgtctaccaggagtctaatagaaagatggacagggctgggtcagttagaacctaaacaaactagagacctggttgcaacccctcaggctctgctgatgctgtccccctttgttcctgcagcgtggaccctgccagcagccaggccatggagctctctgatgtcaccctcattgagggtgtgggtaatgaggtgatggtggtggcaggtgtggtggtgctgattctagccttggtcctagcttggctctctacctacgtagcagacagcggtagcaaccagctcctgggcgctattgtgtcagcaggcgacacatccgtcctccacctggggcatgtggaccacctggtggcaggccaaggcaaccccgagccaactgaactcccccatccatcagaggcaaatacttccctggacaagaaagccagatgaaactgatctaccagggccgcctgctacaagacccagcccgcacactgcgttctctgaacattaccgacaactgtgtgattcactgccaccgctcacccccagggtcagctgttccaggcccctcagcctccttggccccctcggccactgagccacccagccttggtgtcaatgtgggcagcctcatggtgcctgtctttgtggtgctgttgggtgtggtctggtacttccgaatcaattaccgccaattcttcacagcacctgccactgtctccctggtgggagtcaccgtcttcttcagcttcctagtatttgggatgtatggacgataaggacataggaagaaaatgaaaggcatggtctttctcctttatggcctccccacttttcctggccagagctgggcccaagggccggggagggaggggtggaaaggatgtgatggaaatctcctccataggacacaggaggcaagtatgcggcctccccttctcatccacaggagtacagatgtccctcccgtgcgagcacaactcaggtagaaatgaggatgtcatcttccttcacttttagggtcctctgaaggagttcaaagctgctggccaagctcagtggggagcctgggctctgagattccctcccacctgtggttctgactcttcccagtgtcctgcatgtctgcccccagcacccagggctgcctgcaagggcagctcagcatggccccagcacaactccgtagggagcctggagtatccttccatttctcagccaaatactcatcttttgagactgaaatcacactggcgggaatgaagattgtgccagccttctcttatgggcacctagccgccttcaccttcttcctctaccccttagcaggaatagggtgtcctcccttctttcaaagcactttgcttgcattttattttatttttttaagagtccttcatagagctcagtcaggaaggggatggggcaccaagccaagcccccagcattgggagcggccaggccacagctgctgctcccgtagtcctcaggctgtaagcaagagacagcactggcccttggccagcgtcctaccctgcccaactccaaggactgggtatggattgctgggccctaggctcttgcttctggggctattggagggtcagtgtctgtgactgaataaagttccattttgtggt

SEQ ID NO: 365739 - DNA, 1295 bp, Homo sapiens
gttggtccaggcctgtttgccttctcattcctcaccctctatcttttcttccatgtctttcatccttacacaaatacttccctggacaagaaagccagatgaaactgatctaccagggccgcctgctacaagacccagcccgcacactgcgttctctgaacattaccgacaactgtgtgattcactgccaccgctcacccccagggtcagctgttccaggcccctcagcctccttggccccctcggccactgagccacccagccttggtgtcaatgtgggcagcctcatggtgcctgtctttgtggtgctgttgggtgtggtctggtacttccgaatcaattaccgccaattcttcacagcacctgccactgtctccctggtgggagtcaccgtcttcttcagcttcctagtatttgggatgtatggacgataaggacataggaagaaaatgaaaggcatggtctttctcctttatggcctccccacttttcctggccagagctgggcccaagggccggggagggaggggtggaaaggatgtgatggaaatctcctccataggacacaggaggcaagtatgcggcctccccttctcatccacaggagtacagatgtccctcccgtgcgagcacaactcaggtagaaatgaggatgtcatcttccttcacttttagggtcctctgaaggagttcaaagctgctggccaagctcagtggggagcctgggctctgagattccctcccacctgtggttctgactcttcccagtgtcctgcatgtctgcccccagcacccagggctgcctgcaagggcagctcagcatggccccagcacaactccgtagggagcctggagtatccttccatttctcagccaaatactcatcttttgagactgaaatcacactggcgggaatgaagattgtgccagccttctcttatgggcacctagccgccttcaccttcttcctctaccccttagcaggaatagggtgtcctcccttctttcaaagcactttgcttgcattttattttatttttttaagagtccttcatagagctcagtcaggaaggggatggggcaccaagccaagcccccagcattgggagcggccaggccacagctgctgctcccgtagtcctcaggctgtaagcaagagacagcactggcccttggccagcgtcctaccctgcccaactccaaggactgggtatggattgctgggccctaggctcttgcttctggggctattggagggtcagtgtctgtgactgaataaagttccattttgtggt

SEQ ID NO: 365740 - DNA, 2555 bp, Homo sapiens
  misc_feature (2413)..(2413): n is a, c, g, or t
cccgaagtttgaggggtgtggacggtttgtgacccccttagccgaccctactcctcactggccgggacaactggtcttatcacggaggctggggccaggcagcccttcggttcgggtgggcccatggaccccagtccaacgccgagggaataggaccatccaaaagcggaaccttcgcctcagaaaaagggtgcgggacccctcctcaccgtgcggtcacggtacggacagggtagatcacaggctgagggacagagcaaagacccctgaggccggacacctggggtcctgccgggcccctccccacgagagttccctgtgtctgtgccaatcgttttcgtctttctttgccgcagtttcttttcctgtaaatcatggttaatgacattaaccttcttaccatcaggggttagttgtggttgtgataaataattactaccgttattaagcaattgcaatttgcagtgtgccaggcactgtgccaagtattttgcttcgatgatttcacgtcatcttcaaaacaacctcatgagggctgggtcagttagaacctaaacaaactagagacctggttgcaacccctcaggctctgctgatgctgtccccctttgttcctgcagcgtggaccctgccagcagccaggccatggagctctctgatgtcaccctcattgagggtgtgggtaatgaggtgatggtggtggcaggtgtggtggtgctgattctagccttggtcctagcttggctctctacctacgtagcagacagcggtagcaaccagctcctgggcgctattgtgtcagcaggcgacacatccgtcctccacctggggcatgtggaccacctggtggcaggccaaggcaaccccgagccaactgaactcccccatccatcagagggtaatgatgagaaggctgaagaggcgggtgaaggtcggggagactccactggggaggctggagctgggggtggtgttgagcccagccttgagcatctccttgacatccaaggcctgcccaaaagacaagcaggtgcaggcagcagcagtccagaggcccccctgagatctgaggatagcacctgcctccctcccagccctggcctcatcactgtgcggctcaaattcctcaatgataccgaggagctggctgtggctaggccagaggataccgtgggtgccctgaagagcaaatacttccctggacaagaaagccagatgaaactgatctaccagggccgcctgctacaagacccagcccgcacactgcgttctctgaacattaccgacaactgtgtgattcactgccaccgctcacccccagggtcagctgttccaggcccctcagcctccttggccccctcggccactgagccacccagccttggtgtcaatgtgggcagcctcatggtgcctgtctttgtggtgctgttgggtgtggtctggtacttccgaatcaattaccgccaattcttcacagcacctgccactgtctccctggtgggagtcaccgtcttcttcagcttcctagtatttgggatgtatggacgataaggacataggaagaaaatgaaaggcatggtctttctcctttatggcctccccacttttcctggccagagctgggcccaagggccggggagggaggggtggaaaggatgtgatggaaatctcctccataggacacaggaggcaagtatgcggcctccccttctcatccacaggagtacagatgtccctcccgtgcgagcacaactcaggtagaaatgaggatgtcatcttccttcacttttagggtcctctgaaggagttcaaagctgctggccaagctcagtggggagcctgggctctgagattccctcccacctgtggttctgactcttcccagtgtcctgcatgtctgcccccagcacccagggctgcctgcaagggcagctcagcatggccccagcacaactccgtagggagcctggagtatccttccatttctcagccaaatactcatcttttgagactgaaatcacactggcgggaatgaagattgtgccagccttctcttatgggcacctagccgccttcaccttcttcctctaccccttagcaggaatagggtgtcctcccttctttcaaagcactttgcttgcattttattttatttttttaagagtccttcatagagctcagtcaggaaggggatggggcaccaagccaagcccccagcattgggagcggccaggccacagctgctgctcccgtagtcctcaggctgtaagcaagagacagcactggcccttggccagcgtcctaccctgcccaactccaaggactgggtatggattgctgggccctaggctcttgcttctggggctattggagggtcagtgtctgtgactgaataaagttccattttgtggtngaaagcatttaaaccaaaaatctggatcataacgtggcagccaacagttccccgctggggcggccaaccaccccgtgaaaccctttcgggggggggcgcgatcccaattccggccttttgcgagaccttttcaaagaaagtg

SEQ ID NO: 365741 - DNA, 1950 bp, Homo sapiens
cccgaagtttgaggggtgtggacggtttgtgacccccttagccgaccctactcctcactggccgggacaactggtcttatcacggaggctggggccaggcagcccttcggttcgggtgggcccatggaccccagtccaacgccgagggaataggaccatccaaaagcggaaccttcgcctcagaaaaagggtgcgggacccctcctcaccgtgcggtcacggtacggacagggtagatcacaggctgagggacagagcaaagacccctgaggccggacacctggggtcctgccgggcccctccccacgagagttccctgtgtctgtgccaatcgttttcgtctttctttgccgcagtttcttttcctgtaaatcatggttaatgacattaaccttcttaccatcaggggttagttgtggttgtgataaataattactaccgttattaagcaattgcaatttgcagtgtgccaggcactgtgccaagtattttgcttcgatgatttcacgtcatcttcaaaacaacctcatgagggctgggtcagttagaacctaaacaaactagagacctggttgcaacccctcaggctctgctgatgctgtccccctttgttcctgcagcgtggaccctgccagcagccaggccatggagctctctgatgtcaccctcattgagggtgtgggtaatgaggtgatggtggtggcaggtgtggtggtgctgattctagccttggtcctagcttggctctctacctacgtagcagacagcggtagcaaccagctcctgggcgctattgtgtcagcaggcgacacatccgtcctccacctggggcatgtggaccacctggtggcaggccaaggcaaccccgagccaactgaactcccccatccatcagagggtaatgatgagaaggctgaagaggcgggtgaaggtcggggagactccactggggaggctggagctgggggtggtgttgagcccagccttgagcatctccttgacatccaaggcctgcccaaaagacaagcaggtgcaggcagcagcagtccagaggcccccctgagatctgaggatagcacctgcctccctcccagccctggcctcatcactgtgcggctcaaattcctcaatgataccgaggagctggctgtggctaggccagaggataccgtgggtgccctgaagagcaaatacttccctggacaagaaagccagatgaaactgatctaccagggccgcctgctacaagacccagcccgcacactgcgttctctgaacattaccgacaactgtgtgattcactgccaccgctcacccccagggtcagctgggtcctctgaaggagttcaaagctgctggccaagctcagtggggagcctgggctctgagattccctcccacctgtggttctgactcttcccagtgtcctgcatgtctgcccccagcacccagggctgcctgcaagggcagctcagcatggccccagcacaactccgtagggagcctggagtatccttccatttctcagccaaatactcatcttttgagactgaaatcacactggcgggaatgaagattgtgccagccttctcttatgggcacctagccgccttcaccttcttcctctaccccttagcaggaatagggtgtcctcccttctttcaaagcactttgcttgcattttattttatttttttaagagtccttcatagagctcagtcaggaaggggatggggcaccaagccaagcccccagcattgggagcggccaggccacagctgctgctcccgtagtcctcaggctgtaagcaagagacagcactggcccttggccagcgtcctaccctgcccaactccaaggactgggtatggattgctgggccctaggctcttgcttctggggctattggagggtcagtgtctgtgactgaataaagttccattttgtggt

SEQ ID NO: 365742 - DNA, 1554 bp, Homo sapiens
cccgaagtttgaggggtgtggacggtttgtgacccccttagccgaccctactcctcactggccgggacaactggtcttatcacggaggctggggccaggcagcccttcggttcgggtgggcccatggaccccagtccaacgccgagggaataggaccatccaaaagcggaaccttcgcctcagaaaaagggtgcgggacccctcctcaccgtgcggtcacggtacggacagggtagatcacaggctgagggacagagcaaagacccctgaggccggacacctggggtcctgccgggcccctccccacgagagttccctgtgtctgtgccaatcgttttcgtctttctttgccgcagtttcttttcctgtaaatcatggttaatgacattaaccttcttaccatcaggggttagttgtggttgtgataaataattactaccgttattaagcaattgcaatttgcagtgtgccaggcactgtgccaagtattttgcttcgatgatttcacgtcatcttcaaaacaacctcatgagggctgggtcagttagaacctaaacaaactagagacctggttgcaacccctcaggctctgctgatgctgtccccctttgttcctgcagcgtggaccctgccagcagccaggccatggagctctctgatgtcaccctcattgagggtgtgggtaatgaggtgatggtggtggcaggtgtggtggtgctgattctagccttggtcctagcttggctctctacctacgtagcagacagcggtagcaaccagctcctgggcgctattgtgtcagcaggcgacacatccgtcctccacctggggcatgtggaccacctggtggcaggccaaggcaaccccgagccaactgaactcccccatccatcagagggtaatgatgagaaggctgaagaggcgggtgaaggtcggggagactccactggggaggctggagctgggggtggtgttgagcccagccttgagcatctccttgacatccaaggcctgcccaaaagacaagcaggtgcaggcagcagcagtccagaggcccccctgagatctgaggatagcacctgcctccctcccagccctggcctcatcactgtgcggctcaaattcctcaatgataccgaggagctggctgtggctaggccagaggataccgtgggtgccctgaagagcaaatacttccctggacaagaaagccagatgaaactgatctaccagggccgcctgctacaagacccagcccgcacactgcgttctctgaacattaccgacaactgtgtgattcactgccaccgctcacccccagggtcagctgagcagcagtccagaggcccccctgagatctgaggatagcacctgcctccctcccagccctggcctcatcactgtgcggctcaaattcctcaatgataccgaggagctggctgtggctaggccagaggataccgtgggtgccctgaagagcaaatactcccctggacaagaaagccagatgaaactgatctaccaggggagtatttgctctgcaaggcacccacg

SEQ ID NO: 365743 - DNA, 1055 bp, Homo sapiens
cccgaagtttgaggggtgtggacggtttgtgacccccttagccgaccctactcctcactggccgggacaactggtcttatcacggaggctggggccaggcagcccttcggttcgggtgggcccatggaccccagtccaacgccgagggaataggaccatccaaaagcggaaccttcgcctcagaaaaagggtgcgggacccctcctcaccgtgcggtcacggtacggacagggtagatcacaggctgagggacagagcaaagacccctgaggccggacacctggggtcctgccgggcccctccccacgagagttccctgtgtctgtgccaatcgttttcgtctttctttgccgcagtttcttttcctgtaaatcatggttaatgacattaaccttcttaccatcaggggttagttgtggttgtgataaataattactaccgttattaagcaattgcaatttgcagtgtgccaggcactgtgccaagtattttgcttcgatgatttcacgtcatcttcaaaacaacctcatgagataattctttgagcaactactggggcattatattggacacttcagtaccaagagaaatacatacgatccttgtctaccaggagtctaatagaaagatggacaggtacataagtataatgaagttttataggtgctgtgagaatagtctgataatggtaatcaccagactggatttgcccagggacagctgtgaaagcagcagattctccaagggaaatagtaggtactccaaggagcaagcagggacccttcctgcctttctaagaaactgcagcagcagaaccttcacagtgaaagaagagagactgagatatggattgtgagagctgttatggaatctttttcaaatcactccacttggggagtggtcattgcaggagtgggcccatggtgacccaggaaggtggtgcttctggtgtctgtcccaagttgctccccagggcttgccagaagtttcagaggcggcacataatgtctgctgcatagtatctgcccgcggtccctacagagttatcgttttag

SEQ ID NO: 365744 - DNA, 289 bp, Homo sapiens
tccttccttgcagtcaactcttgctaaccctatgattgcccacaagcaatacatttaaaccagggacccagctgaaatgctttaatggacaacacaaagtgggagactaaatatgtgaagctatagcaagtacaagtgactcaccaacctatttgcatctggatctcttgcccactatctactaacatttttcctatcaaagctgcttaatgattccttaattgccaaatcagataactggttctgttctccatgcatcctgactgtgctgcaacatttggagcacttt

SEQ ID NO: 365745 - DNA, 363 bp, Homo sapiens
ggttttaccgtgttggccaggatcgtctcaatctcctgaccttgtggtccacccgccttggcctcccaaagtgttaggattacaggcgtgagccaccacgcttggccaatatgtgcaatttaaaaaatatttataccccaaagcatttagaaaattccattgtctaaatgcatcatcacagttaactcactcggtaaaggtcgtcttggctgcgtccattctgtggcaattacgaataaagctgccataaactcaattttgagactcctttactgatagtgacgttattttaggtgatagcagtggtgtgatctcagctcaccgcgctccgcctcctgggttcatgccattctcctgcctcag

SEQ ID NO: 365746 - DNA, 283 bp, Homo sapiens
caagagaaagctccatggctgacatacttgctattggctcctaggcatgctcccttcctttcataagtgcttacagaataattaaaggctgttttatcagtgatgattatagctatgtttactgagcttgccacacgctgggcactgcggctctgcattttacaattccttcattcttatttactgttaggcctctaggtggggacagagttccagaaactctgggtcagtttttaagcaggcttggagactcagaaccagaagctgcgacccggtggaaggt

SEQ ID NO: 365747 - DNA, 354 bp, Homo sapiens
tgagaaaactgatgtggacaaaatgactccttaatctgacaaacaagtctttgtgatccagcctctgcctgtctcttagactttatctcctacaacttttcacttttattttgtcccagccgcactgggccccatgctattccatggacacagtaataaactcgtttttgcactggcatctactttggaatgctctttgcccagagcttcctaacatttagtgctccctgtagtctctattctagtgtcattttcaaggaggcctgtctccctcacctccctctccttctttcctctcccatttacactccccactcccctccctccctctctccctcactcccttccttccat

SEQ ID NO: 365748 - DNA, 392 bp, Homo sapiens
ttaaaaaatgattttagggacagtccctctgagcccaggctagccagcatggacacagaaatcactgactataatgccaagtatgagcttggcaaagataaaattactcacagcctacatgcgccacacacatggtctaatttcttgtaagattagagaacaaattagtaaaactggaatgaaaaccaaagtctgttcaaggctggaatttccccagtagtccaatgtttcagctactgtggctgtttagaaagtatcatgaatcacccttaaagatgagctgtaatgtttttggaaaaaagaagccagtgtggtttagggatgggaaaggaggggaggtactaggctgcttgtcaaccagctgacccggaaccctgacgactggctgatgc

SEQ ID NO: 365749 - DNA, 390 bp, Homo sapiens
ggagaagctgaggcagcaggattgctagaacctgggagatcaaggctgcagtgagctattatctcaccactctaccctacagcctgggcaacaaagtaagaaacttgtctccaaaaaaaaaaaaagtgagtttattcacacaacctttagaagattgacaaagtctcttttttttaaactcttctctttcagggtaaatatcatctctttactaaaaaaatctaaactgggccacccagaaaagtttaaaagtatcatgaatcacccttaaagatgagctgtaatgtttttggaaaaaagaagccagtgtggtttagggatgggaaaggaggggaggtactaggctgcttgtcaaccagctgacccggaaccctgacgactggctgatgc

SEQ ID NO: 365750 - DNA, 125 bp, Homo sapiens
caaaagcaaccacataccaggcacagtggctcatacctgtaatttcaacacttctggaggctgagggaggaagagagcctcagtccaggagtttgagaccagtctgggcaacatagtaagccaaa

SEQ ID NO: 365751 - DNA, 296 bp, Homo sapiens
ctagaatgcagtggcataatcccagctcgctgcaacctcaatctccagggctcaagcgaccctcccaccttggactcccaaagagtgctaagattacaggcatgagccactatgcccagctggaatttattttcttaaagaaaaaaaaaatctaaatacttgggggaaatgggagttgagcaaaagactgacactaacagcagaatgaatcatttttatatcttctttaccttctttactgggaaaggtggctggctcagcagggaaggagtgtatgaggagactgtgtaaaatgt

SEQ ID NO: 365752 - DNA, 450 bp, Homo sapiens
aacaatgttactattataagataaatatttaatttaactatatatttagaaataattatttctgatgtttatttaataactcttagggcatacgccaacaataaatcaataaattatttccccccagtccattgtgtgaggtaatcttttaaaagtactacaatggaccgggcgcggtggctcaagcctgtaatcccagcactttgggaggccgagacgggcggatcatgaggtcaggagatcgagaccatcctggctaacacagtgaaaccccgtctctactaaaaatacaaaaaattagctgggcgcggtggcgggcgcctgtagtcccagctactcgggaggctgaggcaggagaatggcgtgaacccgggaggcagagcttgcagtgagctgagatcgtgccactgcactccagcctgggtgacagagcgagactccgtctcaaaa

SEQ ID NO: 365753 - DNA, 454 bp, Homo sapiens
tttaagcactcactttccttattgaaatgttttgtgacaaggtaagtgtaatattaaacgtgcatgcagttcctcatcatgtttctcctttgtgccaattatgtatcttgacttagtcttttgtggcacagggaactattgtattcctaactcacacagaccctcttctccagcaaaactgaatatctggagcaccagccagtgccctgcaaaaaatggtctctctcctgtctattaaggtgcaaatttagttatagactttccctttttcatcttgcttagaaattctataccatccagtgtctgtgttctttctagaagatgtccaataaatacctgctgaatttaaatgtgtatttccttcatcaaaatactgcttcattatgctatgtgaaataagccagacacagaaagaaagataacgcatggcctcacttttatatggaatctgaaa

SEQ ID NO: 365754 - DNA, 322 bp, Homo sapiens
ctaatttgtgtatttttagtagagatgggatttctccatgttggtcagtctggtctggaactcccaacctcaggtgatccacccacctcggcctcccaaagtgcgggattacagacatgagccaccgtgcctgacctgtagtcttttttccattcctttatttgttcattcatatttgagagaggtactaaaagactgggagccgaggtgtggtggctcacacctataatctcagtgctttgggagaccgaagtgggaggatcacttgagcccaggagctcaagactagtttgggcaacatagtgagaccccatctttacaa

SEQ ID NO: 365755 - DNA, 552 bp, Homo sapiens
cagtgtcaaaaagattttctaagacagaggagcactacggccaagtgtccttttatgatatccacagaattcaaaattgcagagcctaaaaggcactaactttatcctgtcgtatgtcactgtggaaagcactcttcagagccatgttcccacacttgttttctcactgtggagtacatctgtgttggtgacttcagctaaacctgttccccagggataaatgcaacagcccatacaaaatcaggcatgaggacacagtccaacaacttcgtgtataaataaagttacacattcatcgccagttgcttgttttaaaaataaaaaaaaaaagtctccccacagatttactgactttcatgtaggatctgtgtttgtgtaatttgaagtaggcttgatttataaggtttgctatagctaacatttaaagaaatgtttaaattaggcacagtggtgcatgcctgtagtcctagctacacagaaggctaaggcaagaggactgtttgaggccaggagttcaagttcagattggacttcataagatcccatccatta

SEQ ID NO: 365756 - DNA, 1262 bp, Homo sapiens
ctcatggattggtggttggtatcagctgctccaccttttctaccatttactgaacgagttgaggaaaaagggaaggagtctcgtctttacatccttattttctttttttattggttggcacctatgccactcacgtggtggagaggcggggcaatagttggagatgattggttctgagaattggctgtgaaagcggcattgctgaccagtgagagagacctaatgaggagcaggccggggcaaccaatgaaatcggagaagagcgcttgggggcgtgtccgcctgctttcagcctttggcaagttggtgggaggtgaaagtgacttggcctcttaaaagcgtttttttcacgtgggtgtgatgtcgtgttccgtttttctgaataagaacttcgtagcttcttgttaggaagaacctggaggacagagtaactctcggcagtcagcccccgcctgaggctctcttgaaggacccccttctaactcgaagctggatacccagattccaggggtgcccagaagtagcttttccagccccttcctggatccatggtccccctagttcccttccctgtttgctctttatcgcccaacaccccttgtgtcttgattctagactgtcatatgcctataccgattctgtccccttcagaagtagattcgcgaggacctgactttatgtgtctcttccagacctaaaggcccttggttttagcatcataggtgccatgtatatgcttaactttgaacagaaaattattattttttgtatctttaaactgatatatcgtagttgtacatatttaactttggacagaaaattttttttatatctttaaactgatatagttgtacatattttcagggatacatctgatattgtgatacatgtattcaatgtataattatcaaatcagtgtaattgggatatccatcatctcaaacattatctttgtgttgggaacattttctgctatgcgttctcttgtagcaggaaatcgttatttttgatcaactgactattcacacatttgtgaagattacaaattcagtaactaatgtaacatttagatgtaagctattgttgcaaatgtaacctaaagcgccgtactttagggaatctagcatctgttacattttgctagtttgaacaggcaatagaaatagctattagatactgtaaaagaaattgactttctttgccaatgtgcttcccagtgtcaataaattaaagtatcctttttaagaaaaaaaaaaataaaa

SEQ ID NO: 365757 - DNA, 1043 bp, Homo sapiens
ctcatggattggtggttggtatcagctgctccaccttttctaccatttactgaacgagttgaggaaaaagggaaggagtctcgtctttacatccttattttctttttttattggttggcacctatgccactcacgtggtggagaggcggggcaatagttggagatgattggttctgagaattggctgtgaaagcggcattgctgaccagtgagagagacctaatgaggagcaggccggggcaaccaatgaaatcggagaagagcgcttgggggcgtgtccgcctgctttcagcctttggcaagttggtgggagctaaaatcagtcatcttcctgcgaaggcatgaggaggaaaagagaggaagtaactgagcgataatatgctgtatgagcctcctgctctgctgcccattacctgcgtcacctccacaagctactgaacctcaaggaacccatctcctcatcaggaaaaaaaataagctttatcagggtctgaactctgtaggtcttcaccacggctcaggaggatgaggagcagtgacaggccaaactacgagaaaagacagagggaatcaaactcaacactgtgtctaaacctcctccaccactgttgaagggatcctggcatcagatggggaacagctctaaatcaaaataacctcactactgtgcttttctgtaaaaccaggtaaagatcagacaagcatgagttgaaaggctatgtctctctccaggctttattctgccatagcagtgaccaggcgcagccaacagaaacggaaagtcatggtgtccaacacgcctctctgttccccatgctgaggttaaaagatggtttttccttgccatggataatgtagaatttgacttttctcctatttatgagaacagaaataggctaaaaaagaaagtaaatgaagaccaattttggtacagaaattaaaaatcaggaaaaaataagaaaaaagcattacagtaagatattttgaattaagaaacaaggtgtaaactgtaggaaaatatacaaataaacacaactgaaata

SEQ ID NO: 365758 - DNA, 1160 bp, Homo sapiens
ctcatggattggtggttggtatcagctgctccaccttttctaccatttactgaacgagttgaggaaaaagggaaggagtctcgtctttacatccttattttctttttttattggttggcacctatgccactcacgtggtggagaggcggggcaatagttggagatgattggttctgagaattggctgtgaaagcggcattgctgaccagtgagagagacctaatgaggagcaggccggggcaaccaatgaaatcggagaagagcgcttgggggcgtgtccgcctgctttcagcctttggcaagttggtgggagctaaaatcagtcatcttcctgcgaaggcatgaggaggaaaagagaggaagtaactgagcgataatatgctgtatgagcctcctgctctgctgcccattacctgcgtcacctccacaagctactgaacctcaaggaacccatctcctcatcaggaaaaaaaataagctttatcagggtctgaactctgtaggtcttcaccacggctcaggaggatgaggagcagtgacaggccaaactacgagaaaagacagagggaatcaaactcaacactgtgtctaaacctcctccaccactgttgaagggatcctggcatcagatggggaacagctctaaatcaaaataacctcactactgtgcttttctgtaaaaccaggtaaagatcagacaagcatgagttgaaaggctatgtctctctccaggctttattctgccatagcagtgaccaggcgcagccaacagaaacggaaagtcatggtgtccaacacgcctctctgttccccatgctgaggttaaaagatggtttttccttgccatggataatgtagaatttgacttttctcctatttatgagaacagaaataggctaaaaaagaaagtaaatgaagaccaattttggtacagaaattaaaaatcaggaaaaaataagaaaaaagcattacagtaagatattttgaattaagaaacaaggtgtaaactgtaggaaaatatacaaataaacacaactgaaataaacatggtataaagagaaactttccattaaaaagcacatctctatctggaaatacaaagtcttagacagaatgttaataaaaatctaaaaaataaaaagagagaaagggtaaacaga

SEQ ID NO: 365759 - DNA, 296 bp, Homo sapiens
cacactgaccactgattattttgtgttgattctgtagcagggtctgaactctgtaggtcttcaccacggctcaggaggatgaggagcagtgacaggccaaactacgagaaaagacagagggaatcaaactcaacactgtgtctaaacctcctccaccactgttgaagggatcctggcatcagatggggaacagctctaaatcaaaataacctcactactgtgcttttctgtaaaaccaggtaaagatcagacaagcatgagttgaaaggctatgtctctctccaggctttattctg

SEQ ID NO: 365760 - DNA, 1349 bp, Homo sapiens
  misc_feature (5)..(5): n is a, c, g, or t
  misc_feature (11)..(11): n is a, c, g, or t
  misc_feature (21)..(21): n is a, c, g, or t
  misc_feature (24)..(24): n is a, c, g, or t
taggntaggtngaggctgggngtnaatcggccgaggcggcgccggaagtggtcgcgggtcgttctgcttcctgcccgaggggcgtgcgcgggtcaggggcggccgcggaggcggaagcatccatggcggagggcggcagcccagacgggcgggcagggccgggctccgcaggtcgtaatctgaaggagtggctgagggagcaattttgtgatcatccgctggagcactgtgaggacacgaggctccatgatgcagcttacgtcggggacctccagaccctcaggagcctattgcaagaggagagctaccggagccgcatcaacgagaagtctgtctggtgctgtggctggctcccctgcacaccgttgcgaatcgcggccactgcaggccatgggagctgtgtggacttcctcatccggaagggggccgaggtggatctggtggacgtaaaaggacagacggccctgtatgtggctgtggtgaacgggcacctagagagtacccagatccttctcgaagctggcgcggaccccaacggaagccggcaccatcgcagcacccctgtctaccacgcctctcgcgtgggccgggcagacatcctgaaggccctcatcaggtacggggctgatgttgacgtcaaccaccacctgactcctgatgtccagcctcgattctcccggcggctcacctccttggtggtctgccccttgtacatcagcgcagcctaccacaacctccagtgcttccggctgctcctcctggctggcgcgaaccctgacttcaactgcaatggtcctgtcaacacacagggattctacaggggctcccctgggtgcgtcatggatgctgttctgcgccacggctgtgaggcagccttcgtgagcctgctggtagaatttggagccaacctgaatctagtgaagtgggaatcgctgggcccagagtcgagaggaagaagaaaagtggaccctgaggccttgcaggtctttaaagaggccagaagtgttcccagaaccttgctgtgtctgtgccgtgtggctgtgagaagagctcttggcaaacaccggcttcatctgattccttcgctgcctctgccagaccccataaagaagtttctactccatgagtagactccaagtgctgcggttgattccagtgagggagaaagtgatctgcagggaggtggacaccgagccctgagtgctgtgctgctgctggtctcctgatggctgttgctgcagaagatgtcctcgtagactgtcattgctcctcaggtgcctgggccgctgaacagtccttgggtcattgtcagctgagaggcttatactaaagttattattgtttttccc

SEQ ID NO: 365761 - DNA, 7386 bp, Homo sapiens
  misc_feature (3510)..(3510): n is a, c, g, or t
  misc_feature (4514)..(4514): n is a, c, g, or t
  misc_feature (4874)..(4874): n is a, c, g, or t
ggttgttcacgaatgcattcatttattcaatgaacttcgcgtcagccactggctgtcatcagttaccgacctgattgagggcttcatggaagggatttggaggagcattcatctaaaaccacagcacgctgcgacgctcagccctgcagtgggccctcaccagtccccgcgcctccgaatccaccctcccggggctgctcgtggctagcggggggcacctgcggggaccaagccagcccggccgaggcccgggtcccgcccgccacggccctcggggccccgcccacatctggcagaagccacgccccgtccgtgtgggtggggacggcccgccggaccgaaattcccagactgctgcctcaggcaacgggctttccgactccttggcttcttatgtgaggaaaccacagcgcggccggcatccagagagtcggttagtcgcgaagttcccgccggacgaagggaccagccagcgccctgctagacagcgaggccggaagcggaggcgtggcccctgcgcggccccggaaaccagtgaggccggcgcgcgcccgccggaagccgcgaccccgacgcgccccccattgccctcggcgccggaagtggtcgcgggtcgttctgcttcctgcccgaggggcgtgcgcgggtcaggggcggccgcggaggcggaagcatccatggcggagggcggcagcccagacgggcgggcagggccgggctccgcaggtcgtaatctgaaggagtggctgagggagcaattttgtgatcatccgctggagcactgtgaggacacgaggctccatgatgcagcttacgtcggggacctccagaccctcaggagcctattgcaagaggagagctaccggagccgcatcaacgagaagtctgtctggtgctgtggctggctcccctgcacaccgttgcgaatcgcggccactgcaggccatgggagctgtgtggacttcctcatccggaagggggccgaggtggatctggtggacgtaaaaggacagacggccctgtatgtggctgtggtgaacgggcacctagagagtacccagatccttctcgaagctggcgcggaccccaacggaagccggcaccatcgcagcacccctgtctaccacgcctctcgcgtgggccgggcagacatcctgaaggccctcatcaggtacggggctgatgttgacgtcaaccaccacctgactcctgatgtccagcctcgattctcccggcggctcacctccttggtggtctgccccttgtacatcagcgcagcctaccacaacctccagtgcttccggctgctcctcctggctggcgcgaaccctgacttcaactgcaatggtcctgtcaacacacagggattctacaggggctcccctgggtgcgtcatggatgctgttctgcgccacggctgtgaggcagccttcgtgagcctgctggtagaatttggagccaacctgaatctagtgaagtgggaatcgctgggcccagagtcgagaggaagaagaaaagtggaccctgaggccttgcaggtctttaaagaggccagaagtgttcccagaaccttgctgtgtctgtgccgtgtggctgtgagaagagctcttggcaaacaccggcttcatctgattccttcgctgcctctgccagaccccataaagaagtttctactccatgagtagactccaagtgctgcggttgattccagtgagggagaaagtgatctgcagggaggtggacaccgagccctgagtgctgtgctgctgctggtctcctgatggctgttgctgcagaagatgtcctcgtagactgtcattgctcctcaggtgcctgggccgctgaacagtccttgggtcattgtcagctgagaggcttatactaaagttattattgtttttcccaagttctctgttctggattttcagttgcatattaatgtaacgggccatggggtatgtacatgtaggggctgaggttggaggcctactaatttccctgtagggaagactcccagcacttctggaactgtgcttctctttatttttctacttctcaatttgatggttcgattaaagccttctagtatctcaatgaaaagggagtttcgtaagcaaaatagaggacagaaatgcagttcatgaacttgctggttggtttttcctgctcctggggtaacacatgcgcttgtcatacacgccccttccttgccccttcagtattctctctttgcgatggaggtctcatagtgagtgtcttcactcaagggtggtttcctggctgcacggcacctgttccaacacctactgtgcctctcatcaggtgtcacgatttttctgccacttcaccttagggagcttccagtgattgattttaggaggcccacaccaaactccccaggaaatgactgccttccttgggaccaaggaccgttccaacagcattcactgccagttctaataggcgaggaaaatgcccgaggcgctgtcttctgtcccccacacgtaccagaaagtgaaaaatgcagcgagtcctctgggtggttatgagcctccaggcgcatgctgtccagtggacagaacatctggcggttggttgattgctctcttttgtcttggtcgctgcttctagaatctatgcaggggatagcagtgaggtcagaagtctttcccgggagagagatggcctgggttatcattgctgatagctttggctgcatgagttgggcttccccttacccagggctgcacagccaggtgtgagggtcaccggcaggtgggctggtggctgcagcctcagagccctcccaggttgctgctgtttccagtgaatcacatttcgtcatttgaagcccatgaggaccattgtgtggatccatggtgattctagacttcagatatatttaggaaggcgcagatttcaaatctgtgtttgattttctgtaataagagaaatccaatttgtaaaacttgaacaatgataccgttttatttacttagtagcatcactgtgtgtcttagcaggcaggcagtgtctggccattattgcgttctacagccagaggatagaattctatacccccaaccccttgtgtcacaaatgggctctgtgtgggtcaccccagctgacccgtgtatgtgcagatgcagttccgaagggaagaacagtcctcgggtgattcagaggggaaaatgcaatccgggaggtgtttcctcagctgaggtgacactgttagaagctgtgatggttgtgtaaatgtgggctgtgtgctgttcccgaggggagcttgggattgggtcctgctgaagccaggagggtcttcccaagataggagaggaaccgcaggtggtgagcggctggggagggccaggacagccggggctgggtgctgcaggggcttcagcccgggagagggggtgggcgtgttctttgtggtaccaaagtgggactaggacaaaaattgggctgtggctggggcaggagctatagggagttaaggaatgatgatanggaagttggagccaccaccgtggactgggccttgtcactggaggtcgtaggcagtggctcatcaccctggtagggctgataggggctttcagggaggctggttagctccctgcactctggctctttactggcttactgtttagctcctcccacctcgaggctcttcttcctgccaccctttgggctcagaggagggtggcttttttcgaggtgagccatgttgtagacacatgatacgctctgcgtctgctctactgagtactttctgcaggggcctgttaaggacgaggcctccccagccctgcccggtgcaggaggtggctcagttattgaaccttttgggaagcagcacctgggaatgctgcctcgtgggagtcccatgcgtgagtgtggtggtgtgaccttcaggctgcacagaggcaaggacccagatgtggcagcatgggcgtcatgctcctttgcacagcccagggcctgttttggagggaccaggtcactgcccctggtctctctaggaggagtggactgaatggatcgttgcagagaagactcacccagacctggccagggaatgatgtatctggggagagaatgagctggaggagggggcctctcatggcccttccctggcctgtggcccagcctggctggcctgcaggtgtctagggtctcagcttttcatttgcagaggacatgttcaacttcctctctgttcaagccagcctttgccaattttttcagaatccaaacaatttggaggtttggtatcttgtttcatagctgccaaatatgaatctgaaaacagggtgggtagctaaggtcattcctcctgggttttagtggcattgccttccttcactaaagctcccttttttttctgttggcaaggacaggttacagaataggaagagtagcactttccgcctaagcactttaggaaatcacctttctaagccctggggcgcccaagtcccatgggacagggaaacgtggtcctcagtgangctgctgcctggctggcccggagtcctccctaggagaggggctcgatgggctgggggaaggagcctgaaggttgcccctggttgcatcccagaagcatctgactgtcaccactgccagtggctgtggaacagtcctgggccctgggccttggctgctgtcaacagatgggctgggctgggctgtggtggggtgggggacaacgttggtaactctgagaattcagctttggagtcccgggtgaggggttttagataaacccatcaatatcacccacattctgtgactctttgcatcactcgtgttatttatttatttatttatattctgccttgttccagaaaagtgtttaaggcaacaangcttgttttttggtgttttcttttgacatttgaaaatttagtacattgttaaaatgtacttgttaaacaggtaattttaaagagaaggaacaattgtttttagtaagttttctttttcctttttcaatgaattgattcttcaaattaaaagttcttgagagaaggagaggaagatacagcagacataggactgagccaaggaagagtctgcctgagagagacgcttggcctgtgctttgctgccatccgtgcggccttggccacatccctattaacagaggcagctccacttcagacagggacaaggcttcctgctgtgcctttctggcagggtttgtggggtcacatgggaagcaatgtgttacgcaagcagtctccatgtgtgtgtaaactgctgtcctggtgacttgtccctcttcttagtggaaatgcatttgagatggtgacagggctggatgaacgtgtgaccctgggagatccgggctggactgtggaccccgatgggccagagtccttgtggcccacagcatagcactggggacagagcgctctatgcaggtgaggcgtatgagaacagcatggtaaataattgatgaagtcacatttgttcaacttaaaggattgttctttattctgaagttattttcttccttatttggatgataaaatttccttttatgtaatgaaggtaaaagtagagggcaatatttttgctttttgaaatgctcttggttgcaaaacaaaatgttggttgctgtttgtcagccccagaatttcttcttaagttcgcctgtctctgaaatcccaaagtcacggaaccgcagtctagctgtggtgcatgtttacgtattggtgagaaattcctcttgggttcttgaacagcctgtacgctggcaggcagcactgcagcatttctgctgctcatggccaagaacgagtctggagatcgctgcgtgcggttttaggaagtgccaacacccgtggtgatgggcctctggccacccctggatccatgggacacactcacaggaagctgatgtggccttctcggtgaggactgcaccttaacctgggcactgggagcctgtggcccccctgtatgttggtgatgacactagtgtgggtcttctggctctggggctacagcttctgcctcctcacctggccgtcggtactcggcaagcaggcctggcctcccggggcctggatccctaccggctgggattggcctcctggaagtacctgtttgggccatgtgacctcctttctcacttatgcctcactcccctcctcccgctccaaacccgaacctctcagtgtggaatgaacgctccaaacccgaacctctcagtgtggaatgaaacagtttagatgtgtacatgatgcacgtgggtgggattcacatcccaggagaattccacggagaggaatgtgcagattttgaagtgtacagtgatgtgtggaataaatactagaaattctcagcagacagtgggatggagaagtgagtgggggcaggagggggatttctgttgccttgacatgtcgttgctcagtgcctggattgcaggcgagtctctcttttttatgttgctttgatttcaagatctcttagatatactaggtagtgtatgaatgtgcataaatccagtttgagaatggtgtttatgaagaagctgtttcgtgtgtacagttgctgctgtaatttagccagcagtgccctgccctgccctgcagtgtctgctcagctcccactgcttctctttgctgttgggcatgtgaggcatgacttggaggggggcctggtgcctggggacctgctgaagagaatgctcaccaccagctctctgtttccctttctgctttggtaatcaacacgtgtttgcctgcagtggccgggaccgtgactgtttctgcccttgtgcctagttaagagccttcaaaagcataatgaacacttttgatatgatattgtaactttagtaaatgctttacttccctctaattgcccccaaatgccttaattttgtggactgtttatttcaacaggtggaagtgttggtcgtgcgaaatcttggtattcgcatttcaagaagggagttcttttttctttcttctttctatggaacgtttcaagtgattggatagaaagaagggctctgaagcagttttcacctgctctgagggaacttggggctccagggacgtaccccaaatgttgcccaggttgaaactccctgacagcctgttctacgtagtggctcgtggtttccagtttgaagagagttgtgcccctaaaagtgtttgaaacctgtggctttcaagcaaggtaccgttgtccccacagtgttccgtggggtagggggtgatggagactgtgggcaagcctgttgtttttggccccctgttgttacatgggacctgttttgacggtgggagggtgagatgtgaagatgtgggatgaacctggaatgaacgaattaaataaagacatgcatccatctgtcagcga

SEQ ID NO: 365762 - DNA, 6831 bp, Homo sapiens
  misc_feature (5)..(5): n is a, c, g, or t
  misc_feature (11)..(11): n is a, c, g, or t
  misc_feature (21)..(21): n is a, c, g, or t
  misc_feature (24)..(24): n is a, c, g, or t
  misc_feature (2955)..(2955): n is a, c, g, or t
  misc_feature (3959)..(3959): n is a, c, g, or t
  misc_feature (4319)..(4319): n is a, c, g, or t
taggntaggtngaggctgggngtnaatcggccgaggcggcgccggaagtggtcgcgggtcgttctgcttcctgcccgaggggcgtgcgcgggtcaggggcggccgcggaggcggaagcatccatggcggagggcggcagcccagacgggcgggcagggccgggctccgcaggtcgtaatctgaaggagtggctgagggagcaattttgtgatcatccgctggagcactgtgaggacacgaggctccatgatgcagcttacgtcggggacctccagaccctcaggagcctattgcaagaggagagctaccggagccgcatcaacgagaagtctgtctggtgctgtggctggctcccctgcacaccgttgcgaatcgcggccactgcaggccatgggagctgtgtggacttcctcatccggaagggggccgaggtggatctggtggacgtaaaaggacagacggccctgtatgtggctgtggtgaacgggcacctagagagtacccagatccttctcgaagctggcgcggaccccaacggaagccggcaccatcgcagcacccctgtctaccacgcctctcgcgtgggccgggcagacatcctgaaggccctcatcaggtacggggctgatgttgacgtcaaccaccacctgactcctgatgtccagcctcgattctcccggcggctcacctccttggtggtctgccccttgtacatcagcgcagcctaccacaacctccagtgcttccggctgctcctcctggctggcgcgaaccctgacttcaactgcaatggtcctgtcaacacacagggattctacaggggctcccctgggtgcgtcatggatgctgttctgcgccacggctgtgaggcagccttcgtgagcctgctggtagaatttggagccaacctgaatctagtgaagtgggaatcgctgggcccagagtcgagaggaagaagaaaagtggaccctgaggccttgcaggtctttaaagaggccagaagtgttcccagaaccttgctgtgtctgtgccgtgtggctgtgagaagagctcttggcaaacaccggcttcatctgattccttcgctgcctctgccagaccccataaagaagtttctactccatgagtagactccaagtgctgcggttgattccagtgagggagaaagtgatctgcagggaggtggacaccgagccctgagtgctgtgctgctgctggtctcctgatggctgttgctgcagaagatgtcctcgtagactgtcattgctcctcaggtgcctgggccgctgaacagtccttgggtcattgtcagctgagaggcttatactaaagttattattgtttttcccaagttctctgttctggattttcagttgcatattaatgtaacgggccatggggtatgtacatgtaggggctgaggttggaggcctactaatttccctgtagggaagactcccagcacttctggaactgtgcttctctttatttttctacttctcaatttgatggttcgattaaagccttctagtatctcaatgaaaagggagtttcgtaagcaaaatagaggacagaaatgcagttcatgaacttgctggttggtttttcctgctcctggggtaacacatgcgcttgtcatacacgccccttccttgccccttcagtattctctctttgcgatggaggtctcatagtgagtgtcttcactcaagggtggtttcctggctgcacggcacctgttccaacacctactgtgcctctcatcaggtgtcacgatttttctgccacttcaccttagggagcttccagtgattgattttaggaggcccacaccaaactccccaggaaatgactgccttccttgggaccaaggaccgttccaacagcattcactgccagttctaataggcgaggaaaatgcccgaggcgctgtcttctgtcccccacacgtaccagaaagtgaaaaatgcagcgagtcctctgggtggttatgagcctccaggcgcatgctgtccagtggacagaacatctggcggttggttgattgctctcttttgtcttggtcgctgcttctagaatctatgcaggggatagcagtgaggtcagaagtctttcccgggagagagatggcctgggttatcattgctgatagctttggctgcatgagttgggcttccccttacccagggctgcacagccaggtgtgagggtcaccggcaggtgggctggtggctgcagcctcagagccctcccaggttgctgctgtttccagtgaatcacatttcgtcatttgaagcccatgaggaccattgtgtggatccatggtgattctagacttcagatatatttaggaaggcgcagatttcaaatctgtgtttgattttctgtaataagagaaatccaatttgtaaaacttgaacaatgataccgttttatttacttagtagcatcactgtgtgtcttagcaggcaggcagtgtctggccattattgcgttctacagccagaggatagaattctatacccccaaccccttgtgtcacaaatgggctctgtgtgggtcaccccagctgacccgtgtatgtgcagatgcagttccgaagggaagaacagtcctcgggtgattcagaggggaaaatgcaatccgggaggtgtttcctcagctgaggtgacactgttagaagctgtgatggttgtgtaaatgtgggctgtgtgctgttcccgaggggagcttgggattgggtcctgctgaagccaggagggtcttcccaagataggagaggaaccgcaggtggtgagcggctggggagggccaggacagccggggctgggtgctgcaggggcttcagcccgggagagggggtgggcgtgttctttgtggtaccaaagtgggactaggacaaaaattgggctgtggctggggcaggagctatagggagttaaggaatgatgatanggaagttggagccaccaccgtggactgggccttgtcactggaggtcgtaggcagtggctcatcaccctggtagggctgataggggctttcagggaggctggttagctccctgcactctggctctttactggcttactgtttagctcctcccacctcgaggctcttcttcctgccaccctttgggctcagaggagggtggcttttttcgaggtgagccatgttgtagacacatgatacgctctgcgtctgctctactgagtactttctgcaggggcctgttaaggacgaggcctccccagccctgcccggtgcaggaggtggctcagttattgaaccttttgggaagcagcacctgggaatgctgcctcgtgggagtcccatgcgtgagtgtggtggtgtgaccttcaggctgcacagaggcaaggacccagatgtggcagcatgggcgtcatgctcctttgcacagcccagggcctgttttggagggaccaggtcactgcccctggtctctctaggaggagtggactgaatggatcgttgcagagaagactcacccagacctggccagggaatgatgtatctggggagagaatgagctggaggagggggcctctcatggcccttccctggcctgtggcccagcctggctggcctgcaggtgtctagggtctcagcttttcatttgcagaggacatgttcaacttcctctctgttcaagccagcctttgccaattttttcagaatccaaacaatttggaggtttggtatcttgtttcatagctgccaaatatgaatctgaaaacagggtgggtagctaaggtcattcctcctgggttttagtggcattgccttccttcactaaagctcccttttttttctgttggcaaggacaggttacagaataggaagagtagcactttccgcctaagcactttaggaaatcacctttctaagccctggggcgcccaagtcccatgggacagggaaacgtggtcctcagtgangctgctgcctggctggcccggagtcctccctaggagaggggctcgatgggctgggggaaggagcctgaaggttgcccctggttgcatcccagaagcatctgactgtcaccactgccagtggctgtggaacagtcctgggccctgggccttggctgctgtcaacagatgggctgggctgggctgtggtggggtgggggacaacgttggtaactctgagaattcagctttggagtcccgggtgaggggttttagataaacccatcaatatcacccacattctgtgactctttgcatcactcgtgttatttatttatttatttatattctgccttgttccagaaaagtgtttaaggcaacaangcttgttttttggtgttttcttttgacatttgaaaatttagtacattgttaaaatgtacttgttaaacaggtaattttaaagagaaggaacaattgtttttagtaagttttctttttcctttttcaatgaattgattcttcaaattaaaagttcttgagagaaggagaggaagatacagcagacataggactgagccaaggaagagtctgcctgagagagacgcttggcctgtgctttgctgccatccgtgcggccttggccacatccctattaacagaggcagctccacttcagacagggacaaggcttcctgctgtgcctttctggcagggtttgtggggtcacatgggaagcaatgtgttacgcaagcagtctccatgtgtgtgtaaactgctgtcctggtgacttgtccctcttcttagtggaaatgcatttgagatggtgacagggctggatgaacgtgtgaccctgggagatccgggctggactgtggaccccgatgggccagagtccttgtggcccacagcatagcactggggacagagcgctctatgcaggtgaggcgtatgagaacagcatggtaaataattgatgaagtcacatttgttcaacttaaaggattgttctttattctgaagttattttcttccttatttggatgataaaatttccttttatgtaatgaaggtaaaagtagagggcaatatttttgctttttgaaatgctcttggttgcaaaacaaaatgttggttgctgtttgtcagccccagaatttcttcttaagttcgcctgtctctgaaatcccaaagtcacggaaccgcagtctagctgtggtgcatgtttacgtattggtgagaaattcctcttgggttcttgaacagcctgtacgctggcaggcagcactgcagcatttctgctgctcatggccaagaacgagtctggagatcgctgcgtgcggttttaggaagtgccaacacccgtggtgatgggcctctggccacccctggatccatgggacacactcacaggaagctgatgtggccttctcggtgaggactgcaccttaacctgggcactgggagcctgtggcccccctgtatgttggtgatgacactagtgtgggtcttctggctctggggctacagcttctgcctcctcacctggccgtcggtactcggcaagcaggcctggcctcccggggcctggatccctaccggctgggattggcctcctggaagtacctgtttgggccatgtgacctcctttctcacttatgcctcactcccctcctcccgctccaaacccgaacctctcagtgtggaatgaacgctccaaacccgaacctctcagtgtggaatgaaacagtttagatgtgtacatgatgcacgtgggtgggattcacatcccaggagaattccacggagaggaatgtgcagattttgaagtgtacagtgatgtgtggaataaatactagaaattctcagcagacagtgggatggagaagtgagtgggggcaggagggggatttctgttgccttgacatgtcgttgctcagtgcctggattgcaggcgagtctctcttttttatgttgctttgatttcaagatctcttagatatactaggtagtgtatgaatgtgcataaatccagtttgagaatggtgtttatgaagaagctgtttcgtgtgtacagttgctgctgtaatttagccagcagtgccctgccctgccctgcagtgtctgctcagctcccactgcttctctttgctgttgggcatgtgaggcatgacttggaggggggcctggtgcctggggacctgctgaagagaatgctcaccaccagctctctgtttccctttctgctttggtaatcaacacgtgtttgcctgcagtggccgggaccgtgactgtttctgcccttgtgcctagttaagagccttcaaaagcataatgaacacttttgatatgatattgtaactttagtaaatgctttacttccctctaattgcccccaaatgccttaattttgtggactgtttatttcaacaggtggaagtgttggtcgtgcgaaatcttggtattcgcatttcaagaagggagttcttttttctttcttctttctatggaacgtttcaagtgattggatagaaagaagggctctgaagcagttttcacctgctctgagggaacttggggctccagggacgtaccccaaatgttgcccaggttgaaactccctgacagcctgttctacgtagtggctcgtggtttccagtttgaagagagttgtgcccctaaaagtgtttgaaacctgtggctttcaagcaaggtaccgttgtccccacagtgttccgtggggtagggggtgatggagactgtgggcaagcctgttgtttttggccccctgttgttacatgggacctgttttgacggtgggagggtgagatgtgaagatgtgggatgaacctggaatgaacgaattaaataaagacatgcatccatctgtcagcga

SEQ ID NO: 365763 - DNA, 7974 bp, Homo sapiens
  misc_feature (4098)..(4098): n is a, c, g, or t
  misc_feature (5102)..(5102): n is a, c, g, or t
  misc_feature (5462)..(5462): n is a, c, g, or t
ggttgttcacgaatgcattcatttattcaatgaacttcgcgtcagccactggctgtcatcagttaccgacctgattgagggcttcatggaagggatttggaggagcattcatctaaaaccacagcacgctgcgacgctcagccctgcagtgggccctcaccagtccccgcgcctccgaatccaccctcccggggctgctcgtggctagcggggggcacctgcggggaccaagccagcccggccgaggcccgggtcccgcccgccacggccctcggggccccgcccacatctggcagaagccacgccccgtccgtgtgggtggggacggcccgccggaccgaaattcccagactgctgcctcaggcaacgggctttccgactccttggcttcttatgtgaggaaaccacagcgcggccggcatccagagagtcggttagtcgcgaagttcccgccggacgaagggaccagccagcgccctgctagacagcgaggccggaagcggaggcgtggcccctgcgcggccccggaaaccagtgaggccggcgcgcgcccgccggaagccgcgaccccgacgcgccccccattgccctcggcgccggaagtggtcgcgggtcgttctgcttcctgcccgaggggcgtgcgcgggtcaggggcggccgcggaggcggaagcatccatggcggagggcggcagcccagacgggcgggcagggccgggctccgcaggtaacgtgcgcgcggccactgggccgcggggcgtgtggggatggcgaagggctggctccggcgtccctgccgaggtcctgcgtcctcgtcccgggctggccgggtccacggggcagccagggagccgcaccctgcaggccgggggtggggttcagcgcggctcgcagtgctgggcgaccccaccacggacgcgctgccctctcctcggcctcgagtgcagtccccgcgctagattttctttccggtggaacttgctcgtaacttccttcccgttagccgatacaaatttgatatgacccaaccgcaaaagtaggacgtgggccaccttccagctctgagcgcacggatcagggtcttgctgtgttgcccaggctgatcttgaactcctggcctcaagtgatcctgcctcagcctcctgagtagctgggattacaggcgtgccaccatgcccagcttgtgatttatttcttgagcatttgaaggtgccccgtagctgggagagggaaggctcgctgcagatggcacccccttttggttagtcttggcagggcctccatgagctaacaggagcccctctcttcagtgcaggtcgtaatctgaaggagtggctgagggagcaattttgtgatcatccgctggagcactgtgaggacacgaggctccatgatgcagcttacgtcggggacctccagaccctcaggagcctattgcaagaggagagctaccggagccgcatcaacgagaagtctgtctggtgctgtggctggctcccctgcacaccgttgcgaatcgcggccactgcaggccatgggagctgtgtggacttcctcatccggaagggggccgaggtggatctggtggacgtaaaaggacagacggccctgtatgtggctgtggtgaacgggcacctagagagtacccagatccttctcgaagctggcgcggaccccaacggaagccggcaccatcgcagcacccctgtctaccacgcctctcgcgtgggccgggcagacatcctgaaggccctcatcaggtacggggctgatgttgacgtcaaccaccacctgactcctgatgtccagcctcgattctcccggcggctcacctccttggtggtctgccccttgtacatcagcgcagcctaccacaacctccagtgcttccggctgctcctcctggctggcgcgaaccctgacttcaactgcaatggtcctgtcaacacacagggattctacaggggctcccctgggtgcgtcatggatgctgttctgcgccacggctgtgaggcagccttcgtgagcctgctggtagaatttggagccaacctgaatctagtgaagtgggaatcgctgggcccagagtcgagaggaagaagaaaagtggaccctgaggccttgcaggtctttaaagaggccagaagtgttcccagaaccttgctgtgtctgtgccgtgtggctgtgagaagagctcttggcaaacaccggcttcatctgattccttcgctgcctctgccagaccccataaagaagtttctactccatgagtagactccaagtgctgcggttgattccagtgagggagaaagtgatctgcagggaggtggacaccgagccctgagtgctgtgctgctgctggtctcctgatggctgttgctgcagaagatgtcctcgtagactgtcattgctcctcaggtgcctgggccgctgaacagtccttgggtcattgtcagctgagaggcttatactaaagttattattgtttttcccaagttctctgttctggattttcagttgcatattaatgtaacgggccatggggtatgtacatgtaggggctgaggttggaggcctactaatttccctgtagggaagactcccagcacttctggaactgtgcttctctttatttttctacttctcaatttgatggttcgattaaagccttctagtatctcaatgaaaagggagtttcgtaagcaaaatagaggacagaaatgcagttcatgaacttgctggttggtttttcctgctcctggggtaacacatgcgcttgtcatacacgccccttccttgccccttcagtattctctctttgcgatggaggtctcatagtgagtgtcttcactcaagggtggtttcctggctgcacggcacctgttccaacacctactgtgcctctcatcaggtgtcacgatttttctgccacttcaccttagggagcttccagtgattgattttaggaggcccacaccaaactccccaggaaatgactgccttccttgggaccaaggaccgttccaacagcattcactgccagttctaataggcgaggaaaatgcccgaggcgctgtcttctgtcccccacacgtaccagaaagtgaaaaatgcagcgagtcctctgggtggttatgagcctccaggcgcatgctgtccagtggacagaacatctggcggttggttgattgctctcttttgtcttggtcgctgcttctagaatctatgcaggggatagcagtgaggtcagaagtctttcccgggagagagatggcctgggttatcattgctgatagctttggctgcatgagttgggcttccccttacccagggctgcacagccaggtgtgagggtcaccggcaggtgggctggtggctgcagcctcagagccctcccaggttgctgctgtttccagtgaatcacatttcgtcatttgaagcccatgaggaccattgtgtggatccatggtgattctagacttcagatatatttaggaaggcgcagatttcaaatctgtgtttgattttctgtaataagagaaatccaatttgtaaaacttgaacaatgataccgttttatttacttagtagcatcactgtgtgtcttagcaggcaggcagtgtctggccattattgcgttctacagccagaggatagaattctatacccccaaccccttgtgtcacaaatgggctctgtgtgggtcaccccagctgacccgtgtatgtgcagatgcagttccgaagggaagaacagtcctcgggtgattcagaggggaaaatgcaatccgggaggtgtttcctcagctgaggtgacactgttagaagctgtgatggttgtgtaaatgtgggctgtgtgctgttcccgaggggagcttgggattgggtcctgctgaagccaggagggtcttcccaagataggagaggaaccgcaggtggtgagcggctggggagggccaggacagccggggctgggtgctgcaggggcttcagcccgggagagggggtgggcgtgttctttgtggtaccaaagtgggactaggacaaaaattgggctgtggctggggcaggagctatagggagttaaggaatgatgatanggaagttggagccaccaccgtggactgggccttgtcactggaggtcgtaggcagtggctcatcaccctggtagggctgataggggctttcagggaggctggttagctccctgcactctggctctttactggcttactgtttagctcctcccacctcgaggctcttcttcctgccaccctttgggctcagaggagggtggcttttttcgaggtgagccatgttgtagacacatgatacgctctgcgtctgctctactgagtactttctgcaggggcctgttaaggacgaggcctccccagccctgcccggtgcaggaggtggctcagttattgaaccttttgggaagcagcacctgggaatgctgcctcgtgggagtcccatgcgtgagtgtggtggtgtgaccttcaggctgcacagaggcaaggacccagatgtggcagcatgggcgtcatgctcctttgcacagcccagggcctgttttggagggaccaggtcactgcccctggtctctctaggaggagtggactgaatggatcgttgcagagaagactcacccagacctggccagggaatgatgtatctggggagagaatgagctggaggagggggcctctcatggcccttccctggcctgtggcccagcctggctggcctgcaggtgtctagggtctcagcttttcatttgcagaggacatgttcaacttcctctctgttcaagccagcctttgccaattttttcagaatccaaacaatttggaggtttggtatcttgtttcatagctgccaaatatgaatctgaaaacagggtgggtagctaaggtcattcctcctgggttttagtggcattgccttccttcactaaagctcccttttttttctgttggcaaggacaggttacagaataggaagagtagcactttccgcctaagcactttaggaaatcacctttctaagccctggggcgcccaagtcccatgggacagggaaacgtggtcctcagtgangctgctgcctggctggcccggagtcctccctaggagaggggctcgatgggctgggggaaggagcctgaaggttgcccctggttgcatcccagaagcatctgactgtcaccactgccagtggctgtggaacagtcctgggccctgggccttggctgctgtcaacagatgggctgggctgggctgtggtggggtgggggacaacgttggtaactctgagaattcagctttggagtcccgggtgaggggttttagataaacccatcaatatcacccacattctgtgactctttgcatcactcgtgttatttatttatttatttatattctgccttgttccagaaaagtgtttaaggcaacaangcttgttttttggtgttttcttttgacatttgaaaatttagtacattgttaaaatgtacttgttaaacaggtaattttaaagagaaggaacaattgtttttagtaagttttctttttcctttttcaatgaattgattcttcaaattaaaagttcttgagagaaggagaggaagatacagcagacataggactgagccaaggaagagtctgcctgagagagacgcttggcctgtgctttgctgccatccgtgcggccttggccacatccctattaacagaggcagctccacttcagacagggacaaggcttcctgctgtgcctttctggcagggtttgtggggtcacatgggaagcaatgtgttacgcaagcagtctccatgtgtgtgtaaactgctgtcctggtgacttgtccctcttcttagtggaaatgcatttgagatggtgacagggctggatgaacgtgtgaccctgggagatccgggctggactgtggaccccgatgggccagagtccttgtggcccacagcatagcactggggacagagcgctctatgcaggtgaggcgtatgagaacagcatggtaaataattgatgaagtcacatttgttcaacttaaaggattgttctttattctgaagttattttcttccttatttggatgataaaatttccttttatgtaatgaaggtaaaagtagagggcaatatttttgctttttgaaatgctcttggttgcaaaacaaaatgttggttgctgtttgtcagccccagaatttcttcttaagttcgcctgtctctgaaatcccaaagtcacggaaccgcagtctagctgtggtgcatgtttacgtattggtgagaaattcctcttgggttcttgaacagcctgtacgctggcaggcagcactgcagcatttctgctgctcatggccaagaacgagtctggagatcgctgcgtgcggttttaggaagtgccaacacccgtggtgatgggcctctggccacccctggatccatgggacacactcacaggaagctgatgtggccttctcggtgaggactgcaccttaacctgggcactgggagcctgtggcccccctgtatgttggtgatgacactagtgtgggtcttctggctctggggctacagcttctgcctcctcacctggccgtcggtactcggcaagcaggcctggcctcccggggcctggatccctaccggctgggattggcctcctggaagtacctgtttgggccatgtgacctcctttctcacttatgcctcactcccctcctcccgctccaaacccgaacctctcagtgtggaatgaacgctccaaacccgaacctctcagtgtggaatgaaacagtttagatgtgtacatgatgcacgtgggtgggattcacatcccaggagaattccacggagaggaatgtgcagattttgaagtgtacagtgatgtgtggaataaatactagaaattctcagcagacagtgggatggagaagtgagtgggggcaggagggggatttctgttgccttgacatgtcgttgctcagtgcctggattgcaggcgagtctctcttttttatgttgctttgatttcaagatctcttagatatactaggtagtgtatgaatgtgcataaatccagtttgagaatggtgtttatgaagaagctgtttcgtgtgtacagttgctgctgtaatttagccagcagtgccctgccctgccctgcagtgtctgctcagctcccactgcttctctttgctgttgggcatgtgaggcatgacttggaggggggcctggtgcctggggacctgctgaagagaatgctcaccaccagctctctgtttccctttctgctttggtaatcaacacgtgtttgcctgcagtggccgggaccgtgactgtttctgcccttgtgcctagttaagagccttcaaaagcataatgaacacttttgatatgatattgtaactttagtaaatgctttacttccctctaattgcccccaaatgccttaattttgtggactgtttatttcaacaggtggaagtgttggtcgtgcgaaatcttggtattcgcatttcaagaagggagttcttttttctttcttctttctatggaacgtttcaagtgattggatagaaagaagggctctgaagcagttttcacctgctctgagggaacttggggctccagggacgtaccccaaatgttgcccaggttgaaactccctgacagcctgttctacgtagtggctcgtggtttccagtttgaagagagttgtgcccctaaaagtgtttgaaacctgtggctttcaagcaaggtaccgttgtccccacagtgttccgtggggtagggggtgatggagactgtgggcaagcctgttgtttttggccccctgttgttacatgggacctgttttgacggtgggagggtgagatgtgaagatgtgggatgaacctggaatgaacgaattaaataaagacatgcatccatctgtcagcga

SEQ ID NO: 365764 - DNA, 7868 bp, Homo sapiens
  misc_feature (3992)..(3992): n is a, c, g, or t
  misc_feature (4996)..(4996): n is a, c, g, or t
  misc_feature (5356)..(5356): n is a, c, g, or t
ggttgttcacgaatgcattcatttattcaatgaacttcgcgtcagccactggctgtcatcagttaccgacctgattgagggcttcatggaagggatttggaggagcattcatctaaaaccacagcacgctgcgacgctcagccctgcagtgggccctcaccagtccccgcgcctccgaatccaccctcccggggctgctcgtggctagcggggggcacctgcggggaccaagccagcccggccgaggcccgggtcccgcccgccacggccctcggggccccgcccacatctggcagaagccacgccccgtccgtgtgggtggggacggcccgccggaccgaaattcccagactgctgcctcaggcaacgggctttccgactccttggcttcttatgtgaggaaaccacagcgcggccggcatccagagagtcggttagtcgcgaagttcccgccggacgaagggaccagccagcgccctgctagacagcgaggccggaagcggaggcgtggcccctgcgcggccccggaaaccagtgaggccggcgcgcgcccgccggaagccgcgaccccgacgcgccccccattgccctcggcgccggaagtggtcgcgggtcgttctgcttcctgcccgaggggcgtgcgcgggtcaggggcggccgcggaggcggaagcatccatggcggagggcggcagcccagacgggcgggcagggccgggctccgcaggtaacgtgcgcgcggccactgggccgcggggcgtgtggggatggcgaagggctggctccggcgtccctgccgaggtcctgcgtcctcgtcccgggctggccgggtccacggggcagccagggagccgcaccctgcaggccgggggtggggttcagcgcggctcgcagtgctgggcgaccccaccacggacgcgctgccctctcctcggcctcgagtgcagtccccgcgctagattttctttccggtggaacttgctcgtaacttccttcccgttagccgatacaaatttgatatgacccaaccgcaaaagtaggacgtgggccaccttccagctctgagcgcacggatcagggtcttgctgtgttgcccaggctgatcttgaactcctggcctcaagtgatcctgcctcagcctcctgagtagctgggattacaggcgtgccaccatgcccagcttgtgatttatttcttgagcatttgaaggtcgtaatctgaaggagtggctgagggagcaattttgtgatcatccgctggagcactgtgaggacacgaggctccatgatgcagcttacgtcggggacctccagaccctcaggagcctattgcaagaggagagctaccggagccgcatcaacgagaagtctgtctggtgctgtggctggctcccctgcacaccgttgcgaatcgcggccactgcaggccatgggagctgtgtggacttcctcatccggaagggggccgaggtggatctggtggacgtaaaaggacagacggccctgtatgtggctgtggtgaacgggcacctagagagtacccagatccttctcgaagctggcgcggaccccaacggaagccggcaccatcgcagcacccctgtctaccacgcctctcgcgtgggccgggcagacatcctgaaggccctcatcaggtacggggctgatgttgacgtcaaccaccacctgactcctgatgtccagcctcgattctcccggcggctcacctccttggtggtctgccccttgtacatcagcgcagcctaccacaacctccagtgcttccggctgctcctcctggctggcgcgaaccctgacttcaactgcaatggtcctgtcaacacacagggattctacaggggctcccctgggtgcgtcatggatgctgttctgcgccacggctgtgaggcagccttcgtgagcctgctggtagaatttggagccaacctgaatctagtgaagtgggaatcgctgggcccagagtcgagaggaagaagaaaagtggaccctgaggccttgcaggtctttaaagaggccagaagtgttcccagaaccttgctgtgtctgtgccgtgtggctgtgagaagagctcttggcaaacaccggcttcatctgattccttcgctgcctctgccagaccccataaagaagtttctactccatgagtagactccaagtgctgcggttgattccagtgagggagaaagtgatctgcagggaggtggacaccgagccctgagtgctgtgctgctgctggtctcctgatggctgttgctgcagaagatgtcctcgtagactgtcattgctcctcaggtgcctgggccgctgaacagtccttgggtcattgtcagctgagaggcttatactaaagttattattgtttttcccaagttctctgttctggattttcagttgcatattaatgtaacgggccatggggtatgtacatgtaggggctgaggttggaggcctactaatttccctgtagggaagactcccagcacttctggaactgtgcttctctttatttttctacttctcaatttgatggttcgattaaagccttctagtatctcaatgaaaagggagtttcgtaagcaaaatagaggacagaaatgcagttcatgaacttgctggttggtttttcctgctcctggggtaacacatgcgcttgtcatacacgccccttccttgccccttcagtattctctctttgcgatggaggtctcatagtgagtgtcttcactcaagggtggtttcctggctgcacggcacctgttccaacacctactgtgcctctcatcaggtgtcacgatttttctgccacttcaccttagggagcttccagtgattgattttaggaggcccacaccaaactccccaggaaatgactgccttccttgggaccaaggaccgttccaacagcattcactgccagttctaataggcgaggaaaatgcccgaggcgctgtcttctgtcccccacacgtaccagaaagtgaaaaatgcagcgagtcctctgggtggttatgagcctccaggcgcatgctgtccagtggacagaacatctggcggttggttgattgctctcttttgtcttggtcgctgcttctagaatctatgcaggggatagcagtgaggtcagaagtctttcccgggagagagatggcctgggttatcattgctgatagctttggctgcatgagttgggcttccccttacccagggctgcacagccaggtgtgagggtcaccggcaggtgggctggtggctgcagcctcagagccctcccaggttgctgctgtttccagtgaatcacatttcgtcatttgaagcccatgaggaccattgtgtggatccatggtgattctagacttcagatatatttaggaaggcgcagatttcaaatctgtgtttgattttctgtaataagagaaatccaatttgtaaaacttgaacaatgataccgttttatttacttagtagcatcactgtgtgtcttagcaggcaggcagtgtctggccattattgcgttctacagccagaggatagaattctatacccccaaccccttgtgtcacaaatgggctctgtgtgggtcaccccagctgacccgtgtatgtgcagatgcagttccgaagggaagaacagtcctcgggtgattcagaggggaaaatgcaatccgggaggtgtttcctcagctgaggtgacactgttagaagctgtgatggttgtgtaaatgtgggctgtgtgctgttcccgaggggagcttgggattgggtcctgctgaagccaggagggtcttcccaagataggagaggaaccgcaggtggtgagcggctggggagggccaggacagccggggctgggtgctgcaggggcttcagcccgggagagggggtgggcgtgttctttgtggtaccaaagtgggactaggacaaaaattgggctgtggctggggcaggagctatagggagttaaggaatgatgatanggaagttggagccaccaccgtggactgggccttgtcactggaggtcgtaggcagtggctcatcaccctggtagggctgataggggctttcagggaggctggttagctccctgcactctggctctttactggcttactgtttagctcctcccacctcgaggctcttcttcctgccaccctttgggctcagaggagggtggcttttttcgaggtgagccatgttgtagacacatgatacgctctgcgtctgctctactgagtactttctgcaggggcctgttaaggacgaggcctccccagccctgcccggtgcaggaggtggctcagttattgaaccttttgggaagcagcacctgggaatgctgcctcgtgggagtcccatgcgtgagtgtggtggtgtgaccttcaggctgcacagaggcaaggacccagatgtggcagcatgggcgtcatgctcctttgcacagcccagggcctgttttggagggaccaggtcactgcccctggtctctctaggaggagtggactgaatggatcgttgcagagaagactcacccagacctggccagggaatgatgtatctggggagagaatgagctggaggagggggcctctcatggcccttccctggcctgtggcccagcctggctggcctgcaggtgtctagggtctcagcttttcatttgcagaggacatgttcaacttcctctctgttcaagccagcctttgccaattttttcagaatccaaacaatttggaggtttggtatcttgtttcatagctgccaaatatgaatctgaaaacagggtgggtagctaaggtcattcctcctgggttttagtggcattgccttccttcactaaagctcccttttttttctgttggcaaggacaggttacagaataggaagagtagcactttccgcctaagcactttaggaaatcacctttctaagccctggggcgcccaagtcccatgggacagggaaacgtggtcctcagtgangctgctgcctggctggcccggagtcctccctaggagaggggctcgatgggctgggggaaggagcctgaaggttgcccctggttgcatcccagaagcatctgactgtcaccactgccagtggctgtggaacagtcctgggccctgggccttggctgctgtcaacagatgggctgggctgggctgtggtggggtgggggacaacgttggtaactctgagaattcagctttggagtcccgggtgaggggttttagataaacccatcaatatcacccacattctgtgactctttgcatcactcgtgttatttatttatttatttatattctgccttgttccagaaaagtgtttaaggcaacaangcttgttttttggtgttttcttttgacatttgaaaatttagtacattgttaaaatgtacttgttaaacaggtaattttaaagagaaggaacaattgtttttagtaagttttctttttcctttttcaatgaattgattcttcaaattaaaagttcttgagagaaggagaggaagatacagcagacataggactgagccaaggaagagtctgcctgagagagacgcttggcctgtgctttgctgccatccgtgcggccttggccacatccctattaacagaggcagctccacttcagacagggacaaggcttcctgctgtgcctttctggcagggtttgtggggtcacatgggaagcaatgtgttacgcaagcagtctccatgtgtgtgtaaactgctgtcctggtgacttgtccctcttcttagtggaaatgcatttgagatggtgacagggctggatgaacgtgtgaccctgggagatccgggctggactgtggaccccgatgggccagagtccttgtggcccacagcatagcactggggacagagcgctctatgcaggtgaggcgtatgagaacagcatggtaaataattgatgaagtcacatttgttcaacttaaaggattgttctttattctgaagttattttcttccttatttggatgataaaatttccttttatgtaatgaaggtaaaagtagagggcaatatttttgctttttgaaatgctcttggttgcaaaacaaaatgttggttgctgtttgtcagccccagaatttcttcttaagttcgcctgtctctgaaatcccaaagtcacggaaccgcagtctagctgtggtgcatgtttacgtattggtgagaaattcctcttgggttcttgaacagcctgtacgctggcaggcagcactgcagcatttctgctgctcatggccaagaacgagtctggagatcgctgcgtgcggttttaggaagtgccaacacccgtggtgatgggcctctggccacccctggatccatgggacacactcacaggaagctgatgtggccttctcggtgaggactgcaccttaacctgggcactgggagcctgtggcccccctgtatgttggtgatgacactagtgtgggtcttctggctctggggctacagcttctgcctcctcacctggccgtcggtactcggcaagcaggcctggcctcccggggcctggatccctaccggctgggattggcctcctggaagtacctgtttgggccatgtgacctcctttctcacttatgcctcactcccctcctcccgctccaaacccgaacctctcagtgtggaatgaacgctccaaacccgaacctctcagtgtggaatgaaacagtttagatgtgtacatgatgcacgtgggtgggattcacatcccaggagaattccacggagaggaatgtgcagattttgaagtgtacagtgatgtgtggaataaatactagaaattctcagcagacagtgggatggagaagtgagtgggggcaggagggggatttctgttgccttgacatgtcgttgctcagtgcctggattgcaggcgagtctctcttttttatgttgctttgatttcaagatctcttagatatactaggtagtgtatgaatgtgcataaatccagtttgagaatggtgtttatgaagaagctgtttcgtgtgtacagttgctgctgtaatttagccagcagtgccctgccctgccctgcagtgtctgctcagctcccactgcttctctttgctgttgggcatgtgaggcatgacttggaggggggcctggtgcctggggacctgctgaagagaatgctcaccaccagctctctgtttccctttctgctttggtaatcaacacgtgtttgcctgcagtggccgggaccgtgactgtttctgcccttgtgcctagttaagagccttcaaaagcataatgaacacttttgatatgatattgtaactttagtaaatgctttacttccctctaattgcccccaaatgccttaattttgtggactgtttatttcaacaggtggaagtgttggtcgtgcgaaatcttggtattcgcatttcaagaagggagttcttttttctttcttctttctatggaacgtttcaagtgattggatagaaagaagggctctgaagcagttttcacctgctctgagggaacttggggctccagggacgtaccccaaatgttgcccaggttgaaactccctgacagcctgttctacgtagtggctcgtggtttccagtttgaagagagttgtgcccctaaaagtgtttgaaacctgtggctttcaagcaaggtaccgttgtccccacagtgttccgtggggtagggggtgatggagactgtgggcaagcctgttgtttttggccccctgttgttacatgggacctgttttgacggtgggagggtgagatgtgaagatgtgggatgaacctggaatgaacgaattaaataaagacatgcatccatctgtcagcga

SEQ ID NO: 365765 - DNA, 7420 bp, Homo sapiens
  misc_feature (3510)..(3510): n is a, c, g, or t
  misc_feature (4514)..(4514): n is a, c, g, or t
  misc_feature (4874)..(4874): n is a, c, g, or t
ggttgttcacgaatgcattcatttattcaatgaacttcgcgtcagccactggctgtcatcagttaccgacctgattgagggcttcatggaagggatttggaggagcattcatctaaaaccacagcacgctgcgacgctcagccctgcagtgggccctcaccagtccccgcgcctccgaatccaccctcccggggctgctcgtggctagcggggggcacctgcggggaccaagccagcccggccgaggcccgggtcccgcccgccacggccctcggggccccgcccacatctggcagaagccacgccccgtccgtgtgggtggggacggcccgccggaccgaaattcccagactgctgcctcaggcaacgggctttccgactccttggcttcttatgtgaggaaaccacagcgcggccggcatccagagagtcggttagtcgcgaagttcccgccggacgaagggaccagccagcgccctgctagacagcgaggccggaagcggaggcgtggcccctgcgcggccccggaaaccagtgaggccggcgcgcgcccgccggaagccgcgaccccgacgcgccccccattgccctcggcgccggaagtggtcgcgggtcgttctgcttcctgcccgaggggcgtgcgcgggtcaggggcggccgcggaggcggaagcatccatggcggagggcggcagcccagacgggcgggcagggccgggctccgcaggtcgtaatctgaaggagtggctgagggagcaattttgtgatcatccgctggagcactgtgaggacacgaggctccatgatgcagcttacgtcggggacctccagaccctcaggagcctattgcaagaggagagctaccggagccgcatcaacgagaagtctgtctggtgctgtggctggctcccctgcacaccgttgcgaatcgcggccactgcaggccatgggagctgtgtggacttcctcatccggaagggggccgaggtggatctggtggacgtaaaaggacagacggccctgtatgtggctgtggtgaacgggcacctagagagtacccagatccttctcgaagctggcgcggaccccaacggaagccggcaccatcgcagcacccctgtctaccacgcctctcgcgtgggccgggcagacatcctgaaggccctcatcaggtacggggctgatgttgacgtcaaccaccacctgactcctgatgtccagcctcgattctcccggcggctcacctccttggtggtctgccccttgtacatcagcgcagcctaccacaacctccagtgcttccggctgctcctcctggctggcgcgaaccctgacttcaactgcaatggtcctgtcaacacacagggattctacaggggctcccctgggtgcgtcatggatgctgttctgcgccacggctgtgaggcagccttcgtgagcctgctggtagaatttggagccaacctgaatctagtgaagtgggaatcgctgggcccagagtcgagaggaagaagaaaagtggaccctgaggccttgcaggtctttaaagaggccagaagtgttcccagaaccttgctgtgtctgtgccgtgtggctgtgagaagagctcttggcaaacaccggcttcatctgattccttcgctgcctctgccagaccccataaagaagtttctactccatgagtagactccaagtgctgcggttgattccagtgagggagaaagtgatctgcagggaggtggacaccgagccctgagtgctgtgctgctgctggtctcctgatggctgttgctgcagaagatgtcctcgtagactgtcattgctcctcaggtgcctgggccgctgaacagtccttgggtcattgtcagctgagaggcttatactaaagttattattgtttttcccaagttctctgttctggattttcagttgcatattaatgtaacgggccatggggtatgtacatgtaggggctgaggttggaggcctactaatttccctgtagggaagactcccagcacttctggaactgtgcttctctttatttttctacttctcaatttgatggttcgattaaagccttctagtatctcaatgaaaagggagtttcgtaagcaaaatagaggacagaaatgcagttcatgaacttgctggttggtttttcctgctcctggggtaacacatgcgcttgtcatacacgccccttccttgccccttcagtattctctctttgcgatggaggtctcatagtgagtgtcttcactcaagggtggtttcctggctgcacggcacctgttccaacacctactgtgcctctcatcaggtgtcacgatttttctgccacttcaccttagggagcttccagtgattgattttaggaggcccacaccaaactccccaggaaatgactgccttccttgggaccaaggaccgttccaacagcattcactgccagttctaataggcgaggaaaatgcccgaggcgctgtcttctgtcccccacacgtaccagaaagtgaaaaatgcagcgagtcctctgggtggttatgagcctccaggcgcatgctgtccagtggacagaacatctggcggttggttgattgctctcttttgtcttggtcgctgcttctagaatctatgcaggggatagcagtgaggtcagaagtctttcccgggagagagatggcctgggttatcattgctgatagctttggctgcatgagttgggcttccccttacccagggctgcacagccaggtgtgagggtcaccggcaggtgggctggtggctgcagcctcagagccctcccaggttgctgctgtttccagtgaatcacatttcgtcatttgaagcccatgaggaccattgtgtggatccatggtgattctagacttcagatatatttaggaaggcgcagatttcaaatctgtgtttgattttctgtaataagagaaatccaatttgtaaaacttgaacaatgataccgttttatttacttagtagcatcactgtgtgtcttagcaggcaggcagtgtctggccattattgcgttctacagccagaggatagaattctatacccccaaccccttgtgtcacaaatgggctctgtgtgggtcaccccagctgacccgtgtatgtgcagatgcagttccgaagggaagaacagtcctcgggtgattcagaggggaaaatgcaatccgggaggtgtttcctcagctgaggtgacactgttagaagctgtgatggttgtgtaaatgtgggctgtgtgctgttcccgaggggagcttgggattgggtcctgctgaagccaggagggtcttcccaagataggagaggaaccgcaggtggtgagcggctggggagggccaggacagccggggctgggtgctgcaggggcttcagcccgggagagggggtgggcgtgttctttgtggtaccaaagtgggactaggacaaaaattgggctgtggctggggcaggagctatagggagttaaggaatgatgatanggaagttggagccaccaccgtggactgggccttgtcactggaggtcgtaggcagtggctcatcaccctggtagggctgataggggctttcagggaggctggttagctccctgcactctggctctttactggcttactgtttagctcctcccacctcgaggctcttcttcctgccaccctttgggctcagaggagggtggcttttttcgaggtgagccatgttgtagacacatgatacgctctgcgtctgctctactgagtactttctgcaggggcctgttaaggacgaggcctccccagccctgcccggtgcaggaggtggctcagttattgaaccttttgggaagcagcacctgggaatgctgcctcgtgggagtcccatgcgtgagtgtggtggtgtgaccttcaggctgcacagaggcaaggacccagatgtggcagcatgggcgtcatgctcctttgcacagcccagggcctgttttggagggaccaggtcactgcccctggtctctctaggaggagtggactgaatggatcgttgcagagaagactcacccagacctggccagggaatgatgtatctggggagagaatgagctggaggagggggcctctcatggcccttccctggcctgtggcccagcctggctggcctgcaggtgtctagggtctcagcttttcatttgcagaggacatgttcaacttcctctctgttcaagccagcctttgccaattttttcagaatccaaacaatttggaggtttggtatcttgtttcatagctgccaaatatgaatctgaaaacagggtgggtagctaaggtcattcctcctgggttttagtggcattgccttccttcactaaagctcccttttttttctgttggcaaggacaggttacagaataggaagagtagcactttccgcctaagcactttaggaaatcacctttctaagccctggggcgcccaagtcccatgggacagggaaacgtggtcctcagtgangctgctgcctggctggcccggagtcctccctaggagaggggctcgatgggctgggggaaggagcctgaaggttgcccctggttgcatcccagaagcatctgactgtcaccactgccagtggctgtggaacagtcctgggccctgggccttggctgctgtcaacagatgggctgggctgggctgtggtggggtgggggacaacgttggtaactctgagaattcagctttggagtcccgggtgaggggttttagataaacccatcaatatcacccacattctgtgactctttgcatcactcgtgttatttatttatttatttatattctgccttgttccagaaaagtgtttaaggcaacaangcttgttttttggtgttttcttttgacatttgaaaatttagtacattgttaaaatgtacttgttaaacaggtaattttaaagagaaggaacaattgtttttagtaagttttctttttcctttttcaatgaattgattcttcaaattaaaagttcttgagagaaggagaggaagatacagcagacataggactgagccaaggaagagtctgcctgagagagacgcttggcctgtgctttgctgccatccgtgcggccttggccacatccctattaacagaggcagctccacttcagacagggacaaggcttcctgctgtgcctttctggcagggtttgtggggtcacatgggaagcaatgtgttacgcaagcagtctccatgtgtgtgtaaactgctgtcctggtgacttgtccctcttcttagtggaaatgcatttgagatggtgacagggctggatgaacgtgtgaccctgggagatccgggctggactgtggaccccgatgggccagagtccttgtggcccacagcatagcactggggacagagcgctctatgcaggtgaggcgtatgagaacagcatggtaaataattgatgaagtcacatttgttcaacttaaaggattgttctttattctgaagttattttcttccttatttggatgataaaatttccttttatgtaatgaaggtaaaagtagagggcaatatttttgctttttgaaatgctcttggttgcaaaacaaaatgttggttgctgtttgtcagccccagaatttcttcttaagttcgcctgtctctgaaatcccaaagtcacggaaccgcagtctagctgtggtgcatgtttacgtattggtgagaaattcctcttgggttcttgaacagcctgtacgctggcaggcagcactgcagcatttctgctgctcatggccaagaacgagtctggagatcgctgcgtgcggttttaggaagtgccaacacccgtggtgatgggcctctggccacccctggatccatgggacacactcacaggaagctgatgtggccttctcggtgaggactgcaccttaacctgggcactgggagcctgtggcccccctgtatgttggtgatgacactagtgtgggtcttctggctctggggctacagcttctgcctcctcacctggccgtcggtactcggcaagcaggcctggcctcccggggcctggatccctaccggctgggattggcctcctggaagtacctgtttgggccatgtgacctcctttctcacttatgcctcactcccctcctcccgctccaaacccgaacctctcagtgtggaatgaacgctccaaacccgaacctctcagtgtggaatgaacgctccaaacccgaacctctcagtgtggaatgaaacagtttagatgtgtacatgatgcacgtgggtgggattcacatcccaggagaattccacggagaggaatgtgcagattttgaagtgtacagtgatgtgtggaataaatactagaaattctcagcagacagtgggatggagaagtgagtgggggcaggagggggatttctgttgccttgacatgtcgttgctcagtgcctggattgcaggcgagtctctcttttttatgttgctttgatttcaagatctcttagatatactaggtagtgtatgaatgtgcataaatccagtttgagaatggtgtttatgaagaagctgtttcgtgtgtacagttgctgctgtaatttagccagcagtgccctgccctgccctgcagtgtctgctcagctcccactgcttctctttgctgttgggcatgtgaggcatgacttggaggggggcctggtgcctggggacctgctgaagagaatgctcaccaccagctctctgtttccctttctgctttggtaatcaacacgtgtttgcctgcagtggccgggaccgtgactgtttctgcccttgtgcctagttaagagccttcaaaagcataatgaacacttttgatatgatattgtaactttagtaaatgctttacttccctctaattgcccccaaatgccttaattttgtggactgtttatttcaacaggtggaagtgttggtcgtgcgaaatcttggtattcgcatttcaagaagggagttcttttttctttcttctttctatggaacgtttcaagtgattggatagaaagaagggctctgaagcagttttcacctgctctgagggaacttggggctccagggacgtaccccaaatgttgcccaggttgaaactccctgacagcctgttctacgtagtggctcgtggtttccagtttgaagagagttgtgcccctaaaagtgtttgaaacctgtggctttcaagcaaggtaccgttgtccccacagtgttccgtggggtagggggtgatggagactgtgggcaagcctgttgtttttggccccctgttgttacatgggacctgttttgacggtgggagggtgagatgtgaagatgtgggatgaacctggaatgaacgaattaaataaagacatgcatccatctgtcagcga

SEQ ID NO: 365766 - DNA, 7083 bp, Homo sapiens
  misc_feature (3207)..(3207): n is a, c, g, or t
  misc_feature (4211)..(4211): n is a, c, g, or t
  misc_feature (4571)..(4571): n is a, c, g, or t
ggttgttcacgaatgcattcatttattcaatgaacttcgcgtcagccactggctgtcatcagttaccgacctgattgagggcttcatggaagggatttggaggagcattcatctaaaaccacagcacgctgcgacgctcagccctgcagtgggccctcaccagtccccgcgcctccgaatccaccctcccggggctgctcgtggctagcggggggcacctgcggggaccaagccagcccggccgaggcccgggtcccgcccgccacggccctcggggccccgcccacatctggcagaagccacgccccgtccgtgtgggtggggacggcccgccggaccgaaattcccagactgctgcctcaggcaacgggctttccgactccttggcttcttatgtgaggaaaccacagcgcggccggcatccagagagtcggttagtcgcgaagttcccgccggacgaagggaccagccagcgccctgctagacagcgaggccggaagcggaggcgtggcccctgcgcggccccggaaaccagtgaggccggcgcgcgcccgccggaagccgcgaccccgacgcgccccccattgccctcggcgccggaagtggtcgcgggtcgttctgcttcctgcccgaggggcgtgcgcgggtcaggggcggccgcggaggcggaagcatccatggcggagggcggcagcccagacgggcgggcagggccgggctccgcaggtcgtaatctgaaggagtggctgagggagcaattttgtgatcatccgctggagcactgtgaggacacgaggctccatgatgcagcttacgtcggggacctccagaccctcaggagcctattgcaagaggagagctaccggaggtacggggctgatgttgacgtcaaccaccacctgactcctgatgtccagcctcgattctcccggcggctcacctccttggtggtctgccccttgtacatcagcgcagcctaccacaacctccagtgcttccggctgctcctcctggctggcgcgaaccctgacttcaactgcaatggtcctgtcaacacacagggattctacaggggctcccctgggtgcgtcatggatgctgttctgcgccacggctgtgaggcagccttcgtgagcctgctggtagaatttggagccaacctgaatctagtgaagtgggaatcgctgggcccagagtcgagaggaagaagaaaagtggaccctgaggccttgcaggtctttaaagaggccagaagtgttcccagaaccttgctgtgtctgtgccgtgtggctgtgagaagagctcttggcaaacaccggcttcatctgattccttcgctgcctctgccagaccccataaagaagtttctactccatgagtagactccaagtgctgcggttgattccagtgagggagaaagtgatctgcagggaggtggacaccgagccctgagtgctgtgctgctgctggtctcctgatggctgttgctgcagaagatgtcctcgtagactgtcattgctcctcaggtgcctgggccgctgaacagtccttgggtcattgtcagctgagaggcttatactaaagttattattgtttttcccaagttctctgttctggattttcagttgcatattaatgtaacgggccatggggtatgtacatgtaggggctgaggttggaggcctactaatttccctgtagggaagactcccagcacttctggaactgtgcttctctttatttttctacttctcaatttgatggttcgattaaagccttctagtatctcaatgaaaagggagtttcgtaagcaaaatagaggacagaaatgcagttcatgaacttgctggttggtttttcctgctcctggggtaacacatgcgcttgtcatacacgccccttccttgccccttcagtattctctctttgcgatggaggtctcatagtgagtgtcttcactcaagggtggtttcctggctgcacggcacctgttccaacacctactgtgcctctcatcaggtgtcacgatttttctgccacttcaccttagggagcttccagtgattgattttaggaggcccacaccaaactccccaggaaatgactgccttccttgggaccaaggaccgttccaacagcattcactgccagttctaataggcgaggaaaatgcccgaggcgctgtcttctgtcccccacacgtaccagaaagtgaaaaatgcagcgagtcctctgggtggttatgagcctccaggcgcatgctgtccagtggacagaacatctggcggttggttgattgctctcttttgtcttggtcgctgcttctagaatctatgcaggggatagcagtgaggtcagaagtctttcccgggagagagatggcctgggttatcattgctgatagctttggctgcatgagttgggcttccccttacccagggctgcacagccaggtgtgagggtcaccggcaggtgggctggtggctgcagcctcagagccctcccaggttgctgctgtttccagtgaatcacatttcgtcatttgaagcccatgaggaccattgtgtggatccatggtgattctagacttcagatatatttaggaaggcgcagatttcaaatctgtgtttgattttctgtaataagagaaatccaatttgtaaaacttgaacaatgataccgttttatttacttagtagcatcactgtgtgtcttagcaggcaggcagtgtctggccattattgcgttctacagccagaggatagaattctatacccccaaccccttgtgtcacaaatgggctctgtgtgggtcaccccagctgacccgtgtatgtgcagatgcagttccgaagggaagaacagtcctcgggtgattcagaggggaaaatgcaatccgggaggtgtttcctcagctgaggtgacactgttagaagctgtgatggttgtgtaaatgtgggctgtgtgctgttcccgaggggagcttgggattgggtcctgctgaagccaggagggtcttcccaagataggagaggaaccgcaggtggtgagcggctggggagggccaggacagccggggctgggtgctgcaggggcttcagcccgggagagggggtgggcgtgttctttgtggtaccaaagtgggactaggacaaaaattgggctgtggctggggcaggagctatagggagttaaggaatgatgatanggaagttggagccaccaccgtggactgggccttgtcactggaggtcgtaggcagtggctcatcaccctggtagggctgataggggctttcagggaggctggttagctccctgcactctggctctttactggcttactgtttagctcctcccacctcgaggctcttcttcctgccaccctttgggctcagaggagggtggcttttttcgaggtgagccatgttgtagacacatgatacgctctgcgtctgctctactgagtactttctgcaggggcctgttaaggacgaggcctccccagccctgcccggtgcaggaggtggctcagttattgaaccttttgggaagcagcacctgggaatgctgcctcgtgggagtcccatgcgtgagtgtggtggtgtgaccttcaggctgcacagaggcaaggacccagatgtggcagcatgggcgtcatgctcctttgcacagcccagggcctgttttggagggaccaggtcactgcccctggtctctctaggaggagtggactgaatggatcgttgcagagaagactcacccagacctggccagggaatgatgtatctggggagagaatgagctggaggagggggcctctcatggcccttccctggcctgtggcccagcctggctggcctgcaggtgtctagggtctcagcttttcatttgcagaggacatgttcaacttcctctctgttcaagccagcctttgccaattttttcagaatccaaacaatttggaggtttggtatcttgtttcatagctgccaaatatgaatctgaaaacagggtgggtagctaaggtcattcctcctgggttttagtggcattgccttccttcactaaagctcccttttttttctgttggcaaggacaggttacagaataggaagagtagcactttccgcctaagcactttaggaaatcacctttctaagccctggggcgcccaagtcccatgggacagggaaacgtggtcctcagtgangctgctgcctggctggcccggagtcctccctaggagaggggctcgatgggctgggggaaggagcctgaaggttgcccctggttgcatcccagaagcatctgactgtcaccactgccagtggctgtggaacagtcctgggccctgggccttggctgctgtcaacagatgggctgggctgggctgtggtggggtgggggacaacgttggtaactctgagaattcagctttggagtcccgggtgaggggttttagataaacccatcaatatcacccacattctgtgactctttgcatcactcgtgttatttatttatttatttatattctgccttgttccagaaaagtgtttaaggcaacaangcttgttttttggtgttttcttttgacatttgaaaatttagtacattgttaaaatgtacttgttaaacaggtaattttaaagagaaggaacaattgtttttagtaagttttctttttcctttttcaatgaattgattcttcaaattaaaagttcttgagagaaggagaggaagatacagcagacataggactgagccaaggaagagtctgcctgagagagacgcttggcctgtgctttgctgccatccgtgcggccttggccacatccctattaacagaggcagctccacttcagacagggacaaggcttcctgctgtgcctttctggcagggtttgtggggtcacatgggaagcaatgtgttacgcaagcagtctccatgtgtgtgtaaactgctgtcctggtgacttgtccctcttcttagtggaaatgcatttgagatggtgacagggctggatgaacgtgtgaccctgggagatccgggctggactgtggaccccgatgggccagagtccttgtggcccacagcatagcactggggacagagcgctctatgcaggtgaggcgtatgagaacagcatggtaaataattgatgaagtcacatttgttcaacttaaaggattgttctttattctgaagttattttcttccttatttggatgataaaatttccttttatgtaatgaaggtaaaagtagagggcaatatttttgctttttgaaatgctcttggttgcaaaacaaaatgttggttgctgtttgtcagccccagaatttcttcttaagttcgcctgtctctgaaatcccaaagtcacggaaccgcagtctagctgtggtgcatgtttacgtattggtgagaaattcctcttgggttcttgaacagcctgtacgctggcaggcagcactgcagcatttctgctgctcatggccaagaacgagtctggagatcgctgcgtgcggttttaggaagtgccaacacccgtggtgatgggcctctggccacccctggatccatgggacacactcacaggaagctgatgtggccttctcggtgaggactgcaccttaacctgggcactgggagcctgtggcccccctgtatgttggtgatgacactagtgtgggtcttctggctctggggctacagcttctgcctcctcacctggccgtcggtactcggcaagcaggcctggcctcccggggcctggatccctaccggctgggattggcctcctggaagtacctgtttgggccatgtgacctcctttctcacttatgcctcactcccctcctcccgctccaaacccgaacctctcagtgtggaatgaacgctccaaacccgaacctctcagtgtggaatgaaacagtttagatgtgtacatgatgcacgtgggtgggattcacatcccaggagaattccacggagaggaatgtgcagattttgaagtgtacagtgatgtgtggaataaatactagaaattctcagcagacagtgggatggagaagtgagtgggggcaggagggggatttctgttgccttgacatgtcgttgctcagtgcctggattgcaggcgagtctctcttttttatgttgctttgatttcaagatctcttagatatactaggtagtgtatgaatgtgcataaatccagtttgagaatggtgtttatgaagaagctgtttcgtgtgtacagttgctgctgtaatttagccagcagtgccctgccctgccctgcagtgtctgctcagctcccactgcttctctttgctgttgggcatgtgaggcatgacttggaggggggcctggtgcctggggacctgctgaagagaatgctcaccaccagctctctgtttccctttctgctttggtaatcaacacgtgtttgcctgcagtggccgggaccgtgactgtttctgcccttgtgcctagttaagagccttcaaaagcataatgaacacttttgatatgatattgtaactttagtaaatgctttacttccctctaattgcccccaaatgccttaattttgtggactgtttatttcaacaggtggaagtgttggtcgtgcgaaatcttggtattcgcatttcaagaagggagttcttttttctttcttctttctatggaacgtttcaagtgattggatagaaagaagggctctgaagcagttttcacctgctctgagggaacttggggctccagggacgtaccccaaatgttgcccaggttgaaactccctgacagcctgttctacgtagtggctcgtggtttccagtttgaagagagttgtgcccctaaaagtgtttgaaacctgtggctttcaagcaaggtaccgttgtccccacagtgttccgtggggtagggggtgatggagactgtgggcaagcctgttgtttttggccccctgttgttacatgggacctgttttgacggtgggagggtgagatgtgaagatgtgggatgaacctggaatgaacgaattaaataaagacatgcatccatctgtcagcga

SEQ ID NO: 365767 - DNA, 7236 bp, Homo sapiens
  misc_feature (3360)..(3360): n is a, c, g, or t
  misc_feature (4364)..(4364): n is a, c, g, or t
  misc_feature (4724)..(4724): n is a, c, g, or t
ggttgttcacgaatgcattcatttattcaatgaacttcgcgtcagccactggctgtcatcagttaccgacctgattgagggcttcatggaagggatttggaggagcattcatctaaaaccacagcacgctgcgacgctcagccctgcagtgggccctcaccagtccccgcgcctccgaatccaccctcccggggctgctcgtggctagcggggggcacctgcggggaccaagccagcccggccgaggcccgggtcccgcccgccacggccctcggggccccgcccacatctggcagaagccacgccccgtccgtgtgggtggggacggcccgccggaccgaaattcccagactgctgcctcaggcaacgggctttccgactccttggcttcttatgtgaggaaaccacagcgcggccggcatccagagagtcggttagtcgcgaagttcccgccggacgaagggaccagccagcgccctgctagacagcgaggccggaagcggaggcgtggcccctgcgcggccccggaaaccagtgaggccggcgcgcgcccgccggaagccgcgaccccgacgcgccccccattgccctcggcgccggaagtggtcgcgggtcgttctgcttcctgcccgaggggcgtgcgcgggtcaggggcggccgcggaggcggaagcatccatggcggagggcggcagcccagacgggcgggcagggccgggctccgcaggtcgtaatctgaaggagtggctgagggagcaattttgtgatcatccgctggagcactgtgaggacacgaggctccatgatgcagcttacgtcggggacctccagaccctcaggagcctattgcaagaggagagctaccggagccgcatcaacgagaagtctgtctggtgctgtggctggctcccctgcacaccgttgcgaatcgcggccactgcaggccatgggagctgtgtggacttcctcatccggaagggggccgaggtggatctggtggacgtaaaaggacagacggccctgtacggggctgatgttgacgtcaaccaccacctgactcctgatgtccagcctcgattctcccggcggctcacctccttggtggtctgccccttgtacatcagcgcagcctaccacaacctccagtgcttccggctgctcctcctggctggcgcgaaccctgacttcaactgcaatggtcctgtcaacacacagggattctacaggggctcccctgggtgcgtcatggatgctgttctgcgccacggctgtgaggcagccttcgtgagcctgctggtagaatttggagccaacctgaatctagtgaagtgggaatcgctgggcccagagtcgagaggaagaagaaaagtggaccctgaggccttgcaggtctttaaagaggccagaagtgttcccagaaccttgctgtgtctgtgccgtgtggctgtgagaagagctcttggcaaacaccggcttcatctgattccttcgctgcctctgccagaccccataaagaagtttctactccatgagtagactccaagtgctgcggttgattccagtgagggagaaagtgatctgcagggaggtggacaccgagccctgagtgctgtgctgctgctggtctcctgatggctgttgctgcagaagatgtcctcgtagactgtcattgctcctcaggtgcctgggccgctgaacagtccttgggtcattgtcagctgagaggcttatactaaagttattattgtttttcccaagttctctgttctggattttcagttgcatattaatgtaacgggccatggggtatgtacatgtaggggctgaggttggaggcctactaatttccctgtagggaagactcccagcacttctggaactgtgcttctctttatttttctacttctcaatttgatggttcgattaaagccttctagtatctcaatgaaaagggagtttcgtaagcaaaatagaggacagaaatgcagttcatgaacttgctggttggtttttcctgctcctggggtaacacatgcgcttgtcatacacgccccttccttgccccttcagtattctctctttgcgatggaggtctcatagtgagtgtcttcactcaagggtggtttcctggctgcacggcacctgttccaacacctactgtgcctctcatcaggtgtcacgatttttctgccacttcaccttagggagcttccagtgattgattttaggaggcccacaccaaactccccaggaaatgactgccttccttgggaccaaggaccgttccaacagcattcactgccagttctaataggcgaggaaaatgcccgaggcgctgtcttctgtcccccacacgtaccagaaagtgaaaaatgcagcgagtcctctgggtggttatgagcctccaggcgcatgctgtccagtggacagaacatctggcggttggttgattgctctcttttgtcttggtcgctgcttctagaatctatgcaggggatagcagtgaggtcagaagtctttcccgggagagagatggcctgggttatcattgctgatagctttggctgcatgagttgggcttccccttacccagggctgcacagccaggtgtgagggtcaccggcaggtgggctggtggctgcagcctcagagccctcccaggttgctgctgtttccagtgaatcacatttcgtcatttgaagcccatgaggaccattgtgtggatccatggtgattctagacttcagatatatttaggaaggcgcagatttcaaatctgtgtttgattttctgtaataagagaaatccaatttgtaaaacttgaacaatgataccgttttatttacttagtagcatcactgtgtgtcttagcaggcaggcagtgtctggccattattgcgttctacagccagaggatagaattctatacccccaaccccttgtgtcacaaatgggctctgtgtgggtcaccccagctgacccgtgtatgtgcagatgcagttccgaagggaagaacagtcctcgggtgattcagaggggaaaatgcaatccgggaggtgtttcctcagctgaggtgacactgttagaagctgtgatggttgtgtaaatgtgggctgtgtgctgttcccgaggggagcttgggattgggtcctgctgaagccaggagggtcttcccaagataggagaggaaccgcaggtggtgagcggctggggagggccaggacagccggggctgggtgctgcaggggcttcagcccgggagagggggtgggcgtgttctttgtggtaccaaagtgggactaggacaaaaattgggctgtggctggggcaggagctatagggagttaaggaatgatgatanggaagttggagccaccaccgtggactgggccttgtcactggaggtcgtaggcagtggctcatcaccctggtagggctgataggggctttcagggaggctggttagctccctgcactctggctctttactggcttactgtttagctcctcccacctcgaggctcttcttcctgccaccctttgggctcagaggagggtggcttttttcgaggtgagccatgttgtagacacatgatacgctctgcgtctgctctactgagtactttctgcaggggcctgttaaggacgaggcctccccagccctgcccggtgcaggaggtggctcagttattgaaccttttgggaagcagcacctgggaatgctgcctcgtgggagtcccatgcgtgagtgtggtggtgtgaccttcaggctgcacagaggcaaggacccagatgtggcagcatgggcgtcatgctcctttgcacagcccagggcctgttttggagggaccaggtcactgcccctggtctctctaggaggagtggactgaatggatcgttgcagagaagactcacccagacctggccagggaatgatgtatctggggagagaatgagctggaggagggggcctctcatggcccttccctggcctgtggcccagcctggctggcctgcaggtgtctagggtctcagcttttcatttgcagaggacatgttcaacttcctctctgttcaagccagcctttgccaattttttcagaatccaaacaatttggaggtttggtatcttgtttcatagctgccaaatatgaatctgaaaacagggtgggtagctaaggtcattcctcctgggttttagtggcattgccttccttcactaaagctcccttttttttctgttggcaaggacaggttacagaataggaagagtagcactttccgcctaagcactttaggaaatcacctttctaagccctggggcgcccaagtcccatgggacagggaaacgtggtcctcagtgangctgctgcctggctggcccggagtcctccctaggagaggggctcgatgggctgggggaaggagcctgaaggttgcccctggttgcatcccagaagcatctgactgtcaccactgccagtggctgtggaacagtcctgggccctgggccttggctgctgtcaacagatgggctgggctgggctgtggtggggtgggggacaacgttggtaactctgagaattcagctttggagtcccgggtgaggggttttagataaacccatcaatatcacccacattctgtgactctttgcatcactcgtgttatttatttatttatttatattctgccttgttccagaaaagtgtttaaggcaacaangcttgttttttggtgttttcttttgacatttgaaaatttagtacattgttaaaatgtacttgttaaacaggtaattttaaagagaaggaacaattgtttttagtaagttttctttttcctttttcaatgaattgattcttcaaattaaaagttcttgagagaaggagaggaagatacagcagacataggactgagccaaggaagagtctgcctgagagagacgcttggcctgtgctttgctgccatccgtgcggccttggccacatccctattaacagaggcagctccacttcagacagggacaaggcttcctgctgtgcctttctggcagggtttgtggggtcacatgggaagcaatgtgttacgcaagcagtctccatgtgtgtgtaaactgctgtcctggtgacttgtccctcttcttagtggaaatgcatttgagatggtgacagggctggatgaacgtgtgaccctgggagatccgggctggactgtggaccccgatgggccagagtccttgtggcccacagcatagcactggggacagagcgctctatgcaggtgaggcgtatgagaacagcatggtaaataattgatgaagtcacatttgttcaacttaaaggattgttctttattctgaagttattttcttccttatttggatgataaaatttccttttatgtaatgaaggtaaaagtagagggcaatatttttgctttttgaaatgctcttggttgcaaaacaaaatgttggttgctgtttgtcagccccagaatttcttcttaagttcgcctgtctctgaaatcccaaagtcacggaaccgcagtctagctgtggtgcatgtttacgtattggtgagaaattcctcttgggttcttgaacagcctgtacgctggcaggcagcactgcagcatttctgctgctcatggccaagaacgagtctggagatcgctgcgtgcggttttaggaagtgccaacacccgtggtgatgggcctctggccacccctggatccatgggacacactcacaggaagctgatgtggccttctcggtgaggactgcaccttaacctgggcactgggagcctgtggcccccctgtatgttggtgatgacactagtgtgggtcttctggctctggggctacagcttctgcctcctcacctggccgtcggtactcggcaagcaggcctggcctcccggggcctggatccctaccggctgggattggcctcctggaagtacctgtttgggccatgtgacctcctttctcacttatgcctcactcccctcctcccgctccaaacccgaacctctcagtgtggaatgaacgctccaaacccgaacctctcagtgtggaatgaaacagtttagatgtgtacatgatgcacgtgggtgggattcacatcccaggagaattccacggagaggaatgtgcagattttgaagtgtacagtgatgtgtggaataaatactagaaattctcagcagacagtgggatggagaagtgagtgggggcaggagggggatttctgttgccttgacatgtcgttgctcagtgcctggattgcaggcgagtctctcttttttatgttgctttgatttcaagatctcttagatatactaggtagtgtatgaatgtgcataaatccagtttgagaatggtgtttatgaagaagctgtttcgtgtgtacagttgctgctgtaatttagccagcagtgccctgccctgccctgcagtgtctgctcagctcccactgcttctctttgctgttgggcatgtgaggcatgacttggaggggggcctggtgcctggggacctgctgaagagaatgctcaccaccagctctctgtttccctttctgctttggtaatcaacacgtgtttgcctgcagtggccgggaccgtgactgtttctgcccttgtgcctagttaagagccttcaaaagcataatgaacacttttgatatgatattgtaactttagtaaatgctttacttccctctaattgcccccaaatgccttaattttgtggactgtttatttcaacaggtggaagtgttggtcgtgcgaaatcttggtattcgcatttcaagaagggagttcttttttctttcttctttctatggaacgtttcaagtgattggatagaaagaagggctctgaagcagttttcacctgctctgagggaacttggggctccagggacgtaccccaaatgttgcccaggttgaaactccctgacagcctgttctacgtagtggctcgtggtttccagtttgaagagagttgtgcccctaaaagtgtttgaaacctgtggctttcaagcaaggtaccgttgtccccacagtgttccgtggggtagggggtgatggagactgtgggcaagcctgttgtttttggccccctgttgttacatgggacctgttttgacggtgggagggtgagatgtgaagatgtgggatgaacctggaatgaacgaattaaataaagacatgcatccatctgtcagcga

SEQ ID NO: 365768 - DNA, 2464 bp, Homo sapiens
  misc_feature (5)..(5): n is a, c, g, or t
  misc_feature (11)..(11): n is a, c, g, or t
  misc_feature (21)..(21): n is a, c, g, or t
  misc_feature (24)..(24): n is a, c, g, or t
taggntaggtngaggctgggngtnaatcggccgaggaaggaacaattgtttttagtaagttttctttttcctttttcaatgaattgattcttcaaattaaaagttcttgagagaaggagaggaagatacagcagacataggactgagccaaggaagagtctgcctgagagagacgcttggcctgtgctttgctgccatccgtgcggccttggccacatccctattaacagaggcagctccacttcagacagggacaaggcttcctgctgtgcctttctggcagggtttgtggggtcacatgggaagcaatgtgttacgcaagcagtctccatgtgtgtgtaaactgctgtcctggtgacttgtccctcttcttagtggaaatgcatttgagatggtgacagggctggatgaacgtgtgaccctgggagatccgggctggactgtggaccccgatgggccagagtccttgtggcccacagcatagcactggggacagagcgctctatgcaggtgaggcgtatgagaacagcatggtaaataattgatgaagtcacatttgttcaacttaaaggattgttctttattctgaagttattttcttccttatttggatgataaaatttccttttatgtaatgaaggtaaaagtagagggcaatatttttgctttttgaaatgctcttggttgcaaaacaaaatgttggttgctgtttgtcagccccagaatttcttcttaagttcgcctgtctctgaaatcccaaagtcacggaaccgcagtctagctgtggtgcatgtttacgtattggtgagaaattcctcttgggttcttgaacagcctgtacgctggcaggcagcactgcagcatttctgctgctcatggccaagaacgagtctggagatcgctgcgtgcggttttaggaagtgccaacacccgtggtgatgggcctctggccacccctggatccatgggacacactcacaggaagctgatgtggccttctcggtgaggactgcaccttaacctgggcactgggagcctgtggcccccctgtatgttggtgatgacactagtgtgggtcttctggctctggggctacagcttctgcctcctcacctggccgtcggtactcggcaagcaggcctggcctcccggggcctggatccctaccggctgggattggcctcctggaagtacctgtttgggccatgtgacctcctttctcacttatgcctcactcccctcctcccgctccaaacccgaacctctcagtgtggaatgaacgctccaaacccgaacctctcagtgtggaatgaaacagtttagatgtgtacatgatgcacgtgggtgggattcacatcccaggagaattccacggagaggaatgtgcagattttgaagtgtacagtgatgtgtggaataaatactagaaattctcagcagacagtgggatggagaagtgagtgggggcaggagggggatttctgttgccttgacatgtcgttgctcagtgcctggattgcaggcgagtctctcttttttatgttgctttgatttcaagatctcttagatatactaggtagtgtatgaatgtgcataaatccagtttgagaatggtgtttatgaagaagctgtttcgtgtgtacagttgctgctgtaatttagccagcagtgccctgccctgccctgcagtgtctgctcagctcccactgcttctctttgctgttgggcatgtgaggcatgacttggaggggggcctggtgcctggggacctgctgaagagaatgctcaccaccagctctctgtttccctttctgctttggtaatcaacacgtgtttgcctgcagtggccgggaccgtgactgtttctgcccttgtgcctagttaagagccttcaaaagcataatgaacacttttgatatgatattgtaactttagtaaatgctttacttccctctaattgcccccaaatgccttaattttgtggactgtttatttcaacaggtggaagtgttggtcgtgcgaaatcttggtattcgcatttcaagaagggagttcttttttctttcttctttctatggaacgtttcaagtgattggatagaaagaagggctctgaagcagttttcacctgctctgagggaacttggggctccagggacgtaccccaaatgttgcccaggttgaaactccctgacagcctgttctacgtagtggctcgtggtttccagtttgaagagagttgtgcccctaaaagtgtttgaaacctgtggctttcaagcaaggtaccgttgtccccacagtgttccgtggggtagggggtgatggagactgtgggcaagcctgttgtttttggccccctgttgttacatgggacctgttttgacggtgggagggtgagatgtgaagatgtgggatgaacctggaatgaacgaattaaataaagacatgcatccatctgtcagcga

SEQ ID NO: 365769 - DNA, 1475 bp, Homo sapiens
ctccggtaccgccgaatgacaaactagtgtcatcaccaacatacaggggggcacaggctcccagtgcccaggttaaggtgcagtcctcacctggccgtcggtactcggcaagcaggcctggcctcccggggcctggatccctaccggctgggattggcctcctggaagtacctgtttgggccatgtgacctcctttctcacttatgcctcactcccctcctcccgctccaaacccgaacctctcagtgtggaatgaacgctccaaacccgaacctctcagtgtggaatgaacgctccaaacccgaacctctcagtgtggaatgaaacagtttagatgtgtacatgatgcacgtgggtgggattcacatcccaggagaattccacggagaggaatgtgcagattttgaagtgtacagtgatgtgtggaataaatactagaaattctcagcagacagtgggatggagaagtgagtgggggcaggagggggatttctgttgccttgacatgtcgttgctcagtgcctggattgcaggcgagtctctcttttttatgttgctttgatttcaagatctcttagatatactaggtagtgtatgaatgtgcataaatccagtttgagaatggtgtttatgaagaagctgtttcgtgtgtacagttgctgctgtaatttagccagcagtgccctgccctgccctgcagtgtctgctcagctcccactgcttctctttgctgttgggcatgtgaggcatgacttggaggggggcctggtgcctggggacctgctgaagagaatgctcaccaccagctctctgtttccctttctgctttggtaatcaacacgtgtttgcctgcagtggccgggaccgtgactgtttctgcccttgtgcctagttaagagccttcaaaagcataatgaacacttttgatatgatattgtaactttagtaaatgctttacttccctctaattgcccccaaatgccttaattttgtggactgtttatttcaacaggtggaagtgttggtcgtgcgaaatcttggtattcgcatttcaagaagggagttcttttttctttcttctttctatggaacgtttcaagtgattggatagaaagaagggctctgaagcagttttcacctgctctgagggaacttggggctccagggacgtaccccaaatgttgcccaggttgaaactccctgacagcctgttctacgtagtggctcgtggtttccagtttgaagagagttgtgcccctaaaagtgtttgaaacctgtggctttcaagcaaggtaccgttgtccccacagtgttccgtggggtagggggtgatggagactgtgggcaagcctgttgtttttggccccctgttgttacatgggacctgttttgacggtgggagggtgagatgtgaagatgtgggatgaacctggaatgaacgaattaaataaagacatgcatccatctgtcagcga

SEQ ID NO: 365770 - DNA, 559 bp, Homo sapiens
tgaaccttcctctatccctctctttcttcccacggccttcaggtgttcccagaaccttgctgtgtctgtgccgtgtggctgtgagaagagctcttggcaaacaccggcttcatctgattccttcgctgcctctgccagaccccataaagaagtttctactccatgagtagactccaagtgctgcggttgattccagtgagggagaaagtgatctgcagggaggtggacaccgagccctgagtgctgtgctgctgctggtctcctgatggctgttgctgcagaagatgtcctcgtagactgtcattgctcctcaggtgcctgggccgctgaacagtccttgggtcattgtcagctgagaggcttatactaaagttattattgtttttcccaagttctctgttctggattttcagttgcatattaatgtaacgggccatggggtatgtacatgtaggggctgaggttggaggcctactaatttccctgtagggaagactcccagcacttctggaactgtgcttctctttatttttctacttctcaatttgatggttcgatt

SEQ ID NO: 365771 - DNA, 6180 bp, Homo sapiens
  misc_feature (3510)..(3510): n is a, c, g, or t
  misc_feature (4514)..(4514): n is a, c, g, or t
  misc_feature (4874)..(4874): n is a, c, g, or t
ggttgttcacgaatgcattcatttattcaatgaacttcgcgtcagccactggctgtcatcagttaccgacctgattgagggcttcatggaagggatttggaggagcattcatctaaaaccacagcacgctgcgacgctcagccctgcagtgggccctcaccagtccccgcgcctccgaatccaccctcccggggctgctcgtggctagcggggggcacctgcggggaccaagccagcccggccgaggcccgggtcccgcccgccacggccctcggggccccgcccacatctggcagaagccacgccccgtccgtgtgggtggggacggcccgccggaccgaaattcccagactgctgcctcaggcaacgggctttccgactccttggcttcttatgtgaggaaaccacagcgcggccggcatccagagagtcggttagtcgcgaagttcccgccggacgaagggaccagccagcgccctgctagacagcgaggccggaagcggaggcgtggcccctgcgcggccccggaaaccagtgaggccggcgcgcgcccgccggaagccgcgaccccgacgcgccccccattgccctcggcgccggaagtggtcgcgggtcgttctgcttcctgcccgaggggcgtgcgcgggtcaggggcggccgcggaggcggaagcatccatggcggagggcggcagcccagacgggcgggcagggccgggctccgcaggtcgtaatctgaaggagtggctgagggagcaattttgtgatcatccgctggagcactgtgaggacacgaggctccatgatgcagcttacgtcggggacctccagaccctcaggagcctattgcaagaggagagctaccggagccgcatcaacgagaagtctgtctggtgctgtggctggctcccctgcacaccgttgcgaatcgcggccactgcaggccatgggagctgtgtggacttcctcatccggaagggggccgaggtggatctggtggacgtaaaaggacagacggccctgtatgtggctgtggtgaacgggcacctagagagtacccagatccttctcgaagctggcgcggaccccaacggaagccggcaccatcgcagcacccctgtctaccacgcctctcgcgtgggccgggcagacatcctgaaggccctcatcaggtacggggctgatgttgacgtcaaccaccacctgactcctgatgtccagcctcgattctcccggcggctcacctccttggtggtctgccccttgtacatcagcgcagcctaccacaacctccagtgcttccggctgctcctcctggctggcgcgaaccctgacttcaactgcaatggtcctgtcaacacacagggattctacaggggctcccctgggtgcgtcatggatgctgttctgcgccacggctgtgaggcagccttcgtgagcctgctggtagaatttggagccaacctgaatctagtgaagtgggaatcgctgggcccagagtcgagaggaagaagaaaagtggaccctgaggccttgcaggtctttaaagaggccagaagtgttcccagaaccttgctgtgtctgtgccgtgtggctgtgagaagagctcttggcaaacaccggcttcatctgattccttcgctgcctctgccagaccccataaagaagtttctactccatgagtagactccaagtgctgcggttgattccagtgagggagaaagtgatctgcagggaggtggacaccgagccctgagtgctgtgctgctgctggtctcctgatggctgttgctgcagaagatgtcctcgtagactgtcattgctcctcaggtgcctgggccgctgaacagtccttgggtcattgtcagctgagaggcttatactaaagttattattgtttttcccaagttctctgttctggattttcagttgcatattaatgtaacgggccatggggtatgtacatgtaggggctgaggttggaggcctactaatttccctgtagggaagactcccagcacttctggaactgtgcttctctttatttttctacttctcaatttgatggttcgattaaagccttctagtatctcaatgaaaagggagtttcgtaagcaaaatagaggacagaaatgcagttcatgaacttgctggttggtttttcctgctcctggggtaacacatgcgcttgtcatacacgccccttccttgccccttcagtattctctctttgcgatggaggtctcatagtgagtgtcttcactcaagggtggtttcctggctgcacggcacctgttccaacacctactgtgcctctcatcaggtgtcacgatttttctgccacttcaccttagggagcttccagtgattgattttaggaggcccacaccaaactccccaggaaatgactgccttccttgggaccaaggaccgttccaacagcattcactgccagttctaataggcgaggaaaatgcccgaggcgctgtcttctgtcccccacacgtaccagaaagtgaaaaatgcagcgagtcctctgggtggttatgagcctccaggcgcatgctgtccagtggacagaacatctggcggttggttgattgctctcttttgtcttggtcgctgcttctagaatctatgcaggggatagcagtgaggtcagaagtctttcccgggagagagatggcctgggttatcattgctgatagctttggctgcatgagttgggcttccccttacccagggctgcacagccaggtgtgagggtcaccggcaggtgggctggtggctgcagcctcagagccctcccaggttgctgctgtttccagtgaatcacatttcgtcatttgaagcccatgaggaccattgtgtggatccatggtgattctagacttcagatatatttaggaaggcgcagatttcaaatctgtgtttgattttctgtaataagagaaatccaatttgtaaaacttgaacaatgataccgttttatttacttagtagcatcactgtgtgtcttagcaggcaggcagtgtctggccattattgcgttctacagccagaggatagaattctatacccccaaccccttgtgtcacaaatgggctctgtgtgggtcaccccagctgacccgtgtatgtgcagatgcagttccgaagggaagaacagtcctcgggtgattcagaggggaaaatgcaatccgggaggtgtttcctcagctgaggtgacactgttagaagctgtgatggttgtgtaaatgtgggctgtgtgctgttcccgaggggagcttgggattgggtcctgctgaagccaggagggtcttcccaagataggagaggaaccgcaggtggtgagcggctggggagggccaggacagccggggctgggtgctgcaggggcttcagcccgggagagggggtgggcgtgttctttgtggtaccaaagtgggactaggacaaaaattgggctgtggctggggcaggagctatagggagttaaggaatgatgatanggaagttggagccaccaccgtggactgggccttgtcactggaggtcgtaggcagtggctcatcaccctggtagggctgataggggctttcagggaggctggttagctccctgcactctggctctttactggcttactgtttagctcctcccacctcgaggctcttcttcctgccaccctttgggctcagaggagggtggcttttttcgaggtgagccatgttgtagacacatgatacgctctgcgtctgctctactgagtactttctgcaggggcctgttaaggacgaggcctccccagccctgcccggtgcaggaggtggctcagttattgaaccttttgggaagcagcacctgggaatgctgcctcgtgggagtcccatgcgtgagtgtggtggtgtgaccttcaggctgcacagaggcaaggacccagatgtggcagcatgggcgtcatgctcctttgcacagcccagggcctgttttggagggaccaggtcactgcccctggtctctctaggaggagtggactgaatggatcgttgcagagaagactcacccagacctggccagggaatgatgtatctggggagagaatgagctggaggagggggcctctcatggcccttccctggcctgtggcccagcctggctggcctgcaggtgtctagggtctcagcttttcatttgcagaggacatgttcaacttcctctctgttcaagccagcctttgccaattttttcagaatccaaacaatttggaggtttggtatcttgtttcatagctgccaaatatgaatctgaaaacagggtgggtagctaaggtcattcctcctgggttttagtggcattgccttccttcactaaagctcccttttttttctgttggcaaggacaggttacagaataggaagagtagcactttccgcctaagcactttaggaaatcacctttctaagccctggggcgcccaagtcccatgggacagggaaacgtggtcctcagtgangctgctgcctggctggcccggagtcctccctaggagaggggctcgatgggctgggggaaggagcctgaaggttgcccctggttgcatcccagaagcatctgactgtcaccactgccagtggctgtggaacagtcctgggccctgggccttggctgctgtcaacagatgggctgggctgggctgtggtggggtgggggacaacgttggtaactctgagaattcagctttggagtcccgggtgaggggttttagataaacccatcaatatcacccacattctgtgactctttgcatcactcgtgttatttatttatttatttatattctgccttgttccagaaaagtgtttaaggcaacaangcttgttttttggtgttttcttttgacatttgaaaatttagtacattgttaaaatgtacttgttaaacaggtaattttaaagagaaggaacaattgtttttagtaagttttctttttcctttttcaatgaattgattcttcaaattaaaagttcttgagagaaggagaggaagatacagcagacataggactgagccaaggaagagtctgcctgagagagacgcttggcctgtgctttgctgccatccgtgcggccttggccacatccctattaacagaggcagctccacttcagacagggacaaggcttcctgctgtgcctttctggcagggtttgtggggtcacatgggaagcaatgtgttacgcaagcagtctccatgtgtgtgtaaactgctgtcctggtgacttgtccctcttcttagtggaaatgcatttgagatggtgacagggctggatgaacgtgtgaccctgggagatccgggctggactgtggaccccgatgggccagagtccttgtggcccacagcatagcactggggacagagcgctctatgcaggtgaggcgtatgagaacagcatggtaaataattgatgaagtcacatttgttcaacttaaaggattgttctttattctgaagttattttcttccttatttggatgataaaatttccttttatgtaatgaaggtaaaagtagagggcaatatttttgctttttgaaatgctcttggttgcaaaacaaaatgttggttgctgtttgtcagccccagaatttcttcttaagttcgcctgtctctgaaatcccaaagtcacggaaccgcagtctagctgtggtgcatgtttacgtattggtgagaaattcctcttgggttcttgaacagcctgtacgctggcaggcagcactgcagcatttctgctgctcatggccaagaacgagtctggagatcgctgcgtgcggttttaggaagtgccaacacccgtggtgatgggcctctggccacccctggatccatgggacacactcacaggaagctgatgtggccttctcggtgaggactgcaccttaacctgggcactgggagcctgtggcccccctgtatgttggtgatgacactagtgtgggtcttctggctctggggctacagcttctgcctcctcacctggccgtcggtactcggcaagcaggcctggcctcccggggcctggatccctaccggctgggattggcctcctggaagtccgagaaacaactatgcgtgattaccactcactacagacactctacgattttggccactgtgccga

SEQ ID NO: 365772 - DNA, 1817 bp, Homo sapiens
ggatcacagcaaaacatcaattatggatgacaaaagtcttaagacagccataaagacacagttgacaaatgtggctatttctgtggcttacaacaatttaacataatcattacaacatatattaagacatatcagaattttagaactctcatacaatcctggaacacatattaacaacaaatctctatcagtataacccaaaggaagctaaacaccacctcacacttgacaatgtttcctgtataattcaaacattacaaataagcctaatataagcctaatatgtcactcttgaacttcaggaagcctaatatccaaaaagttagtttaaggtcaaaagtttttgaattaacttttttccattagtatggtcatatctttcttactaatttgtaagttatgtaatttatcaatttttttttgttgttctgtttcccaacctctatgtcagataaagaatcacccaggccagacacaatggctcatgcttgtgatcccaacactttgggaagccaaggtgggagaattgcttgaagccaggaatctgagcccagcctgggcgacaaagcaatacccctatctctacaaaaaataaaaaatagccaggtgtagcgacacacacctgtagtcccagctgctcaggaggctgagcaggaggatggcttgggcccaggagttcaacgctgcagtgagctatgattgcaccactgcactccagcctgggcaacagagtaagaactgtctcaaaaaaaataaaaaatagaaataaattttaaaaaaagaattacccatattctctttgttttgtttattcacattaacctttattctatctggaatttatttgagtatacttttttctcaaataatcaattgtcctagaaccatgtgtttctcatttatttgaaaggccatctagtgagagatttctccaaatgttggggtagggaagggaggggaagcactttaaagtctgagcctttagaggtgattcctcaagaccctgcttaatcctaacaattttcctcattagtaaaagtcagcccaaactgggggcttgttaagatccttaccagccacatccatctgaaattatgaatttcaaagtatcttacaaatttggtgccacattatcttttttaagtttgttttgttttgtttttttgggacagagtctcgctctgtcacccaggctggagtgcagtggcgcgatctcagctcactgcaagctccgcctcctgggttcacaccattctcttgcctcagcctcccaagtatctgggactacagtcgcccgccaccacgcccggctaatttttttgtatttttaatagagacggggtttcactttgttagccaggatggtctcaatctcctgacctcatgatccacctgcctcggcctcccaaagtgctgggattacaggcaggagccaccgcgcctgggcctttttttaagttttaagtacctataaagaacactgaaaggtgatgtgtgtggatgagctaggaagacctgaaataggctctctctaaattaatcaaattaatcctgaagccattctgcaatactgtctttaatgtatactcacttgttatagaagccagggttttttcccctaatttgtatcattgctatatgtgttattgtaccaaactacactgttttaattgctgtaaattttaatatgtcttagtatctgggtgtgggaatcttgaaagcatggagtttgtgttattcaccactgtattctcaaatatcagaagagtatctggcctactaagtgcacaataaacatagttaaaatgaaaaaaaaa

SEQ ID NO: 365773 - DNA, 483 bp, Homo sapiens
aaaagaagaagaaaagtacttctacagccatgtcctattccttgatcatccaaagcacctgcctcggcctcccaaagtgctgggattacaggcaggagccaccgcgcctgggcctttttttaagttttaagtacctataaagaacactgaaaggtgatgtgtgtggatgagctaggaagacctgaaataggctctctctaaattaatcaaattaatcctgaagccattctgcaatactgtctttaatgtatactcacttgttatagaagccagggttttttcccctaatttgtatcattgctatatgtgttattgtaccaaactacactgttttaattgctgtaaattttaatatgtcttagtatctgggtgtgggaatcttgaaagcatggagtttgtgttattcaccactgtattctcaaatatcagaagagtatctggcctactaagtgcacaataaacatagttaaaatgaaaaaaaaa

SEQ ID NO: 365774 - DNA, 496 bp, Homo sapiens
ccacttccaccaaagacaaatcacagcagaaccgacctaacttcaaaataaactgcagtcccatatactgggcctgattacccacacaaatgctgggattacaggcaggagccaccgcgcctgggcctttttttaagttttaagtacctataaagaacactgaaaggtgatgtgtgtggatgagctaggaagacctgaaataggctctctctaaattaatcaaattaatcctgaagccattctgcaatactgtctttaatgtatactcacttgttatagaagccagggttttttcccctaatttgtatcattgctatatgtgttattgtaccaaactacactgttttaattgctgtaaattttaatatgtcttagtatctgggtgtgggaatcttgaaagcatggagtttgtgttattcaccactgtattctcaaatatcagaagagtatctggcctactaagtgcacaataaacatagttaaaatgaaaaaaaaa

SEQ ID NO: 365775 - DNA, 793 bp, Homo sapiens
ggatcacagcaaaacatcaattatggatgacaaaagtcttaagacagccataaagacacagttgacaaatgtggctatttctgtggcttacaacaatttaacataatcattacaacatatattaagacatatcagaattttagaactctcatacaatcctggaacacatattaacaacaaatctctatcagtataacccaaaggaagctaaacaccacctcacacttgacaatgtttcctgtataattcaaacattacaaataagcctaatataagcctaatatgtcactcttgaacttcaggaagcctaatatccaaaaagttagtttaaggtcaaaagtttttgaattaacttttttccattagtatggtcatatctttcttactaatttgtaagttatgtaatttatcaatttttttttgttgttctgtttcccaacctctatgtcagataaagaatcacccaggccagacacaatggctcatgcttgtgatcccaacactttgggaagccaaggtgggagaattgcttgaagccaggaatctgagcccagcctgggcgacaaagcaatacccctatctctacaaaaaataaaaaatagccaggtgtagcgacacacacctgtagtcccagctgctcaggaggctgagcaggaggatggcttgggcccaggagttcaacgctgcagtgagctatgattgcaccactgcactccagcctgggcaacagagtaagaactgtctcaaaaaaaaagtcgacgcggccgcgaatttagtagtagtaggcggccgc

SEQ ID NO: 365776 - DNA, 617 bp, Homo sapiens
ggatcacagcaaaacatcaattatggatgacaaaagtcttaagacagccataaagacacagttgacaaatgtggctatttctgtggcttacaacaatttaacataatcattacaacatatattaagacatatcagaattttagaactctcatacaatcctggaacacatattaacaacaaatctctatcagtataacccaaaggaagctaaacaccacctcacacttgacaatgtttcctgtataattcaaacattacaaataagcctaatataagcctaatatgtcactcttgaacttcaggaagcctaatatccaaaaagttagtttaaggtcaaaagtttttgaattaacttttttccattagtatggtcatatctttcttactaatttgtaagttatgtaatttatcaatttttttttgttgttctgtttcccaacctctatgtcagataaagaatcacccaggccagacacaatggctcatgcttgtgatcccaacactttgggaagccaaggtgggagaattgcttgaagccaggaatctgagcccagcctgggcgacaaagcaataccccagtcgacgcggccgcgaatttagtagtagtaggcggccgc

SEQ ID NO: 365777 - DNA, 562 bp, Homo sapiens
ggatcacagcaaaacatcaattatggatgacaaaagtcttaagacagccataaagacacagttgacaaatgtggctatttctgtggcttacaacaatttaacataatcattacaacatatattaagacatatcagaattttagaactctcatacaatcctggaacacatattaacaacaaatctctatcagtataacccaaaggaagctaaacaccacctcacacttgacaatgtttcctgtataattcaaacattacaaataagcctaatataagcctaatatgtcactcttgaacttcaggaagcctaatatccaaaaagttagtttaaggtcaaaagtttttgaattaacttttttccattagtatggtcatatctttcttactaatttgtaagttatgtaatttatcaatttttttttgttgttctgtttcccaacctctatgtcagataaagaatcacccaggccagacacaatggctcatgcttgtgatcccaacactttgggaagccaaggtgggagtcgacgcggccgcgaatttagtagtagtaggcggccgc

SEQ ID NO: 365778 - DNA, 470 bp, Homo sapiens
ggatcacagcaaaacatcaattatggatgacaaaagtcttaagacagccataaagacacagttgacaaatgtggctatttctgtggcttacaacaatttaacataatcattacaacatatattaagacatatcagaattttagaactctcatacaatcctggaacacatattaacaacaaatctctatcagtataacccaaaggaagctaaacaccacctcacacttgacaatgtttcctgtataattcaaacattacaaataagcctaatataagcctaatatgtcactcttgaacttcaggaagcctaatatccaaaaagttagtttaaggtcaaaagtttttgaattaacttttttccattagtatggtcatatctttcttactaatttgtaagttatgtaatttatcaatttttttttgttgttctgtttcccaacatggtgaaaccccgtctctaataaaaatac

SEQ ID NO: 365779 - DNA, 534 bp, Homo sapiens
ggatcacagcaaaacatcaattatggatgacaaaagtcttaagacagccataaagacacagttgacaaatgtggctatttctgtggcttacaacaatttaacataatcattacaacatatattaagacatatcagaattttagaactctcatacaatcctggaacacatattaacaacaaatctctatcagtataacccaaaggaagctaaacaccacctcacacttgacaatgtttcctgtataattcaaacattacaaataagcctaatataagcctaatatgtcactcttgaacttcaggaagcctaatatccaaaaagttagtttaaggtcaaaagtttttgaattaacttttttccattagtatggtcatatctttcttactaatttgtaagttatgtaatttatcaatttttttttgttgttctgtttcccaacctctatgtcagataaagaatcacccaggccagacacaatggccgacattagacacaccggcattagacacaccgacattagacaccccgacatt

SEQ ID NO: 365780 - DNA, 887 bp, Homo sapiens
ggatcacagcaaaacatcaattatggatgacaaaagtcttaagacagccataaagacacagttgacaaatgtggctatttctgtggcttacaacaatttaacataatcattacaacatatattaagacatatcagaattttagaactctcatacaatcctggaacacatattaacaacaaatctctatcagtataacccaaaggaagctaaacaccacctcacacttgacaatgtttcctgtataattcaaacattacaaataagcctaatataagcctaatatgtcactcttgaacttcaggaagcctaatatccaaaaagttagtttaaggtcaaaagtttttgaattaacttttttccattagtatggtcatatctttcttactaatttgtaagttatgtaatttatcaatttttttttgttgttctgtttcccaacctctatgtcagataaagaatcacccaggccagacacaatggtgctgggattacaggcaggagccaccgcgcctgggcctttttttaagttttaagtacctataaagaacactgaaaggtgatgtgtgtggatgagctaggaagacctgaaataggctctctctaaattaatcaaattaatcctgaagccattctgcaatactgtctttaatgtatactcacttgttatagaagccagggttttttcccctaatttgtatcattgctatatgtgttattgtaccaaactacactgttttaattgctgtaaattttaatatgtcttagtatctgggtgtgggaatcttgaaagcatggagtttgtgttattcaccactgtattctcaaatatcagaagagtatctggcctactaagtgcacaataaacatagttaaaatgaaaaaaaaa

SEQ ID NO: 365781 - DNA, 528 bp, Homo sapiens
ccacttccaccaaagacaaatcacagcagaaccgacctaacttcaaaataaactgcagtcccatatactgggcctgattacccacacaaagtgcaacaagaatcattgtccatatagactctcctagattggctttgctagaacatttcacaaggccatttcagtcaaagtcctgagaaagtaaccggtttcaattgtgccctattacaaaagaaaacgtggttattaactttatacagacaaatgccatgaattaagaatattcataaatagtttacaaattctggagaaattagaatactcaatacacttaaagtgtatttcaaggctataaatagctcaaaataaaaagattattcagactctgaaaaaacaaaaagaagtagcaatatttcaaacaacaaaagccatacaaattatttcagtcttccattagttcatttcagtccatgtaatcaactcctgctctacttcatattcatctttatgaacacatcagcctttcaattagtgccttggaagttttct

SEQ ID NO: 365782 - DNA, 474 bp, Homo sapiens
ccacttccaccaaagacaaatcacagcagaaccgacctaacttcaaaataaactgcagtcccatatactgggcctgattacccacacaaagtgcaacaagaatcattgtccatatagactctcctagattggctttgctagaacatttcacaaggccatttcagtcaaagtcctgagaaagtaaccggtttcaattgtgccctattacaaaagaaaacgtggttattaactttatacagacaaatgccatgaattaagaatattcataaatagtttacaaattctggagaaattagaatactcaatacacttaaagtgtatttcaaggctataaatagctcaaaataaaaagattattcagactctgaaaaaacaaaaagaagtagcaatatttcaaacaaccaactcctgctctacttcatattcatctttatgaacacatcagcctttcaattagtgccttggaagttttct

SEQ ID NO: 365783 - DNA, 233 bp, Homo sapiens
ggcctacttcaaggatatagagacaggaagttatcaggacctgagaacagagattactagaaagtagaaattaaatattgcacacttagagaaggcaataaggggccatttaggttatgaactataagaatataggactctcatcttttctttgctctattatccagataaactgcttagatattttcatattatggtaaaaagaataaggaagtcagaggttacatcttctt

SEQ ID NO: 365784 - DNA, 479 bp, Homo sapiens
gttcattattgttactacatattttgagtttgctgcctctcaaaatgtcctaaaaatatactgtatgtatcgttgaaatgaaaggtaatagtgcatgcagaaaggcatgggaacagagaagtgaggcctatatttgacattgtaatgagtatttcctatgagataaatgacctcaattatctatttcttgcacaaccataaccaagtcttgaagaagacttaaaagggaaatacccacaggtagataaatttgtgctatgttgtttcttagatgcatgaaaaaaacactgcttttcacttcccagtcaatacaaccagaggtaaaagcagttgccaaatcacccggaagtgaatgaatacactcagtattaactatcataagtccaccccttgtcaacttaaacccatatacatctcctgaaatcatacataatcttcaaataaagacaataataaggtcataattatgcctaacataa

SEQ ID NO: 365785 - DNA, 4255 bp, Homo sapiens
tgagccgcgccctgcgtcctcacgccgaggcggctgggcgatgcgcttgcgcactgagaactgacaccatatgtgtcctgttccagtgcgcgggtctgtggagagccgggtgcgagcggcggcagcacgaggggaaaagagctgagcggagaccaaagtcagccgggagacagtgggtctgtgagagaccgaatagaggggctggggccacgagcgccattgacaagcaatggggaagaaacagaaaaacaagagcgaagacagcaccaaggatgacattgatcttgatgccttggctgcagaaatagaaggagctggtgctgccaaagaacaggagcctcaaaagtcaaaagggaaaaagaaaaaagagaaaaaaaagcaggactttgatgaagatgatatcctgaaagaactggaagaattgtctttggaagctcaaggcatcaaagctgacagagaaactgttgcagtgaagccaacagaaaacaatgaagaggaattcacctcaaaagataaaaaaaagaaaggacagaagggcaaaaaacagagttttgatgataatgatagcgaagaattggaagataaagattcaaaatcaaaaaagactgcaaaaccgaaagtggaaatgtactctgggagtgatgatgatgatgattttaacaaacttcctaaaaaagctaaagggaaagctcaaaaatcaaataagaagtgggatgggtcagaggaggatgaggataacagtaaaaaaattaaagagcgttcaagaataaattcttctggtgaaagtggtgatgaatcagatgaatttttgcaatctagaaaaggacagaaaaaaaatcagaaaaacaagccaggtcctaacatagaaagtgggaatgaagatgatgacgcctccttcaaaattaagacagtggcccaaaagaaggcagaaaagaaggagcgcgagagaaaaaagcgagatgaagaaaaagcgaaactgcggaagctgaaagaaaaagaagagttagaaacaggtaaaaaggatcagagtaaacaaaaggaatctcaaaggaaatttgaagaagaaactgtaaaatccaaagtgactgttgatactggagtaattcctgcctctgaagagaaagcagagactcccacagctgcagaagacgacagaaggggacaaaaagaagaaagataagaagaaaaagaaaggagaaaaggaagaaaaagagaaagagaagaaaaaaggacctagcaaagccactgttaaagctatgcaagaagctctggctaagcttaaagaggaagaagaaagacagaagagagaagaggaagaacgtataaaacggcttgaagaattagaagccaagcgtaaagaagaggaacgattggaacaagaaaaaagagaaaggaaaaagcaaaaagaaaaagaaagaaaagaacgcttgaaaaaagaagggaaacttttaactaaatcccagagagaagccagagccagagccgaagctactcttaaactgctacaagctcagggtgttgaagtgccatcaaaagactctttgccaaagaagaggccaatttatgaagataaaaagaggaaaaaaataccacagcagctagaaagtaaagaagtgtctgaatcaatggaattatgtgctgctgtagaagttatggaacaaggagtaccagaaaaggaagagacaccacctcctgttgaaccagaagaagaagaagatactgaggatgctggattggatgattgggaagctatggccagtgatgaggagacagaaaaagtagaaggaaacacagttcatatagaagtaaaagaaaaccctgaagaggaggaggaggaggaagaagaggaagaagaagatgaagaaagtgaagaagaggaggaagaggagggagaaagtgaaggcagtgaaggtgatgaggaagatgaaaaggtgtcagatgagaaggattcagggaagacattagataaaaagccaagtaaagaaatgagctcagattctgaatatgactctgatgatgatcggactaaagaagaaagggcttatgacaaagcaaaacggaggattgagaaacggcgacttgaacatagtaaaaatgtaaacaccgaaaagctaagagcccctattatctgcgtacttgggcatgtggacacagggaagacaaaaattctagataagctccgtcacacacatgtacaagacggtgaagcaggtggtatcacacaacaaattggggccaccaatgttcctcttgaagctattaatgaacagactaagatgattaaaaattttgatagagagaatgtacggattccaggaatgctaattattgatactcctgggcatgaatctttcagtaatctgagaaatagaggaagctctctttgtgacattgccattttagttgttgatattatgcatggtttggagccccagacaattgagtctatcaaccttctcaaatctaaaaaatgtcccttcattgttgcactcaataagattgataggttatatgattggaaaaagagtcctgactctgatgtggctgctactttaaagaagcagaaaaagaatacaaaagatgaatttgaggagcgagcaaaggctattattgtagaatttgcacagcagggtttgaatgctgctttgttttatgagaataaagatccccgcacttttgtgtctttggtacctacctctgcacatactggtgatggcatgggaagtctgatctaccttcttgtagagttaactcagaccatgttgagcaagagacttgcacactgtgaagagctgagagcacaggtgatggaggttaaagctctcccggggatgggcaccactatagatgtcatcttgatcaatgggcgtttgaaggaaggagatacaatcattgttcctggagtagaagggcccattgtaactcagattcgaggcctcctgttacctcctcctatgaaggaattacgagtgaagaaccagtatgaaaagcataaagaagtagaagcagctcagggggtaaagattcttggaaaagacctggagaaaacattggctggtttacccctccttgtggcttataaagaagatgaaatccctgttcttaaagatgaattgatccatgagttaaagcagacactaaatgctatcaaattagaagaaaaaggagtctatgtccaggcatctacactgggttctttggaagctctactggaatttctgaaaacatcagaagtgccctatgcaggaattaacattggcccagtgcataaaaaagatgttatgaaggcttcagtgatgttggaacatgaccctcagtatgcagtaattttggccttcgatgtgagaattgaacgagatgcacaagaaatggctgatagtttaggagttagaatttttagtgcagaaattatttatcatttatttgatgcctttacaaaatatagacaagactacaagaaacagaaacaagaagaatttaagcacatagcagtatttccctgcaagataaaaatcctccctcagtacatttttaattctcgagatccgatagtgatgggggtgacggtggaagcaggtcaggtgaaacaggggacacccatgtgtgtcccaagcaaaaattttgttgacatcggaatagtaacaagtattgaaataaaccataaacaagtggatgttgcaaaaaaaggacaagaagtttgtgtaaaaatagaacctatccctggtgagtcacccaaaatgtttggaagacattttgaagctacagatattcttgttagtaagatcagccggcagtccattgatgcactcaaagactggttcagagatgaaatgcagaagagtgactggcagcttattgtggagctgaagaaagtatttgaaatcatctaattttttcacatggagcaggaactggagtaaatgcaatactgtgttgtaatatcccaacaaaaatcagacaaaaaatggaacagacgtatttggacactgatggacttaagtatggaaggaagaaaaataggtgtataaaatgttttccatgagaaaccaagaaacttacactggtttgacagtggtcagttacatgtccccacagttccaatgtgcctgttcactcacctctcccttccccaacccttctctacttggctgctgttttaaagtttgcccttccccaaatttggatttttattacagatctaaagctctttcgattttatactgattaaatcagtactgcagtatttgattaacca

SEQ ID NO: 365786 - DNA, 507 bp, Homo sapiens
tgagccgcgccctgcgtcctcacgccgaggcggctgggcgatgcgcttgcgcactgagaactgacaccatatgtgtcctgttccagtgcgcgggtctgtggagagccgggtgcgagcggcggcagcacgaggggaaaagagctgagcggagaccaaagtcagccgggagacagtgggtctgtgagagaccgaatagaggggctggggccacgagcgccattgacaagcaatggggaagaaacagaaaaacaagagcgaagacagcaccaaggatgacattgatcttgatgccttggctgcagaaatagaaggagctggtgctgccaaagaacaggagcctcaaaagtcaaaagggaaaaagaaaaaagagaaaaaaaagcaggactttgatgaagatgatatcctgaaagaactggaagaattgtctttggaagctcaaggcatcaaagctgacagagaaactgttgcagtgaagccaacagaaaacaatgaagaggaattcacctc

SEQ ID NO: 365787 - DNA, 443 bp, Homo sapiens
gactctttttccaatcatataacctatcaatcttattgagtgcaacaatgagtggacattttttagatttgagaaggttgataggttatatgattggaactggagtaaatgcaatactgtgttgtaatatcccaacaaaaatcagacaaaaaatggaacagacgtatttggacactgatggacttaagtatggaaggaagaaaaataggtgtataaaatgttttccatgagaaaccaagaaacttacactggtttgacagtggtcagttacatgtccccacagttccaatgtgcctgttcactcacctctcccttccccaacccttctctacttggctgctgttttaaagtttgcccttccccaaatttggatttttattacagatctaaagctctttcgattttatactgattaaatcagtactgcagtatttgattaacca

SEQ ID NO: 365788 - DNA, 459 bp, Homo sapiens
ccaagcagttatacagactcagatgattaaaaattttgatagagagaatgtacggattccaggaatgctaattattgatactcctgggcatgaatctttcagtaatctgagaaatagaggaagctctctttgtgacattgccattttagttgttgatattatgcatggtttggagccccagacaattgagtctgtattaactgcttgaaagcggtaaatacagacctccaggttggtgattgatgcaggagcactcgccggtctttcccaggctggtcaccaagcccaaaaataacattcaggaagggaagctaacgtggacccatgtcaaacatcacatgcgggcggcagggcccagattccggcaagttgtggatcatggataaggtccattccttgtaagtgtctctcctaggcaggatttaaagacaccaaaagggagctgtgtgggccgttacc

SEQ ID NO: 365789 - DNA, 294 bp, Homo sapiens
  misc_feature (294)..(294): n is a, c, g, or t
ctgttgaaccagaagaagaagaagatactgaggatgctggattggatgattgggaagctatggccagtgatgaggagaagaaaaagagaaagagaagaaaaaaggacctagcaaagccactgttaaagctatgcaagaagctctggctaagcttaaagaggaagaagaaagacagaagagagaagaggaagaacgtataaaacggcttgaagaattagaagccaagcgtaaagaagaggaacgagtgtacaagaaaaaagagaaagtgaagcgtgaagtgatgaggagatgaan

SEQ ID NO: 365790 - DNA, 5302 bp, Homo sapiens
tgagccgcgccctgcgtcctcacgccgaggcggctgggcgatgcgcttgcgcactgagaactgacaccatatgtgtcctgttccagtgcgcgggtctgtggagagccgggtgcgagcggcggcagcacgaggggaaaagagctgagcggagaccaaagtcagccgggagacagtgggtctgtgagagaccgaatagaggggctggggccacgagcgccattgacaagcaatggggaagaaacagaaaaacaagagcgaagacagcaccaaggatgacattgatcttgatgccttggctgcagaaatagaaggagctggtgctgccaaagaacaggagcctcaaaagtcaaaagggaaaaagaaaaaagagaaaaaaaagcaggactttgatgaagatgatatcctgaaagaactggaagaattgtctttggaagctcaaggcatcaaagctgacagagaaactgttgcagtgaagccaacagaaaacaatgaagaggaattcacctcaaaagataaaaaaaagaaaggacagaagggcaaaaaacagagttttgatgataatgatagcgaagaattggaagataaagattcaaaatcaaaaaagactgcaaaaccgaaagtggaaatgtactctgggagtgatgatgatgatgattttaacaaacttcctaaaaaagctaaagggaaagctcaaaaatcaaataagaagtgggatgggtcagaggaggatgaggataacagtaaaaaaattaaagagcgttcaagaataaattcttctggtgaaagtggtgatgaatcagatgaatttttgcaatctagaaaaggacagaaaaaaaatcagaaaaacaagccaggtcctaacatagaaagtgggaatgaagatgatgacgcctccttcaaaattaagacagtggcccaaaagaaggcagaaaagaaggagcgcgagagaaaaaagcgagatgaagaaaaagcgaaactgcggaagctgaaagaaaaagaagagttagaaacaggtaaaaaggatcagagtaaacaaaaggaatctcaaaggaaatttgaagaagaaactgtaaaatccaaagtgactgttgatactggagtaattcctgcctctgaagagaaagcagagactcccacagctgcagaagacgacagaaggggacaaaaagaagaaagataagaagaaaaagaaaggagaaaaggaagaaaaagagaaagagaagaaaaaaggacctagcaaagccactgttaaagctatgcaagaagctctggctaagcttaaagaggaagaagaaagacagaagagagaagaggaagaacgtataaaacggcttgaagaattagaagccaagcgtaaagaagaggaacgattggaacaagaaaaaagagaaaggaaaaagcaaaaagaaaaagaaagaaaagaacgcttgaaaaaagaagggaaacttttaactaaatcccagagagaagccagagccagagccgaagctactcttaaactgctacaagctcagggtgttgaagtgccatcaaaagactctttgccaaagaagaggccaatttatgaagataaaaagaggaaaaaaataccacagcagctagaaagtaaagaagtgtctgaatcaatggaattatgtgctgctgtagaagttatggaacaaggagtaccagaaaaggaagagacaccacctcctgttgaaccagaagaagaagaagatactgaggatgctggattggatgattgggaagctatggccagtgatgaggagacagaaaaagtagaaggaaacacagttcatatagaagtaaaagaaaaccctgaagaggaggaggaggaggaagaagaggaagaagaagatgaagaaagtgaagaagaggaggaagaggagggagaaagtgaaggcagtgaaggtgatgaggaagatgaaaaggtgtcagatgagaaggattcagggaagacattagataaaaagccaagtaaagaaatgagctcagattctgaatatgactctgatgatgatcggactaaagaagaaagggcttatgacaaagcaaaacggaggattgagaaacggcgacttgaacatagtaaaaatgtaaacaccgaaaagctaagagcccctattatctgcgtacttgggcatgtggacacagggaagacaaaaattctagataagctccgtcacacacatgtacaagacggtgaagcaggtggtatcacacaacaaattggggccaccaatgttcctcttgaagctattaatgaacagactaagatgattaaaaattttgatagagagaatgtacggattccaggaatgctaattattgatactcctgggcatgaatctttcagtaatctgagaaatagaggaagctctctttgtgacattgccattttagttgttgatattatgcatggtttggagccccagacaattgagtctatcaaccttctcaaatctaaaaaatgtcccttcattgttgcactcaataagattgataggttatatgattggaaaaagagtcctgactctgatgtggctgctactttaaagaagcagaaaaagaatacaaaagatgaatttgaggagcgagcaaaggctattattgtagaatttgcacagcagggtttgaatgctgctttgttttatgagaataaagatccccgcacttttgtgtctttggtacctacctctgcacatactggtgatggcatgggaagtctgatctaccttcttgtagagttaactcagaccatgttgagcaagagacttgcacactgtgaagagctgagagcacaggtgatggaggttaaagctctcccggggatgggcaccactatagatgtcatcttgatcaatgggcgtttgaaggaaggagatacaatcattgttcctggagtagaagggcccattgtaactcagattcgaggcctcctgttacctcctcctatgaaggaattacgagtgaagaaccagtatgaaaagcataaagaagtagaagcagctcagggggtaaagattcttggaaaagacctggagaaaacattggctggtttacccctccttgtggcttataaagaagatgaaatccctgttcttaaagatgaattgatccatgagttaaagcagacactaaatgctatcaaattagaagaaaaaggagtctatgtccaggcatctacactgggttctttggaagctctactggaatttctgaaaacatcagaagtgccctatgcaggaattaacattggcccagtgcataaaaaagatgttatgaaggcttcagtgatgttggaacatgaccctcagtatgcagtaattttggccttcgatgtgagaattgaacgagatgcacaagaaatggctgatagtttaggagttagaatttttagtgcagaaattatttatcatttatttgatgcctttacaaaatatagacaagactacaagaaacagaaacaagaagaatttaagcacatagcagtatttccctgcaagataaaaatcctccctcagtacatttttaattctcgagatccgatagtgatgggggtgacggtggaagcaggtcaggtgaaacaggggacacccatgtgtgtcccaagcaaaaattttgttgacatcggaatagtaacaagtattgaaataaaccataaacaagtggatgttgcaaaaaaaggacaagaagtttgtgtaaaaatagaacctatccctggtgagtcacccaaaatgtttggaagacattttgaagctacagatattcttgttagtaagatcagccggcagtccattgatgcactcaaagactggttcagagatgaaatgcagaagagtgactggcagcttattgtggagctgaagaaagtatttgaaatcatctaattttttcacatggagcaggaactggagtaaatgcaatactgtgttgtaatatcccaacaaaaatcagacaaaaaatggaacagacgtatttggacactgatggacttaagtatggaaggaagaaaaataggtgtataaaatgttttccatgagaaaccaagaaacttacactggtttgacagtggtcagttacatgtccccacagttccaatgtgcctgttcactcacctctcccttccccaacccttctctacttggctgctgttttaaagtttgcccttccccaaatttggatttttattacagatctaaagctctttcgattttatactgattaaatcagtactgcagtatttgattaaccaagcttctgcagattttgtgattcttgggacttttttgacgtaagaaatacttctttatttatgcatattcttcccacagtgatttttccagcattcttctgccatatgcctttagggcttttataaaatagaaaattaggcattctgatatttctttagctgctttgtgtgaaaccatggtgtaaaagcacagctggctgctttttactgcttgtgtagtcacgagtccattgtaatcatcacaattctaaaccaaactaccaataaagaaaacagacatccaccagtaagcaagctctgttaggcttccatgttagtgtagcttctctcccacaagttgtcctcctaggacaagaattatcttacaaactaaactatcatcacactaccttgtatgccagcacctggtaacagtagagatttttatacattaatcttgatctgttttaatcttgatctgttttagtagacatttttatacattaatcttgatctgttttaatcttgatctgttttgtcctagaaaattccatcatacacacatttcctgatatttgggcttagtgcttctaaattgttgcagacacaaaacttaatgattcattcgtagtagtaatctgtagctagttttagggttttgctgaagtcagtgtggggtgtttgtttgaggaaaaagttccaaatatccactagcatagaattttaaactatttttattttaaagttatggcataacatataacataaaaatattttatatacgtttgaaaaatctataccgttcttttttatcatcaaagtttctcaatggccagtagaagcaaaaagacaacaccacctctgatctacgggacataatgttcccaggaaaaaaatcttcaagtgggtgtgagggtgtttctaattcaaaatatgtagatttctccgcatggaagaagtagtaaagattttcttaacatgctcctgtgttcatgcttggagacaagaataagatggtttagaagctttaccctttcttggaacaagtagaatcccggtctgagacct

SEQ ID NO: 365791 - DNA, 4258 bp, Homo sapiens
tgagccgcgccctgcgtcctcacgccgaggcggctgggcgatgcgcttgcgcactgagaactgacaccatatgtgtcctgttccagtgcgcgggtctgtggagagccgggtgcgagcggcggcagcacgaggggaaaagagctgagcggagaccaaagtcagccgggagacagtgggtctgtgagagaccgaatagaggggctggggccacgagcgccattgacaagcaatggggaagaaacagaaaaacaagagcgaagacagcaccaaggatgacattgatcttgatgccttggctgcagaaatagaaggagctggtgctgccaaagaacaggagcctcaaaagtcaaaagggaaaaagaaaaaagagaaaaaaaagcaggactttgatgaagatgatatcctgaaagaactggaagaattgtctttggaagctcaaggcatcaaagctgacagagaaactgttgcagtgaagccaacagaaaacaatgaagaggaattcacctcaaaagataaaaaaaagaaaggacagaagggcaaaaaacagagttttgatgataatgatagcgaagaattggaagataaagattcaaaatcaaaaaagactgcaaaaccgaaagtggaaatgtactctgggagtgatgatgatgatgattttaacaaacttcctaaaaaagctaaagggaaagctcaaaaatcaaataagaagtgggatgggtcagaggaggatgaggataacagtaaaaaaattaaagagcgttcaagaataaattcttctggtgaaagtggtgatgaatcagatgaatttttgcaatctagaaaaggacagaaaaaaaatcagaaaaacaagccaggtcctaacatagaaagtgggaatgaagatgatgacgcctccttcaaaattaagacagtggcccaaaagaaggcagaaaagaaggagcgcgagagaaaaaagcgagatgaagaaaaagcgaaactgcggaagctgaaagaaaaagaagagttagaaacaggtaaaaaggatcagagtaaacaaaaggaatctcaaaggaaatttgaagaagaaactgtaaaatccaaagtgactgttgatactggagtaattcctgcctctgaagagaaagcagagactcccacagctgcagaagacgacagaaggggacaaaaagaagaaagataagaagaaaaagaaaggagaaaaggaagaaaaagagaaagagaagaaaaaaggacctagcaaagccactgttaaagctatgcaagaagctctggctaagcttaaagaggaagaagaaagacagaagagagaagaggaagaacgtataaaacggcttgaagaattagaagccaagcgtaaagaagaggaacgattggaacaagaaaaaagagaaaggaaaaagcaaaaagaaaaagaaagaaaagaacgcttgaaaaaagaagggaaacttttaactaaatcccagagagaagccagagccagagccgaagctactcttaaactgctacaagctcagggtgttgaagtgccatcaaaagactctttgccaaagaagaggccaatttatgaagataaaaagaggaaaaaaataccacagcagctagaaagtaaagaagtgtctgaatcaatggaattatgtgctgctgtagaagttatggaacaaggagtaccagaaaaggaagagacaccacctcctgttgaaccagaagaagaagaagatactgaggatgctggattggatgattgggaagctatggccagtgatgaggagacagaaaaagtagaaggaaacacagttcatatagaagtaaaagaaaaccctgaagaggaggaggaggaggaagaagaggaagaagaagatgaagaaagtgaagaagaggaggaagaggagggagaaagtgaaggcagtgaaggtgatgaggaagatgaaaaggtgtcagatgagaaggattcagggaagacattagataaaaagccaagtaaagaaatgagctcagattctgaatatgactctgatgatgatcggactaaagaagaaagggcttatgacaaagcaaaacggaggattgagaaacggcgacttgaacatagtaaaaatgtaaacaccgaaaagctaagagcccctattatctgcgtacttgggcatgtggacacagggaagacaaaaattctagataagctccgtcacacacatgtacaagacggtgaagcaggtggtatcacacaacaaattggggccaccaatgttcctcttgaagctattaatgaacagactaagatgattaaaaattttgatagagagaatgtacggattccaggaatgctaattattgatactcctgggcatgaatctttcagtaatctgagaaatagaggaagctctctttgtgacattgccattttagttgttgatattatgcatggtttggagccccagacaattgagtctatcaaccttctcaaatctaaaaaatgtcccttcattgttgcactcaataagattgataggttatatgattggaaaaagagtcctgactctgatgtggctgctactttaaagaagcagaaaaagaatacaaaagatgaatttgaggagcgagcaaaggctattattgtagaatttgcacagcagggtttgaatgctgctttgttttatgagaataaagatccccgcacttttgtgtctttggtacctacctctgcacatactggtgatggcatgggaagtctgatctaccttcttgtagagttaactcagaccatgttgagcaagagacttgcacactgtgaagagctgagagcacaggtgatggaggttaaagctctcccggggatgggcaccactatagatgtcatcttgatcaatgggcgtttgaaggaaggagatacaatcattgttcctggagtagaagggcccattgtaactcagattcgaggcctcctgttacctcctcctatgaaggaattacgagtgaagaaccagtatgaaaagcataaagaagtagaagcagctcagggggtaaagattcttggaaaagacctggagaaaacattggctggtttacccctccttgtggcttataaagaagatgaaatccctgttcttaaagatgaattgatccatgagttaaagcagacactaaatgctatcaaattagaagaaaaaggagtctatgtccaggcatctacactgggttctttggaagctctactggaatttctgaaaacatcagaagtgccctatgcaggaattaacattggcccagtgcataaaaaagatgttatgaaggcttcagtgatgttggaacatgaccctcagtatgcagtaattttggccttcgatgtgagaattgaacgagatgcacaagaaatggctgatagtttaggagttagaatttttagtgcagaaattatttatcatttatttgatgcctttacaaaatatagacaagactacaagaaacagaaacaagaagaatttaagcacatagcagtatttccctgcaagataaaaatcctccctcagtacatttttaattctcgagatccgatagtgatgggggtgacggtggaagcaggtcaggtgaaacaggggacacccatgtgtgtcccaagcaaaaattttgttgacatcggaatagtaacaagtattgaaataaaccataaacaagtggatgttgcaaaaaaaggacaagaagtttgtgtaaaaatagaacctatccctggtgagtcacccaaaatgtttggaagacattttgaagctacagatattcttgttagtaagatcagccggcagtccattgatgcactcaaagactggttcagagatgaaatgcagaagagtgactggcagcttattgtggagctgaagaaagtatttgaaatcatctaattttttcacatggagcaggaactggagtaaatgcaatactgtgttgtaatatcccaacaaaaatcagacaaaaaatggaacagacgtatttggacactgatggacttaagtatggaaggaagaaaaataggtgtataaaatgttttccatgagaaaccaagaaacttacactggtttgacagtggtcagttacatgtccccacagttccaatgtgcctgttcactcacctctcccttccccaacccttctctacttggctgctgttttaaagtttgcccttccccaaatttggatttttattacagatctaagaacgtagaaataagaatgacagtttgaacatacataaccctaccccattcctctt

SEQ ID NO: 365792 - DNA, 4197 bp, Homo sapiens
tgagccgcgccctgcgtcctcacgccgaggcggctgggcgatgcgcttgcgcactgagaactgacaccatatgtgtcctgttccagtgcgcgggtctgtggagagccgggtgcgagcggcggcagcacgaggggaaaagagctgagcggagaccaaagtcagccgggagacagtgggtctgtgagagaccgaatagaggggctggggccacgagcgccattgacaagcaatggggaagaaacagaaaaacaagagcgaagacagcaccaaggatgacattgatcttgatgccttggctgcagaaatagaaggagctggtgctgccaaagaacaggagcctcaaaagtcaaaagggaaaaagaaaaaagagaaaaaaaagcaggactttgatgaagatgatatcctgaaagaactggaagaattgtctttggaagctcaaggcatcaaagctgacagagaaactgttgcagtgaagccaacagaaaacaatgaagaggaattcacctcaaaagataaaaaaaagaaaggacagaagggcaaaaaacagagttttgatgataatgatagcgaagaattggaagataaagattcaaaatcaaaaaagactgcaaaaccgaaagtggaaatgtactctgggagtgatgatgatgatgattttaacaaacttcctaaaaaagctaaagggaaagctcaaaaatcaaataagaagtgggatgggtcagaggaggatgaggataacagtaaaaaaattaaagagcgttcaagaataaattcttctggtgaaagtggtgatgaatcagatgaatttttgcaatctagaaaaggacagaagcctccttcaaaattaagacagtggcccaaaagaaggcagaaaagaaggagcgcgagagaaaaaagcgagatgaagaaaaagcgaaactgcggaagctgaaagaaaaagaagagttagaaacaggtaaaaaggatcagagtaaacaaaaggaatctcaaaggaaatttgaagaagaaactgtaaaatccaaagtgactgttgatactggagtaattcctgcctctgaagagaaagcagagactcccacagctgcagaagacgacagaaggggacaaaaagaagaaagataagaagaaaaagaaaggagaaaaggaagaaaaagagaaagagaagaaaaaaggacctagcaaagccactgttaaagctatgcaagaagctctggctaagcttaaagaggaagaagaaagacagaagagagaagaggaagaacgtataaaacggcttgaagaattagaagccaagcgtaaagaagaggaacgattggaacaagaaaaaagagaaaggaaaaagcaaaaagaaaaagaaagaaaagaacgcttgaaaaaagaagggaaacttttaactaaatcccagagagaagccagagccagagccgaagctactcttaaactgctacaagctcagggtgttgaagtgccatcaaaagactctttgccaaagaagaggccaatttatgaagataaaaagaggaaaaaaataccacagcagctagaaagtaaagaagtgtctgaatcaatggaattatgtgctgctgtagaagttatggaacaaggagtaccagaaaaggaagagacaccacctcctgttgaaccagaagaagaagaagatactgaggatgctggattggatgattgggaagctatggccagtgatgaggagacagaaaaagtagaaggaaacacagttcatatagaagtaaaagaaaaccctgaagaggaggaggaggaggaagaagaggaagaagaagatgaagaaagtgaagaagaggaggaagaggagggagaaagtgaaggcagtgaaggtgatgaggaagatgaaaaggtgtcagatgagaaggattcagggaagacattagataaaaagccaagtaaagaaatgagctcagattctgaatatgactctgatgatgatcggactaaagaagaaagggcttatgacaaagcaaaacggaggattgagaaacggcgacttgaacatagtaaaaatgtaaacaccgaaaagctaagagcccctattatctgcgtacttgggcatgtggacacagggaagacaaaaattctagataagctccgtcacacacatgtacaagacggtgaagcaggtggtatcacacaacaaattggggccaccaatgttcctcttgaagctattaatgaacagactaagatgattaaaaattttgatagagagaatgtacggattccaggaatgctaattattgatactcctgggcatgaatctttcagtaatctgagaaatagaggaagctctctttgtgacattgccattttagttgttgatattatgcatggtttggagccccagacaattgagtctatcaaccttctcaaatctaaaaaatgtcccttcattgttgcactcaataagattgataggttatatgattggaaaaagagtcctgactctgatgtggctgctactttaaagaagcagaaaaagaatacaaaagatgaatttgaggagcgagcaaaggctattattgtagaatttgcacagcagggtttgaatgctgctttgttttatgagaataaagatccccgcacttttgtgtctttggtacctacctctgcacatactggtgatggcatgggaagtctgatctaccttcttgtagagttaactcagaccatgttgagcaagagacttgcacactgtgaagagctgagagcacaggtgatggaggttaaagctctcccggggatgggcaccactatagatgtcatcttgatcaatgggcgtttgaaggaaggagatacaatcattgttcctggagtagaagggcccattgtaactcagattcgaggcctcctgttacctcctcctatgaaggaattacgagtgaagaaccagtatgaaaagcataaagaagtagaagcagctcagggggtaaagattcttggaaaagacctggagaaaacattggctggtttacccctccttgtggcttataaagaagatgaaatccctgttcttaaagatgaattgatccatgagttaaagcagacactaaatgctatcaaattagaagaaaaaggagtctatgtccaggcatctacactgggttctttggaagctctactggaatttctgaaaacatcagaagtgccctatgcaggaattaacattggcccagtgcataaaaaagatgttatgaaggcttcagtgatgttggaacatgaccctcagtatgcagtaattttggccttcgatgtgagaattgaacgagatgcacaagaaatggctgatagtttaggagttagaatttttagtgcagaaattatttatcatttatttgatgcctttacaaaatatagacaagactacaagaaacagaaacaagaagaatttaagcacatagcagtatttccctgcaagataaaaatcctccctcagtacatttttaattctcgagatccgatagtgatgggggtgacggtggaagcaggtcaggtgaaacaggggacacccatgtgtgtcccaagcaaaaattttgttgacatcggaatagtaacaagtattgaaataaaccataaacaagtggatgttgcaaaaaaaggacaagaagtttgtgtaaaaatagaacctatccctggtgagtcacccaaaatgtttggaagacattttgaagctacagatattcttgttagtaagatcagccggcagtccattgatgcactcaaagactggttcagagatgaaatgcagaagagtgactggcagcttattgtggagctgaagaaagtatttgaaatcatctaattttttcacatggagcaggaactggagtaaatgcaatactgtgttgtaatatcccaacaaaaatcagacaaaaaatggaacagacgtatttggacactgatggacttaagtatggaaggaagaaaaataggtgtataaaatgttttccatgagaaaccaagaaacttacactggtttgacagtggtcagttacatgtccccacagttccaatgtgcctgttcactcacctctcccttccccaacccttctctacttggctgctgttttaaagtttgcccttccccaaatttggatttttattacagatctaaagctctttcgattttatactgattaaatcagtactgcagtatttgattaacca

SEQ ID NO: 365793 - DNA, 5242 bp, Homo sapiens
tgagccgcgccctgcgtcctcacgccgaggcggctgggcgatgcgcttgcgcactgagaactgacaccatatgtgtcctgttccagtgcgcgggtctgtggagagccgggtgcgagcggcggcagcacgaggggaaaagagctgagcggagaccaaagtcagccgggagacagtgggtctgtgagagaccgaatagaggggctggggccacgagcgccattgacaagcaatggggaagaaacagaaaaacaagagcgaagacagcaccaaggatgacattgatcttgatgccttggctgcagaaatagaaggagctggtgctgccaaagaacaggagcctcaaaagtcaaaagggaaaaagaaaaaagagaaaaaaaagcaggactttgatgaagatgatatcctgaaagaactggaagaattgtctttggaagctcaaggcatcaaagctgacagagaaactgttgcagtgaagccaacagaaaacaatgaagaggaattcacctcaaaagataaaaaaaagaaaggacagaagggcaaaaaacagagttttgatgataatgatagcgaagaattggaagataaagattcaaaatcaaaaaagactgcaaaaccgaaagtggaaatgtactctgggagtgatgatgatgatgattttaacaaacttcctaaaaaagctaaagggaaagctcaaaaatcaaataagaagtgggatgggtcagaggaggatgaggataacagtaaaaaaattaaagagcgttcaagaataaattcttctggtgaaagtggtgatgaatcagatgaatttttgcaatctagaaaaggacagaaaaaaaatcagaaaaacaagccaggtcctaacatagaaagtgggaatgaagatgatgacgcctccttcaaaattaagacagtggcccaaaagaaggcagaaaagaaggagcgcgagagaaaaaagcgagatgaagaaaaagcgaaactgcggaagctgaaagaaaaagaagagttagaaacaggtaaaaaggatcagagtaaacaaaaggaatctcaaaggaaatttgaagaagaaactgtaaaatccaaagtgactgttgatactggagtaattcctgcctctgaagagaaagcagagactcccacagctgcagaagacgacagaaggggacaaaaagaagaaagataagaagaaaaagaaaggagaaaaggaagaaaaagagaaagagaagaaaaaaggacctagcaaagccactgttaaagctatgcaagaagctctggctaagcttaaagaggaagaagaaagacagaagagagaagaggaagaacgtataaaacggcttgaagaattagaagccaagcgtaaagaagaggaacgattggaacaagaaaaaagagaaaggaaaaagcaaaaagaaaaagaaagaaaagaacgcttgaaaaaagaagggaaacttttaactaaatcccagagagaagccagagccagagccgaagctactcttaaactgctacaagctcagggtgttgaagtgccatcaaaagactctttgccaaagaagaggccaatttatgaagataaaaagaggaaaaaaataccacagcagctagaaagtaaagaagtgtctgaatcaatggaattatgtgctgctgtagaagttatggaacaaggagtaccagaaaaggaagagacaccacctcctgttgaaccagaagaagaagaagatactgaggatgctggattggatgattgggaagctatggccagtgatgaggagacagaaaaagtagaaggaaacacagttcatatagaagtaaaagaaaaccctgaagaggaggaggaggaggaagaagaggaagaagaagatgaagaaagtgaagaagaggaggaagaggagggagaaagtgaaggcagtgaaggtgatgaggaagatgaaaaggtgtcagatgagaaggattcagggaagacattagataaaaagccaagtaaagaaatgagctcagattctgaatatgactctgatgatgatcggactaaagaagaaagggcttatgacaaagcaaaacggaggattgagaaacggcgacttgaacatagtaaaaatgtaaacaccgaaaagctaagagcccctattatctgcgtacttgggcatgtggacacagggaagacaaaaattctagataagctccgtcacacacatgtacaagacggtgaagcaggtggtatcacacaacaaattggggccaccaatgttcctcttgaagctattaatgaacagactaagatgattaaaaattttgatagagagaatgtacggattccaggaatgctaattattgatactcctgggcatgaatctttcagtaatctgagaaatagaggaagctctctttgtgacattgccattttagttgttgatattatgcatggtttggagccccagacaattgagtctatcaaccttctcaaatctaaaaaatgtcccttcattgttgcactcaataagattgataggttatatgattggaaaaagagtcctgactctgatgtggctgctactttaaagaagcagaaaaagaatacaaaagatgaatttgaggagcgagcaaaggctattattgtagaatttgcacagcagggtttgaatgctgctttgttttatgagaataaagatccccgcacttttgtgtctttggtacctacctctgcacatactggtgatggcatgggaagtctgatctaccttcttgtagagttaactcagaccatgttgagcaagagacttgcacactgtgaagagctgagagcacaggtgatggaggttaaagctctcccggggatgggcaccactatagatgtcatcttgatcaatgggcgtttgaaggaaggagatacaatcattgttcctggagtagaagggcccattgtaactcagattcgaggcctcctgttacctcctcctatgaaggaattacgagtgaagaaccagtatgaaaagcataaagaagtagaagcagctcagggggtaaagattcttggaaaagacctggagaaaacattggctggtttacccctccttgtggcttataaagaagatgaaatccctgttcttaaagatgaattgatccatgagttaaagcagacactaaatgctatcaaattagaagaaaaaggagtctatgtccaggcatctacactgggttctttggaagctctactggaatttctgaaaacatcagaagtgccctatgcaggaattaacattggcccagtgcataaaaaagatgttatgaaggcttcagtgatgttggaacatgaccctcagtatgcagtaattttggccttcgatgtgagaattgaacgagatgcacaagaaatggctgatagtttaggagttagaatttttagtgcagaaattatttatcatttatttgatgcctttacaaaatatagacaagactacaagaaacagaaacaagaagaatttaagcacatagcagtatttccctgcaagataaaaatcctccctcagtacatttttaattctcgagatccgatagtgatgggggtgacggtggaagcaggtcaggtgaaacaggggacacccatgtgtgtcccaagcaaaaattttgttgacatcggaatagtaacaagtattgaaataaaccataaacaagtggatgttgcaaaaaaaggacaagaagtttgtgtaaaaatagaacctatccctatcagccggcagtccattgatgcactcaaagactggttcagagatgaaatgcagaagagtgactggcagcttattgtggagctgaagaaagtatttgaaatcatctaattttttcacatggagcaggaactggagtaaatgcaatactgtgttgtaatatcccaacaaaaatcagacaaaaaatggaacagacgtatttggacactgatggacttaagtatggaaggaagaaaaataggtgtataaaatgttttccatgagaaaccaagaaacttacactggtttgacagtggtcagttacatgtccccacagttccaatgtgcctgttcactcacctctcccttccccaacccttctctacttggctgctgttttaaagtttgcccttccccaaatttggatttttattacagatctaaagctctttcgattttatactgattaaatcagtactgcagtatttgattaaccaagcttctgcagattttgtgattcttgggacttttttgacgtaagaaatacttctttatttatgcatattcttcccacagtgatttttccagcattcttctgccatatgcctttagggcttttataaaatagaaaattaggcattctgatatttctttagctgctttgtgtgaaaccatggtgtaaaagcacagctggctgctttttactgcttgtgtagtcacgagtccattgtaatcatcacaattctaaaccaaactaccaataaagaaaacagacatccaccagtaagcaagctctgttaggcttccatgttagtgtagcttctctcccacaagttgtcctcctaggacaagaattatcttacaaactaaactatcatcacactaccttgtatgccagcacctggtaacagtagagatttttatacattaatcttgatctgttttaatcttgatctgttttagtagacatttttatacattaatcttgatctgttttaatcttgatctgttttgtcctagaaaattccatcatacacacatttcctgatatttgggcttagtgcttctaaattgttgcagacacaaaacttaatgattcattcgtagtagtaatctgtagctagttttagggttttgctgaagtcagtgtggggtgtttgtttgaggaaaaagttccaaatatccactagcatagaattttaaactatttttattttaaagttatggcataacatataacataaaaatattttatatacgtttgaaaaatctataccgttcttttttatcatcaaagtttctcaatggccagtagaagcaaaaagacaacaccacctctgatctacgggacataatgttcccaggaaaaaaatcttcaagtgggtgtgagggtgtttctaattcaaaatatgtagatttctccgcatggaagaagtagtaaagattttcttaacatgctcctgtgttcatgcttggagacaagaataagatggtttagaagctttaccctttcttggaacaagtagaatcccggtctgagacct

SEQ ID NO: 365794 - DNA, 3476 bp, Homo sapiens
  misc_feature (3201)..(3201): n is a, c, g, or t
tgagccgcgccctgcgtcctcacgccgaggcggctgggcgatgcgcttgcgcactgagaactgacaccatatgtgtcctgttccagtgcgcgggtctgtggagagccgggtgcgagcggcggcagcacgaggggaaaagagctgagcggagaccaaagtcagccgggagacagtgggtctgtgagagaccgaatagaggggctggggccacgagcgccattgacaagcaatggggaagaaacagaaaaacaagagcgaagacagcaccaaggatgacattgatcttgatgccttggctgcagaaatagaaggagctggtgctgccaaagaacaggagcctcaaaagtcaaaagggaaaaagaaaaaagagaaaaaaaagcaggactttgatgaagatgatatcctgaaagaactggaagaattgtctttggaagctcaaggcatcaaagctgacagagaaactgttgcagtgaagccaacagaaaacaatgaagaggaattcacctcaaaagataaaaaaaagaaaggacagaagggcaaaaaacagagttttgatgataatgatagcgaagaattggaagataaagattcaaaatcaaaaaagactgcaaaaccgaaagtggaaatgtactctgggagtgatgatgatgatgattttaacaaacttcctaaaaaagctaaagggaaagctcaaaaatcaaataagaagtgggatgggtcagaggaggatgaggataacagtaaaaaaattaaagagcgttcaagaataaattcttctggtgaaagtggtgatgaatcagatgaatttttgcaatctagaaaaggacagaaaaaaaatcagaaaaacaagccaggtcctaacatagaaagtgggaatgaagatgatgacgcctccttcaaaattaagacagtggcccaaaagaaggcagaaaagaaggagcgcgagagaaaaaagcgagatgaagaaaaagcgaaactgcggaagctgaaagaaaaagaagagttagaaacaggtaaaaaggatcagagtaaacaaaaggaatctcaaaggaaatttgaagaagaaactgtaaaatccaaagtgactgttgatactggagtaattcctgcctctgaagagaaagcagagactcccacagctgcagaagacgacagaaggggacaaaaagaagaaagataagaagaaaaagaaaggagaaaaggaagaaaaagagaaagagaagaaaaaaggacctagcaaagccactgttaaagctatgcaagaagctctggctaagcttaaagaggaagaagaaagacagaagagagaagaggaagaacgtataaaacggcttgaagaattagaagccaagcgtaaagaagaggaacgattggaacaagaaaaaagagaaaggaaaaagcaaaaagaaaaagaaagaaaagaacgcttgaaaaaagaagggaaacttttaactaaatcccagagagaagccagagccagagccgaagctactcttaaactgctacaagctcagggtgttgaagtgccatcaaaagactctttgccaaagaagaggccaatttatgaagataaaaagaggaaaaaaataccacagcagctagaaagtaaagaagtgtctgaatcaatggaattatgtgctgctgtagaagttatggaacaaggagtaccagaaaaggaagagacaccacctcctgttgaaccagaagaagaagaagatactgaggatgctggattggatgattgggaagctatggccagtgatgaggagacagaaaaagtagaaggaaacacagttcatatagaagtaaaagaaaaccctgaagaggaggaggaggaggaagaagaggaagaagaagatgaagaaagtgaagaagaggaggaagaggagggagaaagtgaaggcagtgaaggtgatgaggaagatgaaaaggtgtcagatgagaaggattcagggaagacattagataaaaagccaagtaaagaaatgagctcagattctgaatatgactctgatgatgatcggactaaagaagaaagggcttatgacaaagcaaaacggaggattgagaaacggcgacttgaacatagtaaaaatgtaaacaccgaaaagctaagagcccctattatctgcgtacttgggcatgtggacacagggaagacaaaaattctagataagctccgtcacacacatgtacaagacggtgaagcaggtggtatcacacaacaaattggggccaccaatgttcctcttgaagctattaatgaacagactaagatgattaaaaattttgatagagagaatgtacggattccaggaatgctaattattgatactcctgggcatgaatctttcagtaatctgagaaatagaggaagctctctttgtgacattgccattttagttgttgatattatgcatggtttggagccccagacaattgagtctatcaaccttctcaaatctaaaaaatgtcccttcattgttgcactcaataagattgataggttatatgattggaaaaagagtcctgactctgatgtggctgctactttaaagaagcagaaaaagaatacaaaagatgaatttgaggagcgagcaaaggctattattgtagaatttgcacagcagggtttgaatgctgctttgttttatgagaataaagatccccgcacttttgtgtctttggtacctacctctgcacatactggtgatggcatgggaagtctgatctaccttcttgtagagttaactcagaccatgttgagcaagagacttgcacactgtgaagagctgagagcacaggtgatggaggttaaagctctcccggggatgggcaccactatagatgtcatcttgatcaatgggcgtttgaaggaaggagatacaatcattgttcctggagtagaagggcccattgtaactcagattcgaggcctcctgttacctcctcctatgaaggaattacgagtgaagaaccagtatgaaaagcttgaagaattagaagccaagcgtaaagaagaggaacgattggaacaagaaaaaagagaaaggaaaaagcaaaaagaaaaagaaagaaaagaacgcttgaaaaaagaagggaaacttttaactaaatcccagagagaagccagagccagagccgaagctactcttaaactgctacaagctcagggtgttgaagtgccatcaaaagactctntgccaaagaagaggccaatttatgaagccaaaaagaagaaagataagaagaaaaagaaaggagaaaaggaagaaaaagagaaagagaagaaaaaaggacctagcaaagccactgttaaagctatgcaagaagctctggctaagcttaaagaggaagaagaaagacagaagagagaagaggaagaacgtataaaacggcttgaagaattagaagccaagcgtaaagaagaggaacgattggaacaagaaaaaagagaaaggaaaaagcaaaaaaaa

SEQ ID NO: 365795 - DNA, 2541 bp, Homo sapiens
  misc_feature (2490)..(2490): n is a, c, g, or t
  misc_feature (2494)..(2494): n is a, c, g, or t
  misc_feature (2519)..(2519): n is a, c, g, or t
  misc_feature (2535)..(2535): n is a, c, g, or t
tgagccgcgccctgcgtcctcacgccgaggcggctgggcgatgcgcttgcgcactgagaactgacaccatatgtgtcctgttccagtgcgcgggtctgtggagagccgggtgcgagcggcggcagcacgaggggaaaagagctgagcggagaccaaagtcagccgggagacagtgggtctgtgagagaccgaatagaggggctggggccacgagcgccattgacaagcaatggggaagaaacagaaaaacaagagcgaagacagcaccaaggatgacattgatcttgatgccttggctgcagaaatagaaggagctggtgctgccaaagaacaggagcctcaaaagtcaaaagggaaaaagaaaaaagagaaaaaaaagcaggactttgatgaagatgatatcctgaaagaactggaagaattgtctttggaagctcaaggcatcaaagctgacagagaaactgttgcagtgaagccaacagaaaacaatgaagaggaattcacctcaaaagataaaaaaaagaaaggacagaagggcaaaaaacagagttttgatgataatgatagcgaagaattggaagataaagattcaaaatcaaaaaagactgcaaaaccgaaagtggaaatgtactctgggagtgatgatgatgatgattttaacaaacttcctaaaaaagctaaagggaaagctcaaaaatcaaataagaagtgggatgggtcagaggaggatgaggataacagtaaaaaaattaaagagcgttcaagaataaattcttctggtgaaagtggtgatgaatcagatgaatttttgcaatctagaaaaggacagaaaaaaaatcagaaaaacaagccaggtcctaacatagaaagtgggaatgaagatgatgacgcctccttcaaaattaagacagtggcccaaaagaaggcagaaaagaaggagcgcgagagaaaaaagcgagatgaagaaaaagcgaaactgcggaagctgaaagaaaaagaagagttagaaacaggtaaaaaggatcagagtaaacaaaaggaatctcaaaggaaatttgaagaagaaactgtaaaatccaaagtgactgttgatactggagtaattcctgcctctgaagagaaagcagagactcccacagctgcagaagacgacagaaggggacaaaaagaagaaagataagaagaaaaagaaaggagaaaaggaagaaaaagagaaagagaagaaaaaaggacctagcaaagccactgttaaagctatgcaagaagctctggctaagcttaaagaggaagaagaaagacagaagagagaagaggaagaacgtataaaacggcttgaagaattagaagccaagcgtaaagaagaggaacgattggaacaagaaaaaagagaaaggaaaaagcaaaaagaaaaagaaagaaaagaacgcttgaaaaaagaagggaaacttttaactaaatcccagagagaagccagagccagagccgaagctactcttaaactgctacaagctcagggtgttgaagtgccatcaaaagactctttgccaaagaagaggccaatttatgaagataaaaagaggaaaaaaataccacagcagctagaaagtaaagaagtgtctgaatcaatggaattatgtgctgctgtagaagttatggaacaaggagtaccagaaaaggaagagacaccacctcctgttgaaccagaagaagaagaagatactgaggatgctggattggatgattgggaagctatggccagtgatgaggagacagaaaaagtagaaggaaacacagttcatatagaagtaaaagaaaaccctgaagaggaggaggaggaggaagaagaggaagaagaagatgaagaaagtgaagaagaggaggaagaggagggagaaagtgaaggcagtgaaggtgatgaggaagatgaaaaggtgtcagatgagaaggattcagggaagacattagataaaaagccaagtaaagaaatgagctcagattctgaatatgactctgatgatgatcggactaaagaagaaagggcttatgacaaagcaaaacggaggattgagaaacggcgacttgaacatagtaaaaatgtaaacaccgaaaagctaagagcccctattatctgcgtacttgggcatgtggacacagggaagacaaaaattctagataagctccgtcacacacatgtacaagacggtgaagcaggtggtatcacacaacaaattggggccaccaatgttcctcttgaagctattaatgaacagactaagatgattaaaaattttgatagagagaatgtacggattccaggaatgctaattattgatactcctgggcatgaatctttcagtaatctgagaaatagaggaagctctctttgtgacattgccattttagttgttgatattatgcatggtttggagccccagacaattgagtctatcaaccttctcaaatctaaaaaaattttccctccttgtttgncccnccattaaaaattgattaggtttttntgaattgggaaaaaanaattcc

SEQ ID NO: 365796 - DNA, 2125 bp, Homo sapiens
tgagccgcgccctgcgtcctcacgccgaggcggctgggcgatgcgcttgcgcactgagaactgacaccatatgtgtcctgttccagtgcgcgggtctgtggagagccgggtgcgagcggcggcagcacgaggggaaaagagctgagcggagaccaaagtcagccgggagacagtgggtctgtgagagaccgaatagaggggctggggccacgagcgccattgacaagcaatggggaagaaacagaaaaacaagagcgaagacagcaccaaggatgacattgatcttgatgccttggctgcagaaatagaaggagctggtgctgccaaagaacaggagcctcaaaagtcaaaagggaaaaagaaaaaagagaaaaaaaagcaggactttgatgaagatgatatcctgaaagaactggaagaattgtctttggaagctcaaggcatcaaagctgacagagaaactgttgcagtgaagccaacagaaaacaatgaagaggaattcacctcaaaagataaaaaaaagaaaggacagaagggcaaaaaacagagttttgatgataatgatagcgaagaattggaagataaagattcaaaatcaaaaaagactgcaaaaccgaaagtggaaatgtactctgggagtgatgatgatgatgattttaacaaacttcctaaaaaagctaaagggaaagctcaaaaatcaaataagaagtgggatgggtcagaggaggatgaggataacagtaaaaaaattaaagagcgttcaagaataaattcttctggtgaaagtggtgatgaatcagatgaatttttgcaatctagaaaaggacagaaaaaaaatcagaaaaacaagccaggtcctaacatagaaagtgggaatgaagatgatgacgcctccttcaaaattaagacagtggcccaaaagaaggcagaaaagaaggagcgcgagagaaaaaagcgagatgaagaaaaagcgaaactgcggaagctgaaagaaaaagaagagttagaaacaggtaaaaaggatcagagtaaacaaaaggaatctcaaaggaaatttgaagaagaaactgtaaaatccaaagtgactgttgatactggagtaattcctgcctctgaagagaaagcagagactcccacagctgcagaagacgacagaaggggacaaaaagaagaaagataagaagaaaaagaaaggagaaaaggaagaaaaagagaaagagaagaaaaaaggacctagcaaagccactgttaaagctatgcaagaagctctggctaagcttaaagaggaagaagaaagacagaagagagaagaggaagaacgtataaaacggcttgaagaattagaagccaagcgtaaagaagaggaacgattggaacaagaaaaaagagaaaggaaaaagcaaaaagaaaaagaaagaaaagaacgcttgaaaaaagaagggaaacttttaactaaatcccagagagaagccagagccagagccgaagctactcttaaactgctacaagctcagggtgttgaagtgccatcaaaagactctttgccaaagaagaggccaatttatgaagataaaaagaggaaaaaaataccacagcagctagaaagtaaagaagtgtctgaatcaatggaattatgtgctgctgtagaagttatggaacaaggagtaccagaaaaggaagagacaccacctcctgttgaaccagaagaagaagaagatactgaggatgctggattggatgattgggaagctatggccagtgatgaggagacagaaaaagaagagcgaagacagcaccaaggatgacattgatcttgatgccttggctgcagaaatagaaggagctggtgctgccaaagaacaggagcctcaaaagtcaaaagggaaaaagagataagagaaataaaagcaggactttgatgaagatgatatcctgaaagaactggaagaattgtctttggaagctcaaggcatcaaagctgacagagaaactgttgcagtgaagccaacagaaaacaatgaagaggaattcacctcaaaagataaaaaaaagagacagaagggcaaacagagtttgatgataatgatgcgaattggcctgttgtagaaggtatcacaacacgatt

SEQ ID NO: 365797 - DNA, 3440 bp, Homo sapiens
tgagccgcgccctgcgtcctcacgccgaggcggctgggcgatgcgcttgcgcactgagaactgacaccatatgtgtcctgttccagtgcgcgggtctgtggagagccgggtgcgagcggcggcagcgcgagagaaaaaagcgagatgaagaaaaagcgaaactgcggaagctgaaagaaaaagaagagttagaaacaggtaaaaaggatcagagtaaacaaaaggaatctcaaaggaaatttgaagaagaaactgtaaaatccaaagtgactgttgatactggagtaattcctgcctctgaagagaaagcagagactcccacagctgcagaagacgacagaaggggacaaaaagaagaaagataagaagaaaaagaaaggagaaaaggaagaaaaagagaaagagaagaaaaaaggacctagcaaagccactgttaaagctatgcaagaagctctggctaagcttaaagaggaagaagaaagacagaagagagaagaggaagaacgtataaaacggcttgaagaattagaagccaagcgtaaagaagaggaacgattggaacaagaaaaaagagaaaggaaaaagcaaaaagaaaaagaaagaaaagaacgcttgaaaaaagaagggaaacttttaactaaatcccagagagaagccagagccagagccgaagctactcttaaactgctacaagctcagggtgttgaagtgccatcaaaagactctttgccaaagaagaggccaatttatgaagataaaaagaggaaaaaaataccacagcagctagaaagtaaagaagtgtctgaatcaatggaattatgtgctgctgtagaagttatggaacaaggagtaccagaaaaggaagagacaccacctcctgttgaaccagaagaagaagaagatactgaggatgctggattggatgattgggaagctatggccagtgatgaggagacagaaaaagtagaaggaaacacagttcatatagaagtaaaagaaaaccctgaagaggaggaggaggaggaagaagaggaagaagaagatgaagaaagtgaagaagaggaggaagaggagggagaaagtgaaggcagtgaaggtgatgaggaagatgaaaaggtgtcagatgagaaggattcagggaagacattagataaaaagccaagtaaagaaatgagctcagattctgaatatgactctgatgatgatcggactaaagaagaaagggcttatgacaaagcaaaacggaggattgagaaacggcgacttgaacatagtaaaaatgtaaacaccgaaaagctaagagcccctattatctgcgtacttgggcatgtggacacagggaagacaaaaattctagataagctccgtcacacacatgtacaagacggtgaagcaggtggtatcacacaacaaattggggccaccaatgttcctcttgaagctattaatgaacagactaagatgattaaaaattttgatagagagaatgtacggattccaggaatgctaattattgatactcctgggcatgaatctttcagtaatctgagaaatagaggaagctctctttgtgacattgccattttagttgttgatattatgcatggtttggagccccagacaattgagtctatcaaccttctcaaatctaaaaaatgtcccttcattgttgcactcaataagattgataggttatatgattggaaaaagagtcctgactctgatgtggctgctactttaaagaagcagaaaaagaatacaaaagatgaatttgaggagcgagcaaaggctattattgtagaatttgcacagcagggtttgaatgctgctttgttttatgagaataaagatccccgcacttttgtgtctttggtacctacctctgcacatactggtgatggcatgggaagtctgatctaccttcttgtagagttaactcagaccatgttgagcaagagacttgcacactgtgaagagctgagagcacaggtgatggaggttaaagctctcccggggatgggcaccactatagatgtcatcttgatcaatgggcgtttgaaggaaggagatacaatcattgttcctggagtagaagggcccattgtaactcagattcgaggcctcctgttacctcctcctatgaaggaattacgagtgaagaaccagtatgaaaagcataaagaagtagaagcagctcagggggtaaagattcttggaaaagacctggagaaaacattggctggtttacccctccttgtggcttataaagaagatgaaatccctgttcttaaagatgaattgatccatgagttaaagcagacactaaatgctatcaaattagaagaaaaaggagtctatgtccaggcatctacactgggttctttggaagctctactggaatttctgaaaacatcagaagtgccctatgcaggaattaacattggcccagtgcataaaaaagatgttatgaaggcttcagtgatgttggaacatgaccctcagtatgcagtaattttggccttcgatgtgagaattgaacgagatgcacaagaaatggctgatagtttaggagttagaatttttagtgcagaaattatttatcatttatttgatgcctttacaaaatatagacaagactacaagaaacagaaacaagaagaatttaagcacatagcagtatttccctgcaagataaaaatcctccctcagtacatttttaattctcgagatccgatagtgatgggggtgacggtggaagcaggtcaggtgaaacaggggacacccatgtgtgtcccaagcaaaaattttgttgacatcggaatagtaacaagtattgaaataaaccataaacaagtggatgttgcaaaaaaaggacaagaagtttgtgtaaaaatagaacctatccctggtgagtcacccaaaatgtttggaagacattttgaagctacagatattcttgttagtaagatcagccggcagtccattgatgcactcaaagactggttcagagatgaaatgcagaagagtgactggcagcttattgtggagctgaagaaagtatttgaaatcatctaattttttcacatggagcaggaactggagtaaatgcaatactgtgttgtaatatcccaacaaaaatcagacaaaaaatggaacagacgtatttggacactgatggacttaagtatggaaggaagaaaaataggtgtataaaatgttttccatgagaaaccaagaaacttacactggtttgacagtggtcagttacatgtccccacagttccaatgtgcctgttcactcacctctcccttccccaacccttctctacttggctgctgttttaaagtttgcccttccccaaatttggatttttattacagatctaaagctctttcgattttatactgattaaatcagtactgcagtatttgattaacca

SEQ ID NO: 365798 - DNA, 3993 bp, Homo sapiens
tgagccgcgccctgcgtcctcacgccgaggcggctgggcgatgcgcttgcgcactgagaactgacaccatatgtgtcctgttccagtgcgcgggtctgtggagagccgggtgcgagcggcggcagcacgaggggaaaagagctgagcggagaccaaagtcagccgggagacagtgggtctgtgagagaccgaatagaggggctggggccacgagcgccattgacaagcaatggggaagaaacagaaaaacaagagcgaagacagcaccaaggatgacattgatcttgatgccttggctgcagaaatagaaggagctggtgctgccaaagaacaggagcctcaaaagtcaaaagggaaaaagaaaaaagagaaaaaaaagcaggactttgatgaagatgatatcctgaaagaactggaagaattgtctttggaagctcaaggcatcaaagctgacagagaaactgttgcagtgaagccaacagaaaacaatgaagaggaattcacctcaaaagataaaaaaaagaaaggacagaagggcaaaaaacagagttttgatgataatgatagcgaagaattggaagataaagattcaaaatcaaaaaagactgcaaaaccgaaagtggaaatgtactctgggagtgatgatgatgatgattttaacaaacttcctaaaaaagctaaagggaaagctcaaaaatcaaataagaagtgggatgggtcagaggaggatgaggataacagtaaaaaaattaaagagcgttcaagaataaattcttctggtgaaagtggtgatgaatcagatgaatttttgcaatctagaaaaggacagaaaaaaaatcagaaaaacaagccaggtcctaacatagaaagtgggaatgaagatgatgacgcctccttcaaaattaagacagtggcccaaaagaaggcagaaaagaaggaggaagaaaaagagaaagagaagaaaaaaggacctagcaaagccactgttaaagctatgcaagaagctctggctaagcttaaagaggaagaagaaagacagaagagagaagaggaagaacgtataaaacggcttgaagaattagaagccaagcgtaaagaagaggaacgattggaacaagaaaaaagagaaaggaaaaagcaaaaagaaaaagaaagaaaagaacgcttgaaaaaagaagggaaacttttaactaaatcccagagagaagccagagccagagccgaagctactcttaaactgctacaagctcagggtgttgaagtgccatcaaaagactctttgccaaagaagaggccaatttatgaagataaaaagaggaaaaaaataccacagcagctagaaagtaaagaagtgtctgaatcaatggaattatgtgctgctgtagaagttatggaacaaggagtaccagaaaaggaagagacaccacctcctgttgaaccagaagaagaagaagatactgaggatgctggattggatgattgggaagctatggccagtgatgaggagacagaaaaagtagaaggaaacacagttcatatagaagtaaaagaaaaccctgaagaggaggaggaggaggaagaagaggaagaagaagatgaagaaagtgaagaagaggaggaagaggagggagaaagtgaaggcagtgaaggtgatgaggaagatgaaaaggtgtcagatgagaaggattcagggaagacattagataaaaagccaagtaaagaaatgagctcagattctgaatatgactctgatgatgatcggactaaagaagaaagggcttatgacaaagcaaaacggaggattgagaaacggcgacttgaacatagtaaaaatgtaaacaccgaaaagctaagagcccctattatctgcgtacttgggcatgtggacacagggaagacaaaaattctagataagctccgtcacacacatgtacaagacggtgaagcaggtggtatcacacaacaaattggggccaccaatgttcctcttgaagctattaatgaacagactaagatgattaaaaattttgatagagagaatgtacggattccaggaatgctaattattgatactcctgggcatgaatctttcagtaatctgagaaatagaggaagctctctttgtgacattgccattttagttgttgatattatgcatggtttggagccccagacaattgagtctatcaaccttctcaaatctaaaaaatgtcccttcattgttgcactcaataagattgataggttatatgattggaaaaagagtcctgactctgatgtggctgctactttaaagaagcagaaaaagaatacaaaagatgaatttgaggagcgagcaaaggctattattgtagaatttgcacagcagggtttgaatgctgctttgttttatgagaataaagatccccgcacttttgtgtctttggtacctacctctgcacatactggtgatggcatgggaagtctgatctaccttcttgtagagttaactcagaccatgttgagcaagagacttgcacactgtgaagagctgagagcacaggtgatggaggttaaagctctcccggggatgggcaccactatagatgtcatcttgatcaatgggcgtttgaaggaaggagatacaatcattgttcctggagtagaagggcccattgtaactcagattcgaggcctcctgttacctcctcctatgaaggaattacgagtgaagaaccagtatgaaaagcataaagaagtagaagcagctcagggggtaaagattcttggaaaagacctggagaaaacattggctggtttacccctccttgtggcttataaagaagatgaaatccctgttcttaaagatgaattgatccatgagttaaagcagacactaaatgctatcaaattagaagaaaaaggagtctatgtccaggcatctacactgggttctttggaagctctactggaatttctgaaaacatcagaagtgccctatgcaggaattaacattggcccagtgcataaaaaagatgttatgaaggcttcagtgatgttggaacatgaccctcagtatgcagtaattttggccttcgatgtgagaattgaacgagatgcacaagaaatggctgatagtttaggagttagaatttttagtgcagaaattatttatcatttatttgatgcctttacaaaatatagacaagactacaagaaacagaaacaagaagaatttaagcacatagcagtatttccctgcaagataaaaatcctccctcagtacatttttaattctcgagatccgatagtgatgggggtgacggtggaagcaggtcaggtgaaacaggggacacccatgtgtgtcccaagcaaaaattttgttgacatcggaatagtaacaagtattgaaataaaccataaacaagtggatgttgcaaaaaaaggacaagaagtttgtgtaaaaatagaacctatccctggtgagtcacccaaaatgtttggaagacattttgaagctacagatattcttgttagtaagatcagccggcagtccattgatgcactcaaagactggttcagagatgaaatgcagaagagtgactggcagcttattgtggagctgaagaaagtatttgaaatcatctaattttttcacatggagcaggaactggagtaaatgcaatactgtgttgtaatatcccaacaaaaatcagacaaaaaatggaacagacgtatttggacactgatggacttaagtatggaaggaagaaaaataggtgtataaaatgttttccatgagaaaccaagaaacttacactggtttgacagtggtcagttacatgtccccacagttccaatgtgcctgttcactcacctctcccttccccaacccttctctacttggctgctgttttaaagtttgcccttccccaaatttggatttttattacagatctaaagctctttcgattttatactgattaaatcagtactgcagtatttgattaacca

SEQ ID NO: 365799 - DNA, 3552 bp, Homo sapiens
aaagtggacatcattctcattaactccatcttgtagaagtgaaattagctacagaacttacgtgggtgttagttcattctgattgttagaacttcatataagcatctgttggacaccagccactcaggtaccatggatttagagatacattaggtacaggattgcccttttgctgctgacagtatccttctgtcttactgtattcctcaggacatctgagaccaacatcagtattgcagacttctcaggaggccatctgtgagttattctgagctattctagttaccaaagtgctcaggatgccttgatgcctgtagaacttagcctgctgctggcatcggccttggcccattatggtccttgaattgtggttgggttttgctcgtcatcaccacagggaattgttttttcatttcaatgctttgcctttattctttttggtagaacgacagaaggggacaaaaagaagaaagataagaagaaaaagaaaggagaaaaggaagaaaaagagaaagagaagaaaaaaggacctagcaaagccactgttaaagctatgcaagaagctctggctaagcttaaagaggaagaagaaagacagaagagagaagaggaagaacgtataaaacggcttgaagaattagaagccaagcgtaaagaagaggaacgattggaacaagaaaaaagagaaaggaaaaagcaaaaagaaaaagaaagaaaagaacgcttgaaaaaagaagggaaacttttaactaaatcccagagagaagccagagccagagccgaagctactcttaaactgctacaagctcagggtgttgaagtgccatcaaaagactctttgccaaagaagaggccaatttatgaagataaaaagaggaaaaaaataccacagcagctagaaagtaaagaagtgtctgaatcaatggaattatgtgctgctgtagaagttatggaacaaggagtaccagaaaaggaagagacaccacctcctgttgaaccagaagaagaagaagatactgaggatgctggattggatgattgggaagctatggccagtgatgaggagacagaaaaagtagaaggaaacacagttcatatagaagtaaaagaaaaccctgaagaggaggaggaggaggaagaagaggaagaagaagatgaagaaagtgaagaagaggaggaagaggagggagaaagtgaaggcagtgaaggtgatgaggaagatgaaaaggtgtcagatgagaaggattcagggaagacattagataaaaagccaagtaaagaaatgagctcagattctgaatatgactctgatgatgatcggactaaagaagaaagggcttatgacaaagcaaaacggaggattgagaaacggcgacttgaacatagtaaaaatgtaaacaccgaaaagctaagagcccctattatctgcgtacttgggcatgtggacacagggaagacaaaaattctagataagctccgtcacacacatgtacaagacggtgaagcaggtggtatcacacaacaaattggggccaccaatgttcctcttgaagctattaatgaacagactaagatgattaaaaattttgatagagagaatgtacggattccaggaatgctaattattgatactcctgggcatgaatctttcagtaatctgagaaatagaggaagctctctttgtgacattgccattttagttgttgatattatgcatggtttggagccccagacaattgagtctatcaaccttctcaaatctaaaaaatgtcccttcattgttgcactcaataagattgataggttatatgattggaaaaagagtcctgactctgatgtggctgctactttaaagaagcagaaaaagaatacaaaagatgaatttgaggagcgagcaaaggctattattgtagaatttgcacagcagggtttgaatgctgctttgttttatgagaataaagatccccgcacttttgtgtctttggtacctacctctgcacatactggtgatggcatgggaagtctgatctaccttcttgtagagttaactcagaccatgttgagcaagagacttgcacactgtgaagagctgagagcacaggtgatggaggttaaagctctcccggggatgggcaccactatagatgtcatcttgatcaatgggcgtttgaaggaaggagatacaatcattgttcctggagtagaagggcccattgtaactcagattcgaggcctcctgttacctcctcctatgaaggaattacgagtgaagaaccagtatgaaaagcataaagaagtagaagcagctcagggggtaaagattcttggaaaagacctggagaaaacattggctggtttacccctccttgtggcttataaagaagatgaaatccctgttcttaaagatgaattgatccatgagttaaagcagacactaaatgctatcaaattagaagaaaaaggagtctatgtccaggcatctacactgggttctttggaagctctactggaatttctgaaaacatcagaagtgccctatgcaggaattaacattggcccagtgcataaaaaagatgttatgaaggcttcagtgatgttggaacatgaccctcagtatgcagtaattttggccttcgatgtgagaattgaacgagatgcacaagaaatggctgatagtttaggagttagaatttttagtgcagaaattatttatcatttatttgatgcctttacaaaatatagacaagactacaagaaacagaaacaagaagaatttaagcacatagcagtatttccctgcaagataaaaatcctccctcagtacatttttaattctcgagatccgatagtgatgggggtgacggtggaagcaggtcaggtgaaacaggggacacccatgtgtgtcccaagcaaaaattttgttgacatcggaatagtaacaagtattgaaataaaccataaacaagtggatgttgcaaaaaaaggacaagaagtttgtgtaaaaatagaacctatccctggtgagtcacccaaaatgtttggaagacattttgaagctacagatattcttgttagtaagatcagccggcagtccattgatgcactcaaagactggttcagagatgaaatgcagaagagtgactggcagcttattgtggagctgaagaaagtatttgaaatcatctaattttttcacatggagcaggaactggagtaaatgcaatactgtgttgtaatatcccaacaaaaatcagacaaaaaatggaacagacgtatttggacactgatggacttaagtatggaaggaagaaaaataggtgtataaaatgttttccatgagaaaccaagaaacttacactggtttgacagtggtcagttacatgtccccacagttccaatgtgcctgttcactcacctctcccttccccaacccttctctacttggctgctgttttaaagtttgcccttccccaaatttggatttttattacagatctaaagctctttcgattttatactgattaaatcagtactgcagtatttgattaacca

SEQ ID NO: 365800 - DNA, 3758 bp, Homo sapiens
tgagccgcgccctgcgtcctcacgccgaggcggctgggcgatgcgcttgcgcactgagaactgacaccatatgtgtcctgttccagtgcgcgggtctgtggagagccgggtgcgagcggcggcagcacgaggggaaaagagctgagcggagaccaaagtcagccgggagacagtgggtctgtgagagaccgaatagaggggctggggccacgagcgccattgacaagcaatggggaagaaacagaaaaacaagagcgaagacagcaccaaggatgacattgatcttgatgccttggctgcagaaatagaaggagctggtgctgccaaagaacaggagcctcaaaagtcaaaagggaaaaagaaaaaagagaaaaaaaagcaggactttgatgaagatgatatcctgaaagaactggaagaattgtctttggaagctcaaggcatcaaagctgacagagaaactgttgcagtgaagccaacagaaaacaatgaagaggaattcacctcaaaagataaaaaaaagaaaggacagaagggcaaaaaacagagttttgatgataatgatagcgaagaattggaagataaagattcaaaatcaaaaaagactgcaaaaccgaaagtggaaatgtactctgggagtgatgatgatgatgattttaacaaacttcctaaaaaagctaaagggaaagctcaaaaatcaaataagaagtgggatgggtcagaggaggatgaggataacagtaaaaaaattaaagagcgttcaagaataaattcttctggtgaaagtggtgatgaatcagatgaatttttgcaatctagaaaaggacagaaaaaaaatcagaaaaacaagccaggtcctaacatagaaagtgggaatgaagatgatgacgcctccttcaaaattaagacagtggcccaaaagaaggcagaaaagaaggagaagggaaacttttaactaaatcccagagagaagccagagccagagccgaagctactcttaaactgctacaagctcagggtgttgaagtgccatcaaaagactctttgccaaagaagaggccaatttatgaagataaaaagaggaaaaaaataccacagcagctagaaagtaaagaagtgtctgaatcaatggaattatgtgctgctgtagaagttatggaacaaggagtaccagaaaaggaagagacaccacctcctgttgaaccagaagaagaagaagatactgaggatgctggattggatgattgggaagctatggccagtgatgaggagacagaaaaagtagaaggaaacacagttcatatagaagtaaaagaaaaccctgaagaggaggaggaggaggaagaagaggaagaagaagatgaagaaagtgaagaagaggaggaagaggagggagaaagtgaaggcagtgaaggtgatgaggaagatgaaaaggtgtcagatgagaaggattcagggaagacattagataaaaagccaagtaaagaaatgagctcagattctgaatatgactctgatgatgatcggactaaagaagaaagggcttatgacaaagcaaaacggaggattgagaaacggcgacttgaacatagtaaaaatgtaaacaccgaaaagctaagagcccctattatctgcgtacttgggcatgtggacacagggaagacaaaaattctagataagctccgtcacacacatgtacaagacggtgaagcaggtggtatcacacaacaaattggggccaccaatgttcctcttgaagctattaatgaacagactaagatgattaaaaattttgatagagagaatgtacggattccaggaatgctaattattgatactcctgggcatgaatctttcagtaatctgagaaatagaggaagctctctttgtgacattgccattttagttgttgatattatgcatggtttggagccccagacaattgagtctatcaaccttctcaaatctaaaaaatgtcccttcattgttgcactcaataagattgataggttatatgattggaaaaagagtcctgactctgatgtggctgctactttaaagaagcagaaaaagaatacaaaagatgaatttgaggagcgagcaaaggctattattgtagaatttgcacagcagggtttgaatgctgctttgttttatgagaataaagatccccgcacttttgtgtctttggtacctacctctgcacatactggtgatggcatgggaagtctgatctaccttcttgtagagttaactcagaccatgttgagcaagagacttgcacactgtgaagagctgagagcacaggtgatggaggttaaagctctcccggggatgggcaccactatagatgtcatcttgatcaatgggcgtttgaaggaaggagatacaatcattgttcctggagtagaagggcccattgtaactcagattcgaggcctcctgttacctcctcctatgaaggaattacgagtgaagaaccagtatgaaaagcataaagaagtagaagcagctcagggggtaaagattcttggaaaagacctggagaaaacattggctggtttacccctccttgtggcttataaagaagatgaaatccctgttcttaaagatgaattgatccatgagttaaagcagacactaaatgctatcaaattagaagaaaaaggagtctatgtccaggcatctacactgggttctttggaagctctactggaatttctgaaaacatcagaagtgccctatgcaggaattaacattggcccagtgcataaaaaagatgttatgaaggcttcagtgatgttggaacatgaccctcagtatgcagtaattttggccttcgatgtgagaattgaacgagatgcacaagaaatggctgatagtttaggagttagaatttttagtgcagaaattatttatcatttatttgatgcctttacaaaatatagacaagactacaagaaacagaaacaagaagaatttaagcacatagcagtatttccctgcaagataaaaatcctccctcagtacatttttaattctcgagatccgatagtgatgggggtgacggtggaagcaggtcaggtgaaacaggggacacccatgtgtgtcccaagcaaaaattttgttgacatcggaatagtaacaagtattgaaataaaccataaacaagtggatgttgcaaaaaaaggacaagaagtttgtgtaaaaatagaacctatccctggtgagtcacccaaaatgtttggaagacattttgaagctacagatattcttgttagtaagatcagccggcagtccattgatgcactcaaagactggttcagagatgaaatgcagaagagtgactggcagcttattgtggagctgaagaaagtatttgaaatcatctaattttttcacatggagcaggaactggagtaaatgcaatactgtgttgtaatatcccaacaaaaatcagacaaaaaatggaacagacgtatttggacactgatggacttaagtatggaaggaagaaaaataggtgtataaaatgttttccatgagaaaccaagaaacttacactggtttgacagtggtcagttacatgtccccacagttccaatgtgcctgttcactcacctctcccttccccaacccttctctacttggctgctgttttaaagtttgcccttccccaaatttggatttttattacagatctaaagctctttcgattttatactgattaaatcagtactgcagtatttgattaacca

SEQ ID NO: 365801 - DNA, 3845 bp, Homo sapiens
tgagccgcgccctgcgtcctcacgccgaggcggctgggcgatgcgcttgcgcactgagaactgacaccatatgtgtcctgttccagtgcgcgggtctgtggagagccgggtgcgagcggcggcagcacgaggggaaaagagctgagcggagaccaaagtcagccgggagacagtgggtctgtgagagaccgaatagaggggctggggccacgagcgccattgacaagcaatggggaagaaacagaaaaacaagagcgaagacagcaccaaggatgacattgatcttgatgccttggctgcagaaatagaaggagctggtgctgccaaagaacaggagcctcaaaagtcaaaagggaaaaagaaaaaagagaaaaaaaagcaggactttgaaaaaaacagagttttgatgataatgatagcgaagaattggaagataaagattcaaaatcaaaaaagactgcaaaaccgaaagtggaaatgtactctgggagtgatgatgatgatgattttaacaaacttcctaaaaaagctaaagggaaagctcaaaaatcaaataagaagtgggatgggtcagaggaggatgaggataacagtaaaaaaattaaagagcgttcaagaataaattcttctggtgaaagtggtgatgaatcagatgaatttttgcaatctagaaaaggacagaaaaaaaatcagaaaaacaagccaggtcctaacatagaaagtgggaatgaagatgatgacgcctccttcaaaattaagacagtggcccaaaagaaggcagaaaagaaggaggaagaaaaagagaaagagaagaaaaaaggacctagcaaagccactgttaaagctatgcaagaagctctggctaagcttaaagaggaagaagaaagacagaagagagaagaggaagaacgtataaaacggcttgaagaattagaagccaagcgtaaagaagaggaacgattggaacaagaaaaaagagaaaggaaaaagcaaaaagaaaaagaaagaaaagaacgcttgaaaaaagaagggaaacttttaactaaatcccagagagaagccagagccagagccgaagctactcttaaactgctacaagctcagggtgttgaagtgccatcaaaagactctttgccaaagaagaggccaatttatgaagataaaaagaggaaaaaaataccacagcagctagaaagtaaagaagtgtctgaatcaatggaattatgtgctgctgtagaagttatggaacaaggagtaccagaaaaggaagagacaccacctcctgttgaaccagaagaagaagaagatactgaggatgctggattggatgattgggaagctatggccagtgatgaggagacagaaaaagtagaaggaaacacagttcatatagaagtaaaagaaaaccctgaagaggaggaggaggaggaagaagaggaagaagaagatgaagaaagtgaagaagaggaggaagaggagggagaaagtgaaggcagtgaaggtgatgaggaagatgaaaaggtgtcagatgagaaggattcagggaagacattagataaaaagccaagtaaagaaatgagctcagattctgaatatgactctgatgatgatcggactaaagaagaaagggcttatgacaaagcaaaacggaggattgagaaacggcgacttgaacatagtaaaaatgtaaacaccgaaaagctaagagcccctattatctgcgtacttgggcatgtggacacagggaagacaaaaattctagataagctccgtcacacacatgtacaagacggtgaagcaggtggtatcacacaacaaattggggccaccaatgttcctcttgaagctattaatgaacagactaagatgattaaaaattttgatagagagaatgtacggattccaggaatgctaattattgatactcctgggcatgaatctttcagtaatctgagaaatagaggaagctctctttgtgacattgccattttagttgttgatattatgcatggtttggagccccagacaattgagtctatcaaccttctcaaatctaaaaaatgtcccttcattgttgcactcaataagattgataggttatatgattggaaaaagagtcctgactctgatgtggctgctactttaaagaagcagaaaaagaatacaaaagatgaatttgaggagcgagcaaaggctattattgtagaatttgcacagcagggtttgaatgctgctttgttttatgagaataaagatccccgcacttttgtgtctttggtacctacctctgcacatactggtgatggcatgggaagtctgatctaccttcttgtagagttaactcagaccatgttgagcaagagacttgcacactgtgaagagctgagagcacaggtgatggaggttaaagctctcccggggatgggcaccactatagatgtcatcttgatcaatgggcgtttgaaggaaggagatacaatcattgttcctggagtagaagggcccattgtaactcagattcgaggcctcctgttacctcctcctatgaaggaattacgagtgaagaaccagtatgaaaagcataaagaagtagaagcagctcagggggtaaagattcttggaaaagacctggagaaaacattggctggtttacccctccttgtggcttataaagaagatgaaatccctgttcttaaagatgaattgatccatgagttaaagcagacactaaatgctatcaaattagaagaaaaaggagtctatgtccaggcatctacactgggttctttggaagctctactggaatttctgaaaacatcagaagtgccctatgcaggaattaacattggcccagtgcataaaaaagatgttatgaaggcttcagtgatgttggaacatgaccctcagtatgcagtaattttggccttcgatgtgagaattgaacgagatgcacaagaaatggctgatagtttaggagttagaatttttagtgcagaaattatttatcatttatttgatgcctttacaaaatatagacaagactacaagaaacagaaacaagaagaatttaagcacatagcagtatttccctgcaagataaaaatcctccctcagtacatttttaattctcgagatccgatagtgatgggggtgacggtggaagcaggtcaggtgaaacaggggacacccatgtgtgtcccaagcaaaaattttgttgacatcggaatagtaacaagtattgaaataaaccataaacaagtggatgttgcaaaaaaaggacaagaagtttgtgtaaaaatagaacctatccctggtgagtcacccaaaatgtttggaagacattttgaagctacagatattcttgttagtaagatcagccggcagtccattgatgcactcaaagactggttcagagatgaaatgcagaagagtgactggcagcttattgtggagctgaagaaagtatttgaaatcatctaattttttcacatggagcaggaactggagtaaatgcaatactgtgttgtaatatcccaacaaaaatcagacaaaaaatggaacagacgtatttggacactgatggacttaagtatggaaggaagaaaaataggtgtataaaatgttttccatgagaaaccaagaaacttacactggtttgacagtggtcagttacatgtccccacagttccaatgtgcctgttcactcacctctcccttccccaacccttctctacttggctgctgttttaaagtttgcccttccccaaatttggatttttattacagatctaaagctctttcgattttatactgattaaatcagtactgcagtatttgattaacca

SEQ ID NO: 365802 - DNA, 1431 bp, Homo sapiens
tgagccgcgccctgcgtcctcacgccgaggcggctgggcgatgcgcttgcgcactgagaactgacaccatatgtgtcctgttccagtgcgcgggtctgtggagagccgggtgcgagcggcggcagcacgaggggaaaagagctgagcggagaccaaagtcagccgggagacagtgggtctgtgagagaccgaatagaggggctggggccacgagcgccattgacaagcaatggggaagaaacagaaaaacaagagcgaagacagcaccaaggatgacattgatcttgatgccttggctgcagaaatagaaggagctggtgctgccaaagaacaggagcctcaaaagtcaaaagggaaaaagaaaaaagagaaaaaaaagcaggactttgatgaagatgatatcctgaaagaactggaagaattgtctttggaagctcaaggcatcaaagctgacagagaaactgttgcagtgaagccaacagaaaacaatgaagaggaattcacctcaaaagataaaaaaaagaaaggacagaagggcaaaaaacagagttttgatgataatgatagcgaagaattggaagataaagattcaaaatcaaaaaagactgcaaaaccgaaagtggaaatgtactctgggagtgatgatgatgatgattttaacaaacttcctaaaaaagctaaagggaaagctcaaaaatcaaataagaagtgggatgggtcagaggaggatgaggataacagtaaaaaaattaaagagcgttcaagaataaattcttctggtgaaagtggtgatgaatcagatgaatttttgcaatctagaaaaggacagaaaaaaaatcagaaaaacaagccaggtcctaacatagaaagtgggaatgaagatgatgacgcctccttcaaaattaagacagtggcccaaaagaaggcagaaaagaaggagcgcgagagaaaaaagcgagatgaagaaaaagcgaaactgcggaagctgaaagaaaaagaagagttagaaacaggtaaaaaggatcagagtaaacaaaaggaatctcaaaggaaatttgaagaagaaactgtaaaatccaaagtgactgttgatactggagtaattcctgcctctgaagagaaagcagagactcccacagctgcagaagacgacagaaggggacaaaaagaagaaagataagaagaaaaagaaaggagaaaaggaagaaaaagagaaagagaagaaaaaaggacctagcaaagccactgttaaagctatgcaagaagctctggctaagcttaaagaggaagaagaaagacagaagagagaagaggaagaacgtataaaacggcttgaagaattagaagccaagcgtaaagaagaggaacgattggaacatgatattataatagataaaaaataaaaaaaggtcgtatcgatgtcgagctatc

SEQ ID NO: 365803 - DNA, 2540 bp, Homo sapiens
accacgcgtcgcggacgcgtgggtcgacccacgcggtcggccagtgatgaggagacagaaaaagtagaaggaaacacagttcatatagaagtaaaagaaaaccctgaagaggaggaggaggaggaagaagaggaagaagaagatgaagaaagtgaagaagaggaggaagaggagggagaaagtgaaggcagtgaaggtgatgaggaagatgaaaaggtgtcagatgagaaggattcagggaagacattagataaaaagccaagtaaagaaatgagctcagattctgaatatgactctgatgatgatcggactaaagaagaaagggcttatgacaaagcaaaacggaggattgagaaacggcgacttgaacatagtaaaaatgtaaacaccgaaaagctaagagcccctattatctgcgtacttgggcatgtggacacagggaagacaaaaattctagataagctccgtcacacacatgtacaagacggtgaagcaggtggtatcacacaacaaattggggccaccaatgttcctcttgaagctattaatgaacagactaagatgattaaaaattttgatagagagaatgtacggattccaggaatgctaattattgatactcctgggcatgaatctttcagtaatctgagaaatagaggaagctctctttgtgacattgccattttagttgttgatattatgcatggtttggagccccagacaattgagtctatcaaccttctcaaatctaaaaaatgtcccttcattgttgcactcaataagattgataggttatatgattggaaaaagagtcctgactctgatgtggctgctactttaaagaagcagaaaaagaatacaaaagatgaatttgaggagcgagcaaaggctattattgtagaatttgcacagcagggtttgaatgctgctttgttttatgagaataaagatccccgcacttttgtgtctttggtacctacctctgcacatactggtgatggcatgggaagtctgatctaccttcttgtagagttaactcagaccatgttgagcaagagacttgcacactgtgaagagctgagagcacaggtgatggaggttaaagctctcccggggatgggcaccactatagatgtcatcttgatcaatgggcgtttgaaggaaggagatacaatcattgttcctggagtagaagggcccattgtaactcagattcgaggcctcctgttacctcctcctatgaaggaattacgagtgaagaaccagtatgaaaagcataaagaagtagaagcagctcagggggtaaagattcttggaaaagacctggagaaaacattggctggtttacccctccttgtggcttataaagaagatgaaatccctgttcttaaagatgaattgatccatgagttaaagcagacactaaatgctatcaaattagaagaaaaaggagtctatgtccaggcatctacactgggttctttggaagctctactggaatttctgaaaacatcagaagtgccctatgcaggaattaacattggcccagtgcataaaaaagatgttatgaaggcttcagtgatgttggaacatgaccctcagtatgcagtaattttggccttcgatgtgagaattgaacgagatgcacaagaaatggctgatagtttaggagttagaatttttagtgcagaaattatttatcatttatttgatgcctttacaaaatatagacaagactacaagaaacagaaacaagaagaatttaagcacatagcagtatttccctgcaagataaaaatcctccctcagtacatttttaattctcgagatccgatagtgatgggggtgacggtggaagcaggtcaggtgaaacaggggacacccatgtgtgtcccaagcaaaaattttgttgacatcggaatagtaacaagtattgaaataaaccataaacaagtggatgttgcaaaaaaaggacaagaagtttgtgtaaaaatagaacctatccctggtgagtcacccaaaatgtttggaagacattttgaagctacagatattcttgttagtaagatcagccggcagtccattgatgcactcaaagactggttcagagatgaaatgcagaagagtgactggcagcttattgtggagctgaagaaagtatttgaaatcatctaattttttcacatggagcaggaactggagtaaatgcaatactgtgttgtaatatcccaacaaaaatcagacaaaaaatggaacagacgtatttggacactgatggacttaagtatggaaggaagaaaaataggtgtataaaatgttttccatgagaaaccaagaaacttacactggtttgacagtggtcagttacatgtccccacagttccaatgtgcctgttcactcacctctcccttccccaacccttctctacttggctgctgttttaaagtttgcccttccccaaatttggatttttattacagatctaaagctctttcgattttatactgattaaatcagtactgcagtatttgattaacca

SEQ ID NO: 365804 - DNA, 2187 bp, Homo sapiens
ttagtagagactgggtttcaccatgttggtcaggctggtctcgaactcctgacctcaagtgatcctcctgcctcggcctcccaaagtgctgggattacaggcgtgagccaccgtgcccggcccatgtctgtctgtcttgatgtgtgagcagcagctgtggtcattaaaccattagtttacccctctagaactggggtctgcaaactcccacctgcagccaaatctggcccacctcctttttaatgtaagggctgtgagagtggtttttactttttttatgaatctttctaatctgagaaatagaggaagctctctttgtgacattgccattttagttgttgatattatgcatggtttggagccccagacaattgagtctatcaaccttctcaaatctaaaaaatgtcccttcattgttgcactcaataagattgataggttatatgattggaaaaagagtcctgactctgatgtggctgctactttaaagaagcagaaaaagaatacaaaagatgaatttgaggagcgagcaaaggctattattgtagaatttgcacagcagggtttgaatgctgctttgttttatgagaataaagatccccgcacttttgtgtctttggtacctacctctgcacatactggtgatggcatgggaagtctgatctaccttcttgtagagttaactcagaccatgttgagcaagagacttgcacactgtgaagagctgagagcacaggtgatggaggttaaagctctcccggggatgggcaccactatagatgtcatcttgatcaatgggcgtttgaaggaaggagatacaatcattgttcctggagtagaagggcccattgtaactcagattcgaggcctcctgttacctcctcctatgaaggaattacgagtgaagaaccagtatgaaaagcataaagaagtagaagcagctcagggggtaaagattcttggaaaagacctggagaaaacattggctggtttacccctccttgtggcttataaagaagatgaaatccctgttcttaaagatgaattgatccatgagttaaagcagacactaaatgctatcaaattagaagaaaaaggagtctatgtccaggcatctacactgggttctttggaagctctactggaatttctgaaaacatcagaagtgccctatgcaggaattaacattggcccagtgcataaaaaagatgttatgaaggcttcagtgatgttggaacatgaccctcagtatgcagtaattttggccttcgatgtgagaattgaacgagatgcacaagaaatggctgatagtttaggagttagaatttttagtgcagaaattatttatcatttatttgatgcctttacaaaatatagacaagactacaagaaacagaaacaagaagaatttaagcacatagcagtatttccctgcaagataaaaatcctccctcagtacatttttaattctcgagatccgatagtgatgggggtgacggtggaagcaggtcaggtgaaacaggggacacccatgtgtgtcccaagcaaaaattttgttgacatcggaatagtaacaagtattgaaataaaccataaacaagtggatgttgcaaaaaaaggacaagaagtttgtgtaaaaatagaacctatccctggtgagtcacccaaaatgtttggaagacattttgaagctacagatattcttgttagtaagatcagccggcagtccattgatgcactcaaagactggttcagagatgaaatgcagaagagtgactggcagcttattgtggagctgaagaaagtatttgaaatcatctaattttttcacatggagcaggaactggagtaaatgcaatactgtgttgtaatatcccaacaaaaatcagacaaaaaatggaacagacgtatttggacactgatggacttaagtatggaaggaagaaaaataggtgtataaaatgttttccatgagaaaccaagaaacttacactggtttgacagtggtcagttacatgtccccacagttccaatgtgcctgttcactcacctctcccttccccaacccttctctacttggctgctgttttaaagtttgcccttccccaaatttggatttttattacagatctaaagctctttcgattttatactgattaaatcagtactgcagtatttgattaacca

SEQ ID NO: 365805 - DNA, 789 bp, Homo sapiens
cagagaaatcaatacaatagagattatattaataagagtaacatacaaagctataattaagatgaagtaatgaaagccaaaacattaaaattttaaaacttgcttgttacttgttagaaccagtactacactagaagttaggtaatatatacaactattttcaagtagtttacttatgttgctctaacatgtcctcttcaccagtgcactgttaaactaatcaaaaactctacacacgtatattccacacgtcataggtgagtcacccaaaatgtttggaagacattttgaagctacagatattcttgttagtaagatcagccggcagtccattgatgcactcaaagactggttcagagatgaaatgcagaagagtgactggcagcttattgtggagctgaagaaagtatttgaaatcatctaattttttcacatggagcaggaactggagtaaatgcaatactgtgttgtaatatcccaacaaaaatcagacaaaaaatggaacagacgtatttggacactgatggacttaagtatggaaggaagaaaaataggtgtataaaatgttttccatgagaaaccaagaaacttacactggtttgacagtggtcagttacatgtccccacagttccaatgtgcctgttcactcacctctcccttccccaacccttctctacttggctgctgttttaaagtttgcccttccccaaatttggatttttattacagatctaaagctctttcgattttatactgattaaatcagtactgcagtatttgattaacca

SEQ ID NO: 365806 - DNA, 664 bp, Homo sapiens
tttctttttcccttttgacttttgaggctactcttaaactgctacaagctcagggtgttgaagtgccatcaaaagactctttgccaaagaagaggccaatttatgaagataaaaagaggaaaaaaataccacagcagctagaaagtaaagaagtgtctgaatcaatggaattatgtgctgctgtagaagttatggaacaaggagtaccagaaaaggaagagacaccacctcctgttgaaccagaagaagaagaagatactgaggatgctggattggatgattgggaagctatggccagtgatgaggagacagaaaaagaagagcgaagacagcaccaaggatgacattgatcttgatgccttggctgcagaaatagaaggagctggtgctgccaaagaacaggagcctcaaaagtcaaaagggaaaaagagataagagaaataaaagcaggactttgatgaagatgatatcctgaaagaactggaagaattgtctttggaagctcaaggcatcaaagctgacagagaaactgttgcagtgaagccaacagaaaacaatgaagaggaattcacctcaaaagataaaaaaaagagacagaagggcaaacagagtttgatgataatgatgcgaattggcctgttgtagaaggtatcacaacacgatt

SEQ ID NO: 365807 - DNA, 101 bp, Homo sapiens
acacaacaaattggggccaccaatgttcctcttgaagctattaatgaacagactaagatgattaaaaatgtaagtacattgtatttcatgtattttaatct

SEQ ID NO: 365808 - DNA, 135 bp, Homo sapiens
gaaaaagcaaaaagaaaaagaaagaaaagaacgcttgaaaaaagaagggaaacttttaactaaatcccagagagaagccagagccagagccgaagctactcttaaactgctacaagctcagggtgagtggtactc

SEQ ID NO: 365809 - DNA, 593 bp, Homo sapiens
cctgaatctttttctccacaaaggagtcagggttttttgccccaaactctgagatcacatcactcatctgctcacaggccatcattcttaaaatttcaggattggtcctcactctgacttcattcccatcagccacttcaagctcattcctgactcagaccctttgtgcctgctgatccctcctattacggcacctgtcacgtgaaatggtagagcaaaaataggaaatgacattgggtcaacagggcacttggaatgttttgcaaagcacattatctcctgtcattcttacaaccatcatgaagggaatagggtgttggtggtgccagcctagtttaccaaaatgttacaccgtgagtgatgaaaggatcgcactgccatgacttttaaaacaggcttttgctctagttcttacttcagctatccagccatggcgcctgtgattggcatgaattcttctgcatgcattttaatttgttcttattttatagtttgttgacatcggaatagtaacaagtattgaaataaaccataaacaagtggatgttgcaaaaaaaggacaagaagtttgtgtaaaaatagaacctatccct

SEQ ID NO: 365810 - DNA, 934 bp, Homo sapiens
  misc_feature (910)..(910): n is a, c, g, or t
  misc_feature (934)..(934): n is a, c, g, or t
tgagccgcgccctgcgtcctcacgccgaggcggctgggcgatgcgcttgcgcactgagaactgacaccatatgtgtcctgttccagtgcgcgggtctgtggagagccgggtgcgagcggcggcagcacgaggggaaaagagctgagcggagaccaaagtcagccgggagacagtgggtctgtgagagaccgaatagaggggctggggccacgagcgccattgacaagcaatggggaagaaacagaaaaacaagagcgaagacagcaccaaggatgacattgatcttgatgccttggctgcagaaatagaaggagctggtgctgccaaagaacaggagcctcaaaagtcaaaagggaaaaagaaaaaagagaaaaaaaagcaggactttgatgaagatgatatcctgaaagaactggaagaattgtctttggaagctcaaggcatcaaagctgacagagaaactgttgcagtgaagccaacagaaaacaatgaagaggaattcacctcaaaagataaaaaaaagaaaggacagaagggcaaaaaacagagttttgatgataatgatagcgaagaattggaagataaagattcaaaatcaaaaaagactgcaaaaccgaaagtggaaatgtactctgggagtgatgatgatgatgattttaacaaacttcctaaaaaagctaaagggaaagctcaaaaatcaaataagaagtgggatgggtcagaggaggatgaggataacagtaaaaaaattaaagagcgttcaagaataaattcttctggtgaaagtggtgatgaatcagatgaatttttgcaatctagaaaaggacagaaaatcggaaaaaggcggctaataagggatgagatatgagcccttaataaaggggcagagggaaaaggggggaaagggganaaggacggcggtgaaaagtaacgn

SEQ ID NO: 365811 - DNA, 439 bp, Homo sapiens
caatcgacaaccgagttctcatgactgggaagatagttttcttcaggtgtcaatggcgttagactcccagctgactgaaaacaaggacagtcagccgggagacagtgggtctgtgagagaccgaatagaggggctggggccacgagcgccattgacaagcaatggggaagaaacagaaaaacaagagcgaagacagcaccaaggatgacattgatcttgatgccttggctgcagaaatagaaggagctggtgctgccaaagaacaggagcctcaaaagtcaaaagggaaaaagaaaaaagagaaaaaaaagcaggactttgatgaagatgatatcctgaaagaactggaagaattgtctttggaagctcaaggcatcaaagctgacagagaaactgttgcagtgaagccaacagaaaacaatgaagaggaattcacctc

SEQ ID NO: 365812 - DNA, 188 bp, Homo sapiens
atatatatcgaaaatcatattcaccacttcctacactgggttctttggaagctctactggaatttctgaaaacatcagaagtgccctatgcaggaattaacattggcccagtgcataaaaaagatgttatgaaggcttcagtgatgttggaacatgaccctcagtatgcagtaattttggccttcgat

SEQ ID NO: 365813 - DNA, 1854 bp, Homo sapiens
  misc_feature (1806)..(1806): n is a, c, g, or t
  misc_feature (1809)..(1809): n is a, c, g, or t
tgagccgcgccctgcgtcctcacgccgaggcggctgggcgatgcgcttgcgcactgagaactgacaccatatgtgtcctgttccagtgcgcgggtctgtggagagccgggtgcgagcggcggcagcacgaggggaaaagagctgagcggagaccaaagtcagccgggagacagtgggtctgtgagagaccgaatagaggggctggggccacgagcgccattgacaagcaatggggaagaaacagaaaaacaagagcgaagacagcaccaaggatgacattgatcttgatgccttggctgcagaaatagaaggagctggtgctgccaaagaacaggagcctcaaaagtcaaaagggaaaaagaaaaaagagaaaaaaaagcaggactttgatgaagatgatatcctgaaagaactggaagaattgtctttggaagctcaaggcatcaaagctgacagagaaactgttgcagtgaagccaacagaaaacaatgaagaggaattcacctcaaaagataaaaaaaagaaaggacagaagggcaaaaaacagagttttgatgataatgatagcgaagaattggaagataaagattcaaaatcaaaaaagactgcaaaaccgaaagtggaaatgtactctgggagtgatgatgatgatgattttaacaaacttcctaaaaaagctaaagggaaagctcaaaaatcaaataagaagtgggatgggtcagaggaggatgaggataacagtaaaaaaattaaagagcgttcaagaataaattcttctggtgaaagtggtgatgaatcagatgaatttttgcaatctagaaaaggacagaaaaaaaatcagaaaaacaagccaggtcctaacatagaaagtgggaatgaagatgatgacgcctccttcaaaattaagacagtggcccaaaagaaggcagaaaagaaggagcgcgagagaaaaaagcgagatgaagaaaaagcgaaactgcggaagctgaaagaaaaagaagagttagaaacaggtaaaaaggatcagagtaaacaaaaggaatctcaaaggaaatttgaagaagaaactgtaaaatccaaagtgactgttgatactggagtaattcctgcctctgaagagaaagcagagactcccacagctgcagaagacgacagaaggggacaaaaagaagaaagataagaagaaaaagaaaggagaaaaggaagaaaaagagaaagagaagaaaaaaggacctagcaaagccactgttaaagctatgcaagaagctctggctaagcttaaagaggaagaagaaagacagaagagagaagaggaagaacgtataaaacggcttgaagaattagaagccaagcgtaaagaagaggaacgattggaacaagaaaaaagagaaaggaaaaagcaaaaagaaaaagaaagaaaagaacgcttgaaaaaagaagggaaacttttaactaaatcccagagagaagccagagccagagccgaagctactcttaaactgctacaagctcagggtgttgaagtgccatcaaaagactctttgccaaagaagaggccaatttatgaagataaaaagaggaaaaaaataccacagcagctagaaagtaaagaagtgtctgaatcaatggaattatgtgctgctgtagaagttatggaacaaggagtaccagaaaaggaagagacaccacctcctgttgaaccagaagaagaagaagatactgaggatgctggattggatgattgggaagctatggccagtgatgaggagacagaaaaagtagaaggaaacacagttcatatagaanatnaagcgttgagggggatacctctagagatcgaccatcagccaatca

SEQ ID NO: 365814 - DNA, 3564 bp, Homo sapiens
  misc_feature (2993)..(2993): n is a, c, g, or t
  misc_feature (3201)..(3201): n is a, c, g, or t
tgagccgcgccctgcgtcctcacgccgaggcggctgggcgatgcgcttgcgcactgagaactgacaccatatgtgtcctgttccagtgcgcgggtctgtggagagccgggtgcgagcggcggcagcacgaggggaaaagagctgagcggagaccaaagtcagccgggagacagtgggtctgtgagagaccgaatagaggggctggggccacgagcgccattgacaagcaatggggaagaaacagaaaaacaagagcgaagacagcaccaaggatgacattgatcttgatgccttggctgcagaaatagaaggagctggtgctgccaaagaacaggagcctcaaaagtcaaaagggaaaaagaaaaaagagaaaaaaaagcaggactttgatgaagatgatatcctgaaagaactggaagaattgtctttggaagctcaaggcatcaaagctgacagagaaactgttgcagtgaagccaacagaaaacaatgaagaggaattcacctcaaaagataaaaaaaagaaaggacagaagggcaaaaaacagagttttgatgataatgatagcgaagaattggaagataaagattcaaaatcaaaaaagactgcaaaaccgaaagtggaaatgtactctgggagtgatgatgatgatgattttaacaaacttcctaaaaaagctaaagggaaagctcaaaaatcaaataagaagtgggatgggtcagaggaggatgaggataacagtaaaaaaattaaagagcgttcaagaataaattcttctggtgaaagtggtgatgaatcagatgaatttttgcaatctagaaaaggacagaaaaaaaatcagaaaaacaagccaggtcctaacatagaaagtgggaatgaagatgatgacgcctccttcaaaattaagacagtggcccaaaagaaggcagaaaagaaggagcgcgagagaaaaaagcgagatgaagaaaaagcgaaactgcggaagctgaaagaaaaagaagagttagaaacaggtaaaaaggatcagagtaaacaaaaggaatctcaaaggaaatttgaagaagaaactgtaaaatccaaagtgactgttgatactggagtaattcctgcctctgaagagaaagcagagactcccacagctgcagaagacgacagaaggggacaaaaagaagaaagataagaagaaaaagaaaggagaaaaggaagaaaaagagaaagagaagaaaaaaggacctagcaaagccactgttaaagctatgcaagaagctctggctaagcttaaagaggaagaagaaagacagaagagagaagaggaagaacgtataaaacggcttgaagaattagaagccaagcgtaaagaagaggaacgattggaacaagaaaaaagagaaaggaaaaagcaaaaagaaaaagaaagaaaagaacgcttgaaaaaagaagggaaacttttaactaaatcccagagagaagccagagccagagccgaagctactcttaaactgctacaagctcagggtgttgaagtgccatcaaaagactctttgccaaagaagaggccaatttatgaagataaaaagaggaaaaaaataccacagcagctagaaagtaaagaagtgtctgaatcaatggaattatgtgctgctgtagaagttatggaacaaggagtaccagaaaaggaagagacaccacctcctgttgaaccagcaagaagacagaagcatactgcaggatgcaggcatcacaccagctcacacacacaccattcaacacgagccgttcgacagcacatcaaacttccttcctgcgtgcaacagctgcgtgcatgcacatccaggatgcaatctgcgagcaaaatcataggcgacacagcgcaccagaaaacaacacagagcaaacacacacacacagtggcagcgccagcgtcccccttatatataaccagcctcatccttctatgaatatctatccatgacacacaaatatgcgcccacacatatctctcatatcgagaccacagccgaaccatgtcgcccgcaccctgacacgcgcgcacctcagcacacaccacctcaccaccacgcacccccacacgacataacaccctggagacgccaagaacaccaccgtctggcccccaccctccggagacacaacaaaagatcacaccgccgacggcctcaacgtaccaccagcacgatgcaacacccatcacccacgccacagcacagacagcccgacgaacccatagaccacaccgagctaagcaaccaaccgcgcacagaaagaaccaggtaataggaagcagccgataagcactagaaacaccggcaacgagcgacccaggagaaacaaagccgcaatttccatagccagaagataggtaagcaagagcagggagacacgcgaggccgagcacacagcagatcctactatgacagaggacaagaagcggcaacgcacacgaacgacaaccgaaacggaggagacagccgagtgcgtcgcgtagccaccgaacgtttaggcgtatgcagtagtccgcggcctcaaccaacaagcagctagcaggaacaagagacgagcaccgacaacatatattcatacgacatcacatgaatactcaagacttccagctaaaatctatgagactctcgctaacatcaccatacatcactcgctatcggtcaatgcaactacacaacacaattataaaataccaatgacaacatactaacatcatcaacttcacactactcatcaacaccactccacgcacatcaacccagatactccacagcactaatagagctcacatccacaagccacagatctatcatttcactactcaacacacagaaatcaccatacaacgtacacagcatcttgcatcgaactccgatcagtctcaccggcgcagcataccacatcatcaaactcacgaactgctctccagcaaagatacatacgacacacacaatacgatcactcacaccacnactcgacacaatccagtaaattgctacacacgaccgagtgacagatcatcacaccacttcatcatcatagatctacacgatcaacgacggctacgcaaccacgacaagactagatcacaaccaccacatacatcactaacatacaccagcagcatacagtcactaggtgactaccatcaagatcactcgctcgttacagcgtaccagncgcatgtgtcgactcgagactaacagtcatagaaccattacagaggacgaagctcacgcacactcacctgcaagcgttaccagcactatcgactctcattctatgcaatgtgtaatctaaccacttcaatgtcaactattacactacgcgctaattcgatactcaactcaacgtgactacagctgtgatccaaacagcatctactcgatgcactcttcatcacactagctatacagtccacctacagctcgcagtcactactcgacttaccactattcagctcagagtctatgctgcctaacacgcataacatccgtctagaacatatatcgagcgagaaagcacagccaatgaacccacatg

SEQ ID NO: 365815 - DNA, 3148 bp, Homo sapiens
cctactactactatacgggggcgagaagacgacagaaggggacgacagaaggggacaaaaagaagaaagataagaagaaaaagaaaggagaaaaggaagaaaaagagaaagagaagaaaaaaggacctagcaaagccactgttaaagctatgcaagaagctctggctaagcttaaagaggaagaagaaagacagaagagagaagaggaagaacgtataaaacggcttgaagaattagaagccaagcgtaaagaagaggaacgattggaacaagaaaaaagagaaaggaaaaagcaaaaagaaaaagaaagaaaagaacgcttgaaaaaagaagggaaacttttaactaaatcccagagagaagccagagccagagccgaagctactcttaaactgctacaagctcagggtgttgaagtgccatcaaaagactctttgccaaagaagaggccaatttatgaagataaaaagaggaaaaaaataccacagcagctagaaagtaaagaagtgtctgaatcaatggaattatgtgctgctgtagaagttatggaacaaggagtaccagaaaaggaagagacaccacctcctgttgaaccagaagaagaagaagatactgaggatgctggattggatgattgggaagctatggccagtgatgaggagacagaaaaagtagaaggaaacacagttcatatagaagtaaaagaaaaccctgaagaggaggaggaggaggaagaagaggaagaagaagatgaagaaagtgaagaagaggaggaagaggagggagaaagtgaaggcagtgaaggtgatgaggaagatgaaaaggtgtcagatgagaaggattcagggaagacattagataaaaagccaagtaaagaaatgagctcagattctgaatatgactctgatgatgatcggactaaagaagaaagggcttatgacaaagcaaaacggaggattgagaaacggcgacttgaacatagtaaaaatgtaaacaccgaaaagctaagagcccctattatctgcgtacttgggcatgtggacacagggaagacaaaaattctagataagctccgtcacacacatgtacaagacggtgaagcaggtggtatcacacaacaaattggggccaccaatgttcctcttgaagctattaatgaacagactaagatgattaaaaattttgatagagagaatgtacggattccaggaatgctaattattgatactcctgggcatgaatctttcagtaatctgagaaatagaggaagctctctttgtgacattgccattttagttgttgatattatgcatggtttggagccccagacaattgagtctatcaaccttctcaaatctaaaaaatgtcccttcattgttgcactcaataagattgataggttatatgattggaaaaagagtcctgactctgatgtggctgctactttaaagaagcagaaaaagaatacaaaagatgaatttgaggagcgagcaaaggctattattgtagaatttgcacagcagggtttgaatgctgctttgttttatgagaataaagatccccgcacttttgtgtctttggtacctacctctgcacatactggtgatggcatgggaagtctgatctaccttcttgtagagttaactcagaccatgttgagcaagagacttgcacactgtgaagagctgagagcacaggtgatggaggttaaagctctcccggggatgggcaccactatagatgtcatcttgatcaatgggcgtttgaaggaaggagatacaatcattgttcctggagtagaagggcccattgtaactcagattcgaggcctcctgttacctcctcctatgaaggaattacgagtgaagaaccagtatgaaaagcataaagaagtagaagcagctcagggggtaaagattcttggaaaagacctggagaaaacattggctggtttacccctccttgtggcttataaagaagatgaaatccctgttcttaaagatgaattgatccatgagttaaagcagacactaaatgctatcaaattagaagaaaaaggagtctatgtccaggcatctacactgggttctttggaagctctactggaatttctgaaaacatcagaagtgccctatgcaggaattaacattggcccagtgcataaaaaagatgttatgaaggcttcagtgatgttggaacatgaccctcagtatgcagtaattttggccttcgatgtgagaattgaacgagatgcacaagaaatggctgatagtttaggagttagaatttttagtgcagaaattatttatcatttatttgatgcctttacaaaatatagacaagactacaagaaacagaaacaagaagaatttaagcacatagcagtatttccctgcaagataaaaatcctccctcagtacatttttaattctcgagatccgatagtgatgggggtgacggtggaagcaggtcaggtgaaacaggggacacccatgtgtgtcccaagcaaaaattttgttgacatcggaatagtaacaagtattgaaataaaccataaacaagtggatgttgcaaaaaaaggacaagaagtttgtgtaaaaatagaacctatccctggtgagtcacccaaaatgtttggaagacattttgaagctacagatattcttgttagtaagatcagccggcagtccattgatgcactcaaagactggttcagagatgaaatgcagaagagtgactggcagcttattgtggagctgaagaaagtatttgaaatcatctaattttttcacatggagcaggaactggagtaaatgcaatactgtgttgtaatatcccaacaaaaatcagacaaaaaatggaacagacgtatttggacactgatggacttaagtatggaaggaagaaaaataggtgtataaaatgttttccatgagaaaccaagaaacttacactggtttgacagtggtcagttacatgtccccacagttccaatgtgcctgttcactcacctctcccttccccaacccttctctacttggctgctgttttaaagtttgcccttccccaaatttggatttttattacagatctaaagctctttcgattttatactgattaaatcagtactgcagtatttgattaacca

SEQ ID NO: 365816 - DNA, 3371 bp, Homo sapiens
tgagccgcgccctgcgtcctcacgccgaggcggctgggcgatgcgcttgcgcactgagaactgacaccatatgtgtcctgttccagtgcgcgggtctgtggagagccgggtgcgagcggcggcagcacgaggggaaaagagctgagcggagaccaaagtcagccgggagacagtgggtctgtgagagaccgaatagaggggctggggccacgagcgccattgacaagcaatggggaagaaacagaaaaacaagagcgaagacagacgacagaaggggacaaaaagaagaaagataagaagaaaaagaaaggagaaaaggaagaaaaagagaaagagaagaaaaaaggacctagcaaagccactgttaaagctatgcaagaagctctggctaagcttaaagaggaagaagaaagacagaagagagaagaggaagaacgtataaaacggcttgaagaattagaagccaagcgtaaagaagaggaacgattggaacaagaaaaaagagaaaggaaaaagcaaaaagaaaaagaaagaaaagaacgcttgaaaaaagaagggaaacttttaactaaatcccagagagaagccagagccagagccgaagctactcttaaactgctacaagctcagggtgttgaagtgccatcaaaagactctttgccaaagaagaggccaatttatgaagataaaaagaggaaaaaaataccacagcagctagaaagtaaagaagtgtctgaatcaatggaattatgtgctgctgtagaagttatggaacaaggagtaccagaaaaggaagagacaccacctcctgttgaaccagaagaagaagaagatactgaggatgctggattggatgattgggaagctatggccagtgatgaggagacagaaaaagtagaaggaaacacagttcatatagaagtaaaagaaaaccctgaagaggaggaggaggaggaagaagaggaagaagaagatgaagaaagtgaagaagaggaggaagaggagggagaaagtgaaggcagtgaaggtgatgaggaagatgaaaaggtgtcagatgagaaggattcagggaagacattagataaaaagccaagtaaagaaatgagctcagattctgaatatgactctgatgatgatcggactaaagaagaaagggcttatgacaaagcaaaacggaggattgagaaacggcgacttgaacatagtaaaaatgtaaacaccgaaaagctaagagcccctattatctgcgtacttgggcatgtggacacagggaagacaaaaattctagataagctccgtcacacacatgtacaagacggtgaagcaggtggtatcacacaacaaattggggccaccaatgttcctcttgaagctattaatgaacagactaagatgattaaaaattttgatagagagaatgtacggattccaggaatgctaattattgatactcctgggcatgaatctttcagtaatctgagaaatagaggaagctctctttgtgacattgccattttagttgttgatattatgcatggtttggagccccagacaattgagtctatcaaccttctcaaatctaaaaaatgtcccttcattgttgcactcaataagattgataggttatatgattggaaaaagagtcctgactctgatgtggctgctactttaaagaagcagaaaaagaatacaaaagatgaatttgaggagcgagcaaaggctattattgtagaatttgcacagcagggtttgaatgctgctttgttttatgagaataaagatccccgcacttttgtgtctttggtacctacctctgcacatactggtgatggcatgggaagtctgatctaccttcttgtagagttaactcagaccatgttgagcaagagacttgcacactgtgaagagctgagagcacaggtgatggaggttaaagctctcccggggatgggcaccactatagatgtcatcttgatcaatgggcgtttgaaggaaggagatacaatcattgttcctggagtagaagggcccattgtaactcagattcgaggcctcctgttacctcctcctatgaaggaattacgagtgaagaaccagtatgaaaagcataaagaagtagaagcagctcagggggtaaagattcttggaaaagacctggagaaaacattggctggtttacccctccttgtggcttataaagaagatgaaatccctgttcttaaagatgaattgatccatgagttaaagcagacactaaatgctatcaaattagaagaaaaaggagtctatgtccaggcatctacactgggttctttggaagctctactggaatttctgaaaacatcagaagtgccctatgcaggaattaacattggcccagtgcataaaaaagatgttatgaaggcttcagtgatgttggaacatgaccctcagtatgcagtaattttggccttcgatgtgagaattgaacgagatgcacaagaaatggctgatagtttaggagttagaatttttagtgcagaaattatttatcatttatttgatgcctttacaaaatatagacaagactacaagaaacagaaacaagaagaatttaagcacatagcagtatttccctgcaagataaaaatcctccctcagtacatttttaattctcgagatccgatagtgatgggggtgacggtggaagcaggtcaggtgaaacaggggacacccatgtgtgtcccaagcaaaaattttgttgacatcggaatagtaacaagtattgaaataaaccataaacaagtggatgttgcaaaaaaaggacaagaagtttgtgtaaaaatagaacctatccctggtgagtcacccaaaatgtttggaagacattttgaagctacagatattcttgttagtaagatcagccggcagtccattgatgcactcaaagactggttcagagatgaaatgcagaagagtgactggcagcttattgtggagctgaagaaagtatttgaaatcatctaattttttcacatggagcaggaactggagtaaatgcaatactgtgttgtaatatcccaacaaaaatcagacaaaaaatggaacagacgtatttggacactgatggacttaagtatggaaggaagaaaaataggtgtataaaatgttttccatgagaaaccaagaaacttacactggtttgacagtggtcagttacatgtccccacagttccaatgtgcctgttcactcacctctcccttccccaacccttctctacttggctgctgttttaaagtttgcccttccccaaatttggatttttattacagatctaaagctctttcgattttatactgattaaatcagtactgcagtatttgattaacca

SEQ ID NO: 365817 - DNA, 1456 bp, Homo sapiens
  misc_feature (1367)..(1367): n is a, c, g, or t
  misc_feature (1370)..(1370): n is a, c, g, or t
tgagccgcgccctgcgtcctcacgccgaggcggctgggcgatgcgcttgcgcactgagaactgacaccatatgtgtcctgttccagtgcgcgggtctgtggagagccgggtgcgagcggcggcagcacgaggggaaaagagctgagcggagaccaaagtcagccgggagacagtgggtctgtgagagaccgaatagaggggctggggccacgagcgccattgacaagcaatggggaagaaacagaaaaacaagagcgaagacagcaccaaggatgacattgatcttgatgccttggctgcagaaatagaaggagctggtgctgccaaagaacaggagcctcaaaagtcaaaagggaaaaagaaaaaagagaaaaaaaagcaggactttgatgaagatgatatcctgaaagaactggaagaattgtctttggaagctcaaggcatcaaagctgacagagaaactgttgcagtgaagccaacagaaaacaatgaagaggaattcacctcaaaagataaaaaaaagaaaggacagaagggcaaaaaacagagttttgatgataatgatagcgaagaattggaagataaagattcaaaatcaaaaaagactgcaaaaccgaaagtggaaatgtactctgggagtgatgatgatgatgattttaacaaacttcctaaaaaagctaaagggaaagctcaaaaatcaaataagaagtgggatgggtcagaggaggatgaggataacagtaaaaaaattaaagagcgttcaagaataaattcttctggtgaaagtggtgatgaatcagatgaatttttgcaatctagaaaaggacagaaaaaaaatcagaaaaacaagccaggtcctaacatagaaagtgggaatgaagatgatgacgcctccttcaaaattaagacagtggcccaaaagaaggcagaaaagaaggagcgcgagagaaaaaagcgagatgaagaaaaagcgaaactgcggaagctgaaagaaaaagaagagttagaaacaggtaaaaaggatcagagtaaacaaaaggaatctcaaaggaaatttgaagaagaaactgtaaaatccaaagtgactgttgatactggagtaattcctgcctctgaagagaaagcagagactcccacagctgcagaagacgacagaaggggacaaaaagaagaaagataagaagaaaaagaaaggagaaaaggaagaaaaagagaaagagaagaaaaaaggacctagcaaagccactgttaaagctatgcaagaagctctggctaagcttaaagaggaagaagaaagacagaagagagaagaggaagaacgtataaaacggcttgaagaattagaagccaagcgtaaagaagaggancgntggaacaacgaaaacagagaacaggcacacagcaaacacagaaaaaagaaaagaaaagaccgcttgacagaaaacaaaaacaacag

SEQ ID NO: 365818 - DNA, 1417 bp, Homo sapiens
  misc_feature (1379)..(1379): n is a, c, g, or t
tgagccgcgccctgcgtcctcacgccgaggcggctgggcgatgcgcttgcgcactgagaactgacaccatatgtgtcctgttccagtgcgcgggtctgtggagagccgggtgcgagcggcggcagcacgaggggaaaagagctgagcggagaccaaagtcagccgggagacagtgggtctgtgagagaccgaatagaggggctggggccacgagcgccattgacaagcaatggggaagaaacagaaaaacaagagcgaagacagcaccaaggatgacattgatcttgatgccttggctgcagaaatagaaggagctggtgctgccaaagaacaggagcctcaaaagtcaaaagggaaaaagaaaaaagagaaaaaaaagcaggactttgatgaagatgatatcctgaaagaactggaagaattgtctttggaagctcaaggcatcaaagctgacagagaaactgttgcagtgaagccaacagaaaacaatgaagaggaattcacctcaaaagataaaaaaaagaaaggacagaagggcaaaaaacagagttttgatgataatgatagcgaagaattggaagataaagattcaaaatcaaaaaagactgcaaaaccgaaagtggaaatgtactctgggagtgatgatgatgatgattttaacaaacttcctaaaaaagctaaagggaaagctcaaaaatcaaataagaagtgggatgggtcagaggaggatgaggataacagtaaaaaaattaaagagcgttcaagaataaattcttctggtgaaagtggtgatgaatcagatgaatttttgcaatctagaaaaggacagaaaaaaaatcagaaaaacaagccaggtcctaacatagaaagtgggaatgaagatgatgacgcctccttcaaaattaagacagtggcccaaaagaaggcagaaaagaaggagcgcgagagaaaaaagcgagatgaagaaaaagcgaaactgcggaagctgaaagaaaaagaagagttagaaacaggtaaaaaggatcagagtaaacaaaaggaatctcaaaggaaatttgaagaagaaactgtaaaatccaaagtgactgttgatactggagtaattcctgcctctgaagagaaagcagagactcccacagctgcagaagacgacagaaggggacaaaaagaagaaagataagaagaaaaagaaaggagaaaaggaagaaaaagagaaagagaagaaaaaaggacctagcaaagccactgttaaagctatgcaagaagctctggctaagcttaaagaggaagaagaaagacagaagagagaagaggaagaacgtataaaacggcttgaagaattagaagccaagcgtaaagaagaggaacgattggaacanacaaaacaaaacgatataaacatttgtcgtatcgatgt

SEQ ID NO: 365819 - DNA, 2001 bp, Homo sapiens
ccaagcagttatacagactcagatgattaaaaattttgatagagagaatgtacggattccaggaatgctaattattgatactcctgggcatgaatctttcagtaatctgagaaatagaggaagctctctttgtgacattgccattttagttgttgatattatgcatggtttggagccccagacaattgagtctatcaaccttctcaaatctaaaaaatgtcccttcattgttgcactcaataagattgataggttatatgattggaaaaagagtcctgactctgatgtggctgctactttaaagaagcagaaaaagaatacaaaagatgaatttgaggagcgagcaaaggctattattgtagaatttgcacagcagggtttgaatgctgctttgttttatgagaataaagatccccgcacttttgtgtctttggtacctacctctgcacatactggtgatggcatgggaagtctgatctaccttcttgtagagttaactcagaccatgttgagcaagagacttgcacactgtgaagagctgagagcacaggtgatggaggttaaagctctcccggggatgggcaccactatagatgtcatcttgatcaatgggcgtttgaaggaaggagatacaatcattgttcctggagtagaagggcccattgtaactcagattcgaggcctcctgttacctcctcctatgaaggaattacgagtgaagaaccagtatgaaaagcataaagaagtagaagcagctcagggggtaaagattcttggaaaagacctggagaaaacattggctggtttacccctccttgtggcttataaagaagatgaaatccctgttcttaaagatgaattgatccatgagttaaagcagacactaaatgctatcaaattagaagaaaaaggagtctatgtccaggcatctacactgggttctttggaagctctactggaatttctgaaaacatcagaagtgccctatgcaggaattaacattggcccagtgcataaaaaagatgttatgaaggcttcagtgatgttggaacatgaccctcagtatgcagtaattttggccttcgatgtgagaattgaacgagatgcacaagaaatggctgatagtttaggagttagaatttttagtgcagaaattatttatcatttatttgatgcctttacaaaatatagacaagactacaagaaacagaaacaagaagaatttaagcacatagcagtatttccctgcaagataaaaatcctccctcagtacatttttaattctcgagatccgatagtgatgggggtgacggtggaagcaggtcaggtgaaacaggggacacccatgtgtgtcccaagcaaaaattttgttgacatcggaatagtaacaagtattgaaataaaccataaacaagtggatgttgcaaaaaaaggacaagaagtttgtgtaaaaatagaacctatccctggtgagtcacccaaaatgtttggaagacattttgaagctacagatattcttgttagtaagatcagccggcagtccattgatgcactcaaagactggttcagagatgaaatgcagaagagtgactggcagcttattgtggagctgaagaaagtatttgaaatcatctaattttttcacatggagcaggaactggagtaaatgcaatactgtgttgtaatatcccaacaaaaatcagacaaaaaatggaacagacgtatttggacactgatggacttaagtatggaaggaagaaaaataggtgtataaaatgttttccatgagaaaccaagaaacttacactggtttgacagtggtcagttacatgtccccacagttccaatgtgcctgttcactcacctctcccttccccaacccttctctacttggctgctgttttaaagtttgcccttccccaaatttggatttttattacagatctaaagctctttcgattttatactgattaaatcagtactgcagtatttgattaacca

SEQ ID NO: 365820 - DNA, 750 bp, Homo sapiens
tgagccgcgccctgcgtcctcacgccgaggcggctgggcgatgcgcttgcgcactgagaactgacaccatatgtgtcctgttccagtgcgcgggtctgtggagagccgggtgcgagcggcggcagcacgaggggaaaagagctgagcggagaccaaagtcagccgggagacagtgggtctgtgagagaccgaatagaggggctggggccacgagcgccattgacaagcaatggggaagaaacagaaaaacaagagcgaagacagcaccaaggatgacattgatcttgatgccttggctgcagaaatagaaggagctggtgctgccaaagaacaggagcctcaaaagtcaaaagggaaaaagaaaaaagagaaaaaaaagcaggactttgatgaagatgatatcctgaaagaactggaagaattgtctttggaagctcaaggcatcaaagctgacagagaaactgttgcagtgaagccaacagaaaacaatgaagaggaattcacctcaaaagataaaaaaaagaaaggacagaagggcaaaaaacagagttttgatgatatcctgaaagaactggaagaattgtctttggaagctcaaggcatcaaagctgacagagaaactgttgcagtgaagccaacagaaaacaatgaagaggaattcacctcaaaagataaaaaaaagaaaggacagaaggagctggtgctgccaaagaacaggagcctcaaaagtcaaaagggaaaaaaaaaaaa

SEQ ID NO: 365821 - DNA, 746 bp, Homo sapiens
gtaggccctgaggacccagcataggcggactcgggactgctgctaaagtggggttcctgccgttccacttggctgcgggtccgcaaggcccggccccagctcatcctcagccgccggccccgccgccggctcgggagcctgcgctggtgcggtcggcggcgcctacggcggcggttactgcaagcccaggcggccggcgtggactggagggagggagcccgccaggtgtcgcgcgcggcggcggcccggagacccaacaccgcgacccccagcccgatccctagcccgaccccggcctccgaacccgagtccgaacccgaactcgaatccgcctcgagttgccaccggcctctcctcatcccaccggtgcggcccgtgggccccggccgcgcgttgctgctgctgccggtcgagcagatgacaggcgttggtcgatgcagaatttttctcctcagtgttccattgtgttgctagaacatctgaaaactgccactgtaaacttcataaccagctatccgggttcatcctacatttttgtgcaagaggtagaacccgttttcattcagagttttgctaattacttgcaccaaaacagtgatttcaaatgactatgtaggatgttgtcttggaagaacagttggtctatctagtgctctcagtcctacagaatgtaatacgtgtatacggaaactattatagaaaggtgtatcgtgaaaaatgttcatcctcccctccttagtttcata

SEQ ID NO: 365822 - DNA, 404 bp, Homo sapiens
gagatggcagtcctaaagggcgtggaatgtaatgaagttaactgcttctaaggtggtttatttttctctttacagatgacaggcgttggtcgatgcagaatttttctcctcagtgttccattgtgttgctagaacatctgaaaactgccactgtaaacttcataaccagctatccgggttcatcctacatttttgtgcaagaggtagaacccgttttcattcagagttttgctaattacttgcaccaaaacagtgatttcaaatgactatgtaggatgttgtcttggaagaacagttggtctatctagtgctctcagtcctacagaatgtaatacgtgtatacggaaactattatagaaaggtgtatcgtgaaaaatgttcatcctcccctccttagtttcata

SEQ ID NO: 365823 - DNA, 2414 bp, Homo sapiens
gtaggccctgaggacccagcataggcggactcgggactgctgctaaagtggggttcctgccgttccacttggctgcgggtccgcaaggcccggccccagctcatcctcagccgccggccccgccgccggctcgggagcctgcgctggtgcggtcggcggcgcctacggcggcggttactgcaagcccaggcggccggcgtggactggagggagggagcccgccaggtgtcgcgcgcggcggcggcccggagacccaacaccgcgacccccagcccgatccctagcccgaccccggcctccgaacccgagtccgaacccgaactcgaatccgcctcgagttgccaccggcctctcctcatcccaccggtgcggcccgtgggccccggccgcgcgttgctgctgctgccggtcgagcagggttttacttttagtgggatctgtcgtgtgacttgcctctatggccaggtgcaggtatttggttttaccatcagccaaggccagcctgcccaagacatcttctctgtgtatacccactcttgcttgagtatccatgcacttcactactcacagcctgagaaaagcaagaaggaactgaaaagggaagcccggaatttgctcaaatctcatcttaaccttgatgacaggcgttggtcgatgcagaatttttctcctcagtgttccattgtgttgctagaacatctgaaaactgccactgtaaacttcataaccagctatccgggttcatcctacatttttgtgcaagagagtccaactccccagattaaacctgaatatttagccttgaggtctgttggcatcagaagagagaaaaaaaggaaaggccttcagttaactgagagtaccctttcagccctggaagagttagtcaatgtttcctgtgaagaagtagatggctgccctgtcattctagtttgtggatcccaggatgttggaaagtcaacatttaatagatacctgattaaccatttgttaaatagtcttccctgcgttgactatttggaatgtgatctgggacagacagaatttacccctcctggttgcatttctttgcttaatattacagaaccagttctgggaccacctttcactcacctgaggactccacagaagatggtatattatgggaaaccttcttgtaaaaacaactatgagaattatattgacatagtgaaatatgtgttcagcgcttacaagagagagtcccctctcatcgtcaacactatgggatgggtttcagaccaggggctcctgcttctcattgatctgatccgattgctgtctcccagccacgtggttcagttccgctctgaccacagtaaatatatgccagaccttaccccgcagtatgtagatgacatggatggcttgtacacaaaaagcaagaccaagatgagaaatcgacgtttcagactcgcagcatttgcagatgctttggaatttgctgatgaagaaaaagagagtccagttgagttcactggacataaactgataggtgtttatacagactttgcattcagaataactccaagaaatagagagtcacataacaaaattcttcgagatctgtccatcttgagttaccttagccagctgcagcccccgatgcccaaaccactttctcctttacatagcctgacaccctatcaggtccctttcaatgcagtcgcactccggattacccactctgatgtcgcccctacccatatactatatgctgtaaacgccagctgggttggtctttgcaagatccaggatgacgtcagaggatacacgaatgggcccatcctgcttgcccagactccaatctgtgactgcttgggctttggcatctgtagaggcattgacatggagaagcggctgtaccacatcctcacccctgtgcccccggaagagctaaggaccgtgaattgtctgctcgttggagctattgccattccacattgtgtccttaagtgccagcgtgggatcgaagggacagtaccttatgtcacaacggattacaattttaaacttcctggagcatcagagaaaattggagcaagagaacctgaggaggcacataaagagaaaccataccgaagacctaagttctgtcgaaaaatgaagtgatgctcgcgtttttaataagggaagaaactttcctaccagaaagctttgtctcaagcctgaccacaagagacatgatggagtttcatggccatgaatggtgcccttattaacaacagtgttttttgtgtaattcgtgaatgtcatatagtagtcttaagtttctcttttaaagctgcatgagctagaatttgttctagtcttctgtgtgatactcatacttgctgtccagagggagtaaaacagcagagaacagtttgtgtgccattaaaacagagattcctcag

SEQ ID NO: 365824 - DNA, 3222 bp, Homo sapiens
gtaggccctgaggacccagcataggcggactcgggactgctgctaaagtggggttcctgccgttccacttggctgcgggtccgcaaggcccggccccagctcatcctcagccgccggccccgccgccggctcgggagcctgcgctggtgcggtcggcggcgcctacggcggcggttactgcaagcccaggcggccggcgtggactggagggagggagcccgccaggtgtcgcgcgcggcggcggcccggagacccaacaccgcgacccccagcccgatccctagcccgaccccggcctccgaacccgagtccgaacccgaactcgaatccgcctcgagttgccaccggcctctcctcatcccaccggtgcggcccgtgggccccggccgcgcgttgctgctgctgccggtcgagcagggttttacttttagtgggatctgtcgtgtgacttgcctctatggccaggtgcaggtatttggttttaccatcagccaaggccagcctgcccaagacatcttctctgtgtatacccactcttgcttgagtatccatgcacttcactactcacagcctgagaaaagcaagaaggaactgaaaagggaagcccggaatttgctcaaatctcatcttaaccttgatgacaggcgttggtcgatgcagaatttttctcctcagtgttccattgtgttgctagaacatctgaaaactgccactgtaaacttcataaccagctatccgggttcatcctacatttttgtgcaagagagtccaactccccagattaaacctgaatatttagccttgaggtctgttggcatcagaagagagaaaaaaaggaaaggccttcagttaactgagagtaccctttcagccctggaagagttagtcaatgtttcctgtgaagaagtagatggctgccctgtcattctagtttgtggatcccaggatgttggaaagtcaacatttaatagatacctgattaaccatttgttaaatagtcttccctgcgttgactatttggaatgtgatctgggacagacagaatttacccctcctggttgcatttctttgcttaatattacagaaccagttctgggaccacctttcactcacctgaggactccacagaagatggtatattatgggaaaccttcttgtaaaaacaactatgagaattatattgacatagtgaaatatgtgttcagcgcttacaagagagagtcccctctcatcgtcaacactatgggatgggtttcagaccaggggctcctgcttctcattgatctgatccgattgctgtctcccagccacgtggttcagttccgctctgaccacagtaaatatatgccagaccttaccccgcagtatgtagatgacatggatggcttgtacacaaaaagcaagaccaagatgagaaatcgacgtttcagactcgcagcatttgcagatgctttggaatttgctgatgaagaaaaagagagtccagttgagttcactggacataaactgataggtgtttatacagactttgcattcagaataactccaagaaatagagagtcacataacaaaattcttcgagatctgtccatcttgagttaccttagccagctgcagcccccgatgcccaaaccactttctcctttacatagcctgacaccctatcaggtccctttcaatgcagtcgcactccggattacccactctgatgtcgcccctacccatatactatatgctgtaaacgccagctgggttggtctttgcaagatccaggatgacgtcagaggatacacgaatgggcccatcctgcttgcccagactccaatctgtgactgcttgggctttggcatctgtagaggcattgacatggagaagcggctgtaccacatcctcacccctgtgcccccggaagagctaaggaccgtgaattgtctgctcgttggagctattgccattccacattgtgtccttaagtgccagcgtgggatcgaagggacagtaccttatgtcacaacggattacaattttaaacttcctggagcatcagagaaaattggagcaagagaacctgaggaggcacataaagagaaaccataccgaagacctaagttctgtcgaaaaatgaagtgatgctcgcgtttttaataagggaagaaactttcctaccagaaagctttgtctcaagcctgaccacaagagacatgatggagtttcatggccatgaatggtgcccttattaacaacagtgttttttgtgtaattcgtgaatgtcatatagtagtcttaagtttctcttttaaagctgcatgagctagaatttgttctagtcttctgtgtgatactcatacttgctgtccagagggagtaaaacagcagagaacagtttgtgtgccattaaaacagagattcctcagaaagttcttcagggacctggttattagaatcaggataaaaataaggaaactggggccattacaatgtaccgagaaggaaggaagaaggccaacctgcaggatctcaagcataatggatacaagggctcgccacgggccttgcctgagccatgtgcagagctggggtccagcggtctgcttccttggagccagtgtggatggttacagcccatccatttggtgcagttgtacttggtctgttatattcaatcaaggtttaatagatagggctgggcatggtggctcatgcacacctgtaatcctagcactttgggaggctgaggcgggaggattgcttgagcctcggagttccaggctggagtacaccaactactccagcctgagcgacagagtaagaccttatcttttaaaaaagaaaagaaaaatttaaacgggtttgatagatataaatttggacccaagagcccttccttttttttaatcctgaggttttatgctgaggaaatttctttcaaatctggaaaacctcggggccaggcgcagtggctcacgcctgtaattccagcactttgggaggccaaggcaggcggttcacgaggtcaggagattgagaccatcctggctaacacagtgaaactccgtctctactaaaaatacaaaaaactagctgggcgtggtggtgggcgcctatagtcccagctactcaggaggctgaggcaggagaatggcatgaacccaggaggcggagcttgcagtgagccgaggtcacgccactgcactccagcctgggcaacaagagcaagactcc

SEQ ID NO: 365825 - DNA, 3472 bp, Homo sapiens
gtaggccctgaggacccagcataggcggactcgggactgctgctaaagtggggttcctgccgttccacttggctgcgggtccgcaaggcccggccccagctcatcctcagccgccggccccgccgccggctcgggagcctgcgctggtgcggtcggcggcgcctacggcggcggttactgcaagcccaggcggccggcgtggactggagggagggagcccgccaggtgtcgcgcgcggcggcggcccggagacccaacaccgcgacccccagcccgatccctagcccgaccccggcctccgaacccgagtccgaacccgaactcgaatccgcctcgagttgccaccggcctctcctcatcccaccggtgcggcccgtgggccccggccgcgcgttgctgctgctgccggtcgagcagggttttacttttagtgggatctgtcgtgtgacttgcctctatggccaggtgcaggtatttggttttaccatcagccaaggccagcctgcccaagacatcttctctgtgtatacccactcttgcttgagtatccatgcacttcactactcacagcctgagaaaagcaagaaggaactgaaaagggaagcccggaatttgctcaaatctcatcttaaccttgatgacaggcgttggtcgatgcagaatttttctcctcagtgttccattgtgttgctagaacatctgaaaactgccactgtaaacttcataaccagctatccgggttcatcctacatttttgtgcaagagagtccaactccccagattaaacctgaatatttagccttgaggtctgttggcatcagaagagagaaaaaaaggaaaggccttcagttaactgagagtaccctttcagccctggaagagttagtcaatgtttcctgtgaagaagtagatggctgccctgtcattctagtttgtggatcccaggatgttggaaagtcaacatttaatagatacctgattaaccatttgttaaatagtcttccctgcgttgactatttggaatgtgatctgggacagacagaatttacccctcctggttgcatttctttgcttaatattacagaaccagttctgggaccacctttcactcacctgaggactccacagaagatggtatattatgggaaaccttcttgtaaaaacaactatgagaattatattgacatagtgaaatatgtgttcagcgcttacaagagagagtcccctctcatcgtcaacactatgggatgggtttcagaccaggggctcctgcttctcattgatctgatccgattgctgtctcccagccacgtggttcagttccgctctgaccacagtaaatatatgccagaccttaccccgcagtatgtagatgacatggatggcttgtacacaaaaagcaagaccaagatgagaaatcgacgtttcagactcgcagcatttgcagatgctttggaatttgctgatgaagaaaaagagagtccagttgagttcactggacataaactgataggtgtttatacagactttgcattcagaataactccaagaaatagagagtcacataacaaaattcttcgagatctgtccatcttgagttaccttagccagctgcagcccccgatgcccaaaccactttctcctttacatagcctgacaccctatcaggtccctttcaatgcagtcgcactccggattacccactctgatgtcgcccctacccatatactatatgctgtaaacgccagctgggttggtctttgcaagatccaggatgacgtcagaggatacacgaatgggcccatcctgcttgcccagactccaatctgtgactgcttgggctttggcatctgtagaggcattgacatggagaagcggctgtaccacatcctcacccctgtgcccccggaagagctaaggaccgtgaattgtctgctcgttggagctattgccattccacattgtgtccttaagtgccagcgtgggatcgaagggacagtaccttatgtcacaacggattacaattttaaacttcctggagcatcagagaaaattggagcaagagaacctgaggaggcacataaagagaaaccataccgaagacctaagttctgtcgaaaaatgaagtgatgctcgcgtttttaataagggaagaaactttcctaccagaaagctttgtctcaagcctgaccacaagagacatgatggagtttcatggccatgaatggtgcccttattaacaacagtgttttttgtgtaattcgtgaatgtcatatagtagtcttaagtttctcttttaaagctgcatgagctagaatttgttctagtcttctgtgtgatactcatacttgctgtccagagggagtaaaacagcagagaacagtttgtgtgccattaaaacagagattcctcagaaagttcttcagggacctggttattagaatcaggataaaaataaggaaactggggccattacaatgtaccgagaaggaaggaagaaggccaacctgcaggatctcaagcataatggatacaagggctcgccacgggccttgcctgagccatgtgcagagctggggtccagcggtctgcttccttggagccagtgtggatggttacagcccatccatttggtgcagttgtacttggtctgttatattcaatcaaggtttaatagatagggctgggcatggtggctcatgcacacctgtaatcccaaagtgctgggattacaggcgtgagccaccgcgcccggcctaggtcatttgtttttgggtttggatggcaagatcatggataagacagcaggctttgattatagagctctgagttcaaatcctggctctaccacttgtcagtggtgtaacttggaggaagatgcttagcctgagcctgttttatgttttgaagattgggtaattgtccttccttcagtgttcctgggtgaggagtaagtgaagtcatgtctataagagatgtagcacagtctccggcatgtagaaatggtcagtaactcctagtgtgtagctagcctctgatgagatggtaaactcaggaggctggcaccacggctgtgctactcacggtcatgctggagggatgcagaaactaaatgaatccacagctacttactcatcttgcctctggcaggttcaccttaaaattgttgctaccaagcttcctgtggtcaaagagcccttgaggaagcaagctccacggccaccatagataacccattcctgaaagtttttcataaacccccacttgttgcttttaaaattttataagcagcttacacatgtagaaaatgatcctccagcccaccaccacatagtaatcactgacactgtgaggtgtctcagctggggttctgctgtgtgtgtgtgtattttacaaaatatgtatggtttctgttcagctcttttcagttaacagatgaacttttgtatcattaaatatttttgaaaacatg

SEQ ID NO: 365826 - DNA, 2669 bp, Homo sapiens
tgaatgtctgtccaccagacccccagaggaagattagtcataattcgagtccaaggaagacggctaattctagcgatcaatgtttgtttcccattcagaagaagtagatggctgccctgtcattctagtttgtggatcccaggatgttggaaagtcaacatttaatagatacctgattaaccatttgttaaatagtcttccctgcgttgactatttggaatgtgatctgggacagacagaatttacccctcctggttgcatttctttgcttaatattacagaaccagttctgggaccacctttcactcacctgaggactccacagaagatggtatattatgggaaaccttcttgtaaaaacaactatgagaattatattgacatagtgaaatatgtgttcagcgcttacaagagagagtcccctctcatcgtcaacactatgggatgggtttcagaccaggggctcctgcttctcattgatctgatccgattgctgtctcccagccacgtggttcagttccgctctgaccacagtaaatatatgccagaccttaccccgcagtatgtagatgacatggatggcttgtacacaaaaagcaagaccaagatgagaaatcgacgtttcagactcgcagcatttgcagatgctttggaatttgctgatgaagaaaaagagagtccagttgagttcactggacataaactgataggtgtttatacagactttgcattcagaataactccaagaaatagagagtcacataacaaaattcttcgagatctgtccatcttgagttaccttagccagctgcagcccccgatgcccaaaccactttctcctttacatagcctgacaccctatcaggtccctttcaatgcagtcgcactccggattacccactctgatgtcgcccctacccatatactatatgctgtaaacgccagctgggttggtctttgcaagatccaggatgacgtcagaggatacacgaatgggcccatcctgcttgcccagactccaatctgtgactgcttgggctttggcatctgtagaggcattgacatggagaagcggctgtaccacatcctcacccctgtgcccccggaagagctaaggaccgtgaattgtctgctcgttggagctattgccattccacattgtgtccttaagtgccagcgtgggatcgaagggacagtaccttatgtcacaacggattacaattttaaacttcctggagcatcagagaaaattggagcaagagaacctgaggaggcacataaagagaaaccataccgaagacctaagttctgtcgaaaaatgaagtgatgctcgcgtttttaataagggaagaaactttcctaccagaaagctttgtctcaagcctgaccacaagagacatgatggagtttcatggccatgaatggtgcccttattaacaacagtgttttttgtgtaattcgtgaatgtcatatagtagtcttaagtttctcttttaaagctgcatgagctagaatttgttctagtcttctgtgtgatactcatacttgctgtccagagggagtaaaacagcagagaacagtttgtgtgccattaaaacagagattcctcagaaagttcttcagggacctggttattagaatcaggataaaaataaggaaactggggccattacaatgtaccgagaaggaaggaagaaggccaacctgcaggatctcaagcataatggatacaagggctcgccacgggccttgcctgagccatgtgcagagctggggtccagcggtctgcttccttggagccagtgtggatggttacagcccatccatttggtgcagttgtacttggtctgttatattcaatcaaggtttaatagatagggctgggcatggtggctcatgcacacctgtaatcccaaagtgctgggattacaggcgtgagccaccgcgcccggcctaggtcatttgtttttgggtttggatggcaagatcatggataagacagcaggctttgattatagagctctgagttcaaatcctggctctaccacttgtcagtggtgtaacttggaggaagatgcttagcctgagcctgttttatgttttgaagattgggtaattgtccttccttcagtgttcctgggtgaggagtaagtgaagtcatgtctataagagatgtagcacagtctccggcatgtagaaatggtcagtaactcctagtgtgtagctagcctctgatgagatggtaaactcaggaggctggcaccacggctgtgctactcacggtcatgctggagggatgcagaaactaaatgaatccacagctacttactcatcttgcctctggcaggttcaccttaaaattgttgctaccaagcttcctgtggtcaaagagcccttgaggaagcaagctccacggccaccatagataacccattcctgaaagtttttcataaacccccacttgttgcttttaaaattttataagcagcttacacatgtagaaaatgatcctccagcccaccaccacatagtaatcactgacactgtgaggtgtctcagctggggttctgctgtgtgtgtgtgtattttacaaaatatgtatggtttctgttcagctcttttcagttaacagatgaacttttgtatcattaaatatttttgaaaacatg

SEQ ID NO: 365827 - DNA, 1678 bp, Homo sapiens
gtaggccctgaggacccagcataggcggactcgggactgctgctaaagtggggttcctgccgttccacttggctgcgggtccgcaaggcccggccccagctcatcctcagccgccggccccgccgccggctcgggagcctgcgctggtgcggtcggcggcgcctacggcggcggttactgcaagcccaggcggccggcgtggactggagggagggagcccgccaggtgtcgcgcgcggcggcggcccggagacccaacaccgcgacccccagcccgatccctagcccgaccccggcctccgaacccgagtccgaacccgaactcgaatccgcctcgagttgccaccggcctctcctcatcccaccggtgcggcccgtgggccccggccgcgcgttgctgctgctgccggtcgagcagggttttacttttagtgggatctgtcgtgtgacttgcctctatggccaggtgcaggtatttggttttaccatcagccaaggccagcctgcccaagacatcttctctgtgtatacccactcttgcttgagtatccatgcacttcactactcacagcctgagaaaagcaagaaggaactgaaaagggaagcccggaatttgctcaaatctcatcttaaccttgatgacaggcgttggtcgatgcagaatttttctcctcagtgttccattgtgttgctagaacatctgaaaactgccactgtaaacttcataaccagctatccgggttcatcctacatttttgtgcaagagagtccaactccccagattaaacctgaatatttagccttgaggtctgttggcatcagaagagagaaaaaaaggaaaggccttcagttaactgagagtaccctttcagccctggaagagttagtcaatgtttcctgtgaagaagtagatggctgccctgtcattctagtttgtggatcccaggatgttggaaagtcaacatttaatagatacctgattaaccatttgttaaatagtcttccctgcgttgactatttggaatgtgatctgggacagacagaatttacccctcctggttgcatttctttgcttaatattacagaaccagttctgggaccacctttcactcacctgaggactccacagaagatggtatattatgggaaaccttcttgtaaaaacaactatgagaattatattgacatagtgaaatatgtgttcagcgcttacaagagagagtcccctctcatcgtcaacactatgggatgggtttcagaccaggggctcctgcttctcattgatctgatccgattgctgtctcccagccacgtggttcagttccgctctgaccacagtaaatatatgccagaccttaccccgcagtatgtagatgacatggatggcttgtacacaaaaagcaagaccaagatgagaaatcgacgtttcagactcgcagcatttgcagatgctttggaatttgctgatgaagaaaaagagagtccagttgagttcactggacataaactgataggtgtttatacagactttgcattcagaataactccaagaaataggtaactaaccctcatttggctgaagaattatttttccttccgtcgaaaaagacctgccattctcaattcctctaaaggcctgagtcctctaagatcttcaggtcctgtcacagctgtgcatg

SEQ ID NO: 365828 - DNA, 3740 bp, Homo sapiens
ttccgcttcgggctcgctgacttccggcttagggccgagggtggggaactgccgggcgcggaagcgatgggcatatctgtggcttattttcagcactgtcgcgcagacagtggcgcgatctcagctcactgcagcccccgcctgccgggctcccaaggtgctgggattacagcagcaccgcggatgtgacgtttggtgttcctgtgaacgtggggcggggcgggtcgtttgcttgctcagtgcctagacgatggtggtggaaagacgcttctgtgggttaggtcctaacggttaggaaggattcacaggcgggtcatgaggaaggagcagacccctcgggcagaagcccgcgaggagcactgggtgtggtgggggcaggggtgcctcctctgtcaagtggagatcggcgcctcgctcgtgcctgcgagtgcgcgccgcgtcgaatacagccgtacagaacgcactacaggaaagtgaagccgggagagagactgggaggcggcgcggggactgggggccgtagacgcctttgctcccgggcacttgttagaagagcgagtggatcgcgcttcctgtgcgtcactgaatcctcatgacggccactgaaacggacacgcaggatctttgcttttcaagagggaactgagtccaggccagactgggttgctcccctttctctcggcccctccacctttgcaagtgctgctccttctgcctggagtggctcctccagtcttttcccggctcacttcccaccgtccggtgtcagcaaaaacagcacttcctcacagcccgttgcagcccagcagtcgccttttgcttcttttgaagcacagccctgtgaccgcctcgtgtccttttgtttttccttgtcccccttcccctctggaacataagctccacaaaggcagggacctgggaatcccgttcgcctgcattccccagcaaacgcctaacgaacccaatggcccaggactgaaaattcctttccacttcggctttcccctctacatcccatcggttctgtggagctcgaggggcgtcactgtgtgtgtggcagggcacggtgggggctgagatcgtttcctgttggaacttctggcccaagaagcgcgggtcacaaggagaggggtcagttcggttcagagcgactcagcccctcgactcgggtcttaaaacctccgagccgccagttctgcctcaggccgcgcccccttaaagcgccaccagacgctgcgccccgttaaagcgccaccagacgccgcgccccgtcccggcctcccccgcgcgctggcgcggggctttctgggccagggcggggccggcgaactgcggcccggaacggctgaggaagggcccgtcccgccttccccggcgcgccatggagccccgggcggttgcagaagccgtggagacgggtgaggaggatgtgattatggaagctctgcggtcatacaaccaggagcactcccagagcttcacgtttgatgatgcccaacaggaggaccggaagagactggcggagctgctggtctccgtcctggaacagggcttgccaccctcccaccgtgtcatctggctgcagagtgtccgaatcctgtcccgggaccgcaactgcctggacccgttcaccagccgccagagcctgcaggcactagcctgctatgctgacatctctgtctctgaggggtccgtcccagagtccgcagacatggatgttgtactggagtccctcaagtgcctgtgcaacctcgtgctcagcagccctgtggcacagatgctggcagcagaggcccgcctagtggtgaagctcacagagcgtgtggggctgtaccgtgagaggagcttcccccacgatgtccagttctttgacttgcggctcctcttcctgctaacggcactccgcaccgatgtgcgccagcagctgtttcaggagctgaaaggagtgcgcctgctaactgacacactggagctgacgctgggggtgactcctgaagggaaccccccacccacgctccttccttcccaagagactgagcgggccatggagatcctcaaagtgctcttcaacatcaccctggactccatcaagggggaggtggacgaggaagacgctgccctttaccgacacctggggacccttctccggcactgtgtgatgatcgctactgctggagaccgcacagaggagttccacggccacgcagtgaacctcctggggaacttgcccctcaagtgtctggatgttctcctcaccctggagccacatggagactccacggagttcatgggagtgaatatggatgtgattcgtgccctcctcatcttcctagagaagcgtttgcacaagacacacaggctgaaggagagtgtagctcccgtgctgagcgtgctgactgaatgtgcccggatgcaccgcccagccaggaagttcctgaaggcccaggtgctgccccctctgcgggatgtgaggacacggcctgaggttggggagatgctgcggaacaagcttgtccgcctcatgacacacctggacacagatgtgaagagggtggctgccgagttcttgtttgtcctgtgctctgagagtgtgccccgattcatcaagtacacaggctatgggaatgctgctggccttctggctgccaggggcctcatggcaggaggccggcccgagggccagtactcagaggatgaggacacagacacagatgagtacaaggaagccaaagccagcataaaccctgtgaccgggagggtggaggagaagccgcctaaccctatggagggcatgacagaggagcagaaggagcacgaggccatgaagctggtgaccatgtttgacaagctctccaggaacagagtcatccagccaatggggatgagtccccggggtcatcttacgtccctgcaggatgccatgtgcgagactatggagcagcagctctcctcggaccctgactcggaccctgactgaggatggcagctcttctgctcccccatcaggactggtgctgcttccagagacttccttggggttgcaacctggggaagccacatcccactggatccacacccgcccccacttctccatcttagaaaccccttctcttgactcccgttctgttcatgatttgcctctggtccagtttctcatctctggactgcaacggtcttcttgtgctagaactcaggctcagcctcgaattccacagacgaagtactttcttttgtctgcgccaagaggaatgtgttcagaagctgctgcctgagggcagggcctacctgggcacacagaagagcatatgggagggcaggggtttgggtgtgggtgcacacaaagcaagcaccatctgggattggcacactggcagagccagtgtgttggggtatgtgctgcacttcccagggagaaaacctgtcagaactttccatacgagtatatcagaacacacccttccaaggtatgtatgctctgttgttcctgtcctgtcttcactgagcgcagggctggaggcctcttagacattctccttggtcctcgttcagctgcccactgtagtatccacagtgcccgagttctcgctggttttggcaattaaacctccttcctactggtttagactacacttacaacaaggaaaatgcccctcgtgtgaccatagattgagatttataccacataccacacatagccacagaaacatcatcttgaaataaagaagagttttggacaaaaa

SEQ ID NO: 365829 - DNA, 510 bp, Homo sapiens
gtgtcatcacggaggcggtatcacagtgatattggagtattggagtagagccacggcctcgccatgtggttaggggctggtctctaattccggacctcaagtgagtggcgtggcttcagcctcccaagagtgctgggattacaggcgtgagtcaccacacccggccggtactttccttttaaagagaaaatctcattaaaatattaagagcctcatcactttggagtaatttctggcatatacagatgcaaagcaaaaagaaaacaaaatcccagctacccaggagaatcgcttaaacccgggaggcggaagttgcagtgagctgagatcgtaacaccgcactccaccctgagtgacagggcaagactcaaaaaataaaaaaggaacattaactagggttagaaactaacttcattctttttagaattcaacagttttcctaggtcaccaattccaccttttgttcttattaaggcgcaaagtcacaggacccccttcctgggagtcact

SEQ ID NO: 365830 - DNA, 3836 bp, Homo sapiens
ttccgcttcgggctcgctgacttccggcttagggccgagggtggggaactgccgggcgcggaagcgatgggcatatctgtggcttattttcagcactgtcgcgcagacagtggcgcgatctcagctcactgcagcccccgcctgccgggctcccaaggtgctgggattacagcagcaccgcggatgtgacgtttggtgttcctgtgaacgtggggcggggcgggtcgtttgcttgctcagtgcctagacgatggtggtggaaagacgcttctgtgggttaggtcctaacggttaggaaggattcacaggcgggtcatgaggaaggagcagacccctcgggcagaagcccgcgaggagcactgggtgtggtgggggcaggggtgcctcctctgtcaagtggagatcggcgcctcgctcgtgcctgcgagtgcgcgccgcgtcgaatacagccgtacagaacgcactacaggaaagtgaagccgggagagagactgggaggcggcgcggggactgggggccgtagacgcctttgctcccgggcacttgttagaagagcgagtggatcgcgcttcctgtgcgtcactgaatcctcatgacggccactgaaacggacacgcaggatctttgcttttcaagagggaactgagtccaggccagactgggttgctcccctttctctcggcccctccacctttgcaagtgctgctccttctgcctggagtggctcctccagtcttttcccggctcacttcccaccgtccggtgtcagcaaaaacagcacttcctcacagcccgttgcagcccagcagtcgccttttgcttcttttgaagcacagccctgtgaccgcctcgtgtccttttgtttttccttgtcccccttcccctctggaacataagctccacaaaggcagggacctgggaatcccgttcgcctgcattccccagcaaacgcctaacgaacccaatggcccaggactgaaaattcctttccacttcggctttcccctctacatcccatcggttctgtggagctcgaggggcgtcactgtgtgtgtggcagggcacggtgggggctgagatcgtttcctgttggaacttctggcccaagaagcgcgggtcacaaggagaggggtcagttcggttcagagcgactcagcccctcgactcgggtcttaaaacctccgagccgccagttctgcctcaggccgcgcccccttaaagcgccaccagacgctgcgccccgttaaagcgccaccagacgccgcgccccgtcccggcctcccccgcgcgctggcgcggggctttctgggccagggcggggccggcgaactgcggcccggaacggctgaggaagggcccgtcccgccttccccggcgcgccatggagccccgggcggttgcagaagccgtggagacgggtgaggaggatgtgattatggaagctctgcggtcatacaaccaggagtggctgctgcctgagttagaggccaataggccgcccgcatcagcggacgcggatcctacccctctgtggatttgaattcactagttctctctgcagcactcccagagcttcacgtttgatgatgcccaacaggaggaccggaagagactggcggagctgctggtctccgtcctggaacagggcttgccaccctcccaccgtgtcatctggctgcagagtgtccgaatcctgtcccgggaccgcaactgcctggacccgttcaccagccgccagagcctgcaggcactagcctgctatgctgacatctctgtctctgaggggtccgtcccagagtccgcagacatggatgttgtactggagtccctcaagtgcctgtgcaacctcgtgctcagcagccctgtggcacagatgctggcagcagaggcccgcctagtggtgaagctcacagagcgtgtggggctgtaccgtgagaggagcttcccccacgatgtccagttctttgacttgcggctcctcttcctgctaacggcactccgcaccgatgtgcgccagcagctgtttcaggagctgaaaggagtgcgcctgctaactgacacactggagctgacgctgggggtgactcctgaagggaaccccccacccacgctccttccttcccaagagactgagcgggccatggagatcctcaaagtgctcttcaacatcaccctggactccatcaagggggaggtggacgaggaagacgctgccctttaccgacacctggggacccttctccggcactgtgtgatgatcgctactgctggagaccgcacagaggagttccacggccacgcagtgaacctcctggggaacttgcccctcaagtgtctggatgttctcctcaccctggagccacatggagactccacggagttcatgggagtgaatatggatgtgattcgtgccctcctcatcttcctagagaagcgtttgcacaagacacacaggctgaaggagagtgtagctcccgtgctgagcgtgctgactgaatgtgcccggatgcaccgcccagccaggaagttcctgaaggcccaggtgctgccccctctgcgggatgtgaggacacggcctgaggttggggagatgctgcggaacaagcttgtccgcctcatgacacacctggacacagatgtgaagagggtggctgccgagttcttgtttgtcctgtgctctgagagtgtgccccgattcatcaagtacacaggctatgggaatgctgctggccttctggctgccaggggcctcatggcaggaggccggcccgagggccagtactcagaggatgaggacacagacacagatgagtacaaggaagccaaagccagcataaaccctgtgaccgggagggtggaggagaagccgcctaaccctatggagggcatgacagaggagcagaaggagcacgaggccatgaagctggtgaccatgtttgacaagctctccaggaacagagtcatccagccaatggggatgagtccccggggtcatcttacgtccctgcaggatgccatgtgcgagactatggagcagcagctctcctcggaccctgactcggaccctgactgaggatggcagctcttctgctcccccatcaggactggtgctgcttccagagacttccttggggttgcaacctggggaagccacatcccactggatccacacccgcccccacttctccatcttagaaaccccttctcttgactcccgttctgttcatgatttgcctctggtccagtttctcatctctggactgcaacggtcttcttgtgctagaactcaggctcagcctcgaattccacagacgaagtactttcttttgtctgcgccaagaggaatgtgttcagaagctgctgcctgagggcagggcctacctgggcacacagaagagcatatgggagggcaggggtttgggtgtgggtgcacacaaagcaagcaccatctgggattggcacactggcagagccagtgtgttggggtatgtgctgcacttcccagggagaaaacctgtcagaactttccatacgagtatatcagaacacacccttccaaggtatgtatgctctgttgttcctgtcctgtcttcactgagcgcagggctggaggcctcttagacattctccttggtcctcgttcagctgcccactgtagtatccacagtgcccgagttctcgctggttttggcaattaaacctccttcctactggtttagactacacttacaacaaggaaaatgcccctcgtgtgaccatagattgagatttataccacataccacacatagccacagaaacatcatcttgaaataaagaagagttttggacaaaaa

SEQ ID NO: 365831 - DNA, 3758 bp, Homo sapiens
ttccgcttcgggctcgctgacttccggcttagggccgagggtggggaactgccgggcgcggaagcgatgggcatatctgtggcttattttcagcactgtcgcgcagacagtggcgcgatctcagctcactgcagcccccgcctgccgggctcccaaggtgctgggattacagcagcaccgcggatgtgacgtttggtgttcctgtgaacgtggggcggggcgggtcgtttgcttgctcagtgcctagacgatggtggtggaaagacgcttctgtgggttaggtcctaacggttaggaaggattcacaggcgggtcatgaggaaggagcagacccctcgggcagaagcccgcgaggagcactgggtgtggtgggggcaggggtgcctcctctgtcaagtggagatcggcgcctcgctcgtgcctgcgagtgcgcgccgcgtcgaatacagccgtacagaacgcactacaggaaagtgaagccgggagagagactgggaggcggcgcggggactgggggccgtagacgcctttgctcccgggcacttgttagaagagcgagtggatcgcgcttcctgtgcgtcactgaatcctcatgacggccactgaaacggacacgcaggatctttgcttttcaagagggaactgagtccaggccagactgggttgctcccctttctctcggcccctccacctttgcaagtgctgctccttctgcctggagtggctcctccagtcttttcccggctcacttcccaccgtccggtgtcagcaaaaacagcacttcctcacagcccgttgcagcccagcagtcgccttttgcttcttttgaagcacagccctgtgaccgcctcgtgtccttttgtttttccttgtcccccttcccctctggaacataagctccacaaaggcagggacctgggaatcccgttcgcctgcattccccagcaaacgcctaacgaacccaatggcccaggactgaaaattcctttccacttcggctttcccctctacatcccatcggttctgtggagctcgaggggcgtcactgtgtgtgtggcagggcacggtgggggctgagatcgtttcctgttggaacttctggcccaagaagcgcgggtcacaaggagaggggtcagttcggttcagagcgactcagcccctcgactcgggtcttaaaacctccgagccgccagttctgcctcaggccgcgcccccttaaagcgccaccagacgctgcgccccgttaaagcgccaccagacgccgcgccccgtcccggcctcccccgcgcgctggcgcggggctttctgggccagggcggggccggcgaactgcggcccggaacggctgaggaagggcccgtcccgccttccccggcgcgccatggagccccgggcggttgcagaagccgtggagacgggtgaggaggatgtgattatggaagctctgcggtcatacaaccaggagcactcccagagcttcacgtttgatgatgcccaacaggaggaccggaagagactggcggagctgctggtctccgtcctggaacagggcttgccaccctcccaccgtgtcatctggctgcagagtgtccgaatcctgtcccgggaccgcaactgcctggacccgttcaccagccgccagagcctgcaggcactagcctgctatgctgacatctctgtctctgaggggtccgtcccagagtccgcagacatggatgttgtactggagtccctcaagtgcctgtgcaacctcgtgctcagcagccctgtggcacagatgctggcagcagaggcccgcctagtggtgaagctcacagagcgtgtggggctgtaccgtgagaggagcttcccccacgatgtccagttctttgacttgcggctcctcttcctgctaacggcactccgcaccgatgtgcgccagcagctgtttcaggagctgaaaggagtgcgcctgctaactgacacactggagctgacgctgggggtgactcctgaagggaaccccccacccacgctccttccttcccaagagactgagcgggccatggagatcctcaaagtgctcttcaacatcaccctggactccatcaagggggaggtggacgaggaagacgctgccctttaccgacacctggggacccttctccggcactgtgtgatgatcgctactgctggagaccgcacagaggagttccacggccacgcagtgaacctcctggggaacttgcccctcaagtgtctggatgttctcctcaccctggagccacatggagactccacggagttcatgggagtgaatatggatgtgattcgtgccctcctcatcttcctagagaagcgtttgcacaagacacacaggctgaaggagagtgtagctcccgtgctgagcgtgctgactgaatgtgcccggatgcaccgcccagccaggaagttcctgaaggcccagggatggccacctccccaggtgctgccccctctgcgggatgtgaggacacggcctgaggttggggagatgctgcggaacaagcttgtccgcctcatgacacacctggacacagatgtgaagagggtggctgccgagttcttgtttgtcctgtgctctgagagtgtgccccgattcatcaagtacacaggctatgggaatgctgctggccttctggctgccaggggcctcatggcaggaggccggcccgagggccagtactcagaggatgaggacacagacacagatgagtacaaggaagccaaagccagcataaaccctgtgaccgggagggtggaggagaagccgcctaaccctatggagggcatgacagaggagcagaaggagcacgaggccatgaagctggtgaccatgtttgacaagctctccaggaacagagtcatccagccaatggggatgagtccccggggtcatcttacgtccctgcaggatgccatgtgcgagactatggagcagcagctctcctcggaccctgactcggaccctgactgaggatggcagctcttctgctcccccatcaggactggtgctgcttccagagacttccttggggttgcaacctggggaagccacatcccactggatccacacccgcccccacttctccatcttagaaaccccttctcttgactcccgttctgttcatgatttgcctctggtccagtttctcatctctggactgcaacggtcttcttgtgctagaactcaggctcagcctcgaattccacagacgaagtactttcttttgtctgcgccaagaggaatgtgttcagaagctgctgcctgagggcagggcctacctgggcacacagaagagcatatgggagggcaggggtttgggtgtgggtgcacacaaagcaagcaccatctgggattggcacactggcagagccagtgtgttggggtatgtgctgcacttcccagggagaaaacctgtcagaactttccatacgagtatatcagaacacacccttccaaggtatgtatgctctgttgttcctgtcctgtcttcactgagcgcagggctggaggcctcttagacattctccttggtcctcgttcagctgcccactgtagtatccacagtgcccgagttctcgctggttttggcaattaaacctccttcctactggtttagactacacttacaacaaggaaaatgcccctcgtgtgaccatagattgagatttataccacataccacacatagccacagaaacatcatcttgaaataaagaagagttttggacaaaaa

SEQ ID NO: 365832 - DNA, 2210 bp, Homo sapiens
  misc_feature (10)..(10): n is a, c, g, or t
cggaggaacnaccaaacttaggctaggtacgaggctgcgtgtcatctggctgcagagtgtccgaatcctgtcccgggaccgcaactgcctggacccgttcaccagccgccagagcctgcaggcactagcctgctatgctgacatctctgtctctgaggggtccgtcccagagtccgcagacatggatgttgtactggagtccctcaagtgcctgtgcaacctcgtgctcagcagccctgtggcacagatgctggcagcagaggcccgcctagtggtgaagctcacagagcgtgtggggctgtaccgtgagaggagcttcccccacgatgtccagttctttgacttgcggctcctcttcctgctaacggcactccgcaccgatgtgcgccagcagctgtttcaggagctgaaaggagtgcgcctgctaactgacacactggagctgacgctgggggtgactcctgaagggaaccccccacccacgctccttccttcccaagagactgagcgggccatggagatcctcaaagtgctcttcaacatcaccctggactccatcaagggggaggtggacgaggaagacgctgccctttaccgacacctggggacccttctccggcactgtgtgatgatcgctactgctggagaccgcacagaggagttccacggccacgcagtgaacctcctggggaacttgcccctcaagtgtctggatgttctcctcaccctggagccacatggagactccacggagttcatgggagtgaatatggatgtgattcgtgccctcctcatcttcctagagaagcgtttgcacaagacacacaggctgaaggagagtgtagctcccgtgctgagcgtgctgactgaatgtgcccggatgcaccgcccagccaggaagttcctgaaggcccaggtgctgccccctctgcgggatgtgaggacacggcctgaggttggggagatgctgcggaacaagcttgtccgcctcatgacacacctggacacagatgtgaagagggtggctgccgagttcttgtttgtcctgtgctctgagagtgtgccccgattcatcaagtacacaggctatgggaatgctgctggccttctggctgccaggggcctcatggcaggaggccggcccgagggccagtactcagaggatgaggacacagacacagatgagtacaaggaagccaaagccagcataaaccctgtgaccgggagggtggaggagaagccgcctaaccctatggagggcatgacagaggagcagaaggagcacgaggccatgaagctggtgaccatgtttgacaagctctccaggaacagagtcatccagccaatggggatgagtccccggggtcatcttacgtccctgcaggatgccatgtgcgagactatggagcagcagctctcctcggaccctgactcggaccctgactgaggatggcagctcttctgctcccccatcaggactggtgctgcttccagagacttccttggggttgcaacctggggaagccacatcccactggatccacacccgcccccacttctccatcttagaaaccccttctcttgactcccgttctgttcatgatttgcctctggtccagtttctcatctctggactgcaacggtcttcttgtgctagaactcaggctcagcctcgaattccacagacgaagtactttcttttgtctgcgccaagaggaatgtgttcagaagctgctgcctgagggcagggcctacctgggcacacagaagagcatatgggagggcaggggtttgggtgtgggtgcacacaaagcaagcaccatctgggattggcacactggcagagccagtgtgttggggtatgtgctgcacttcccagggagaaaacctgtcagaactttccatacgagtatatcagaacacacccttccaaggtatgtatgctctgttgttcctgtcctgtcttcactgagcgcagggctggaggcctcttagacattctccttggtcctcgttcagctgcccactgtagtatccacagtgcccgagttctcgctggttttggcaattaaacctccttcctactggtttagactacacttacaacaaggaaaatgcccctcgtgtgaccatagattgagatttataccacataccacacatagccacagaaacatcatcttgaaataaagaagagttttggacaaaaa

SEQ ID NO: 365833 - DNA, 3817 bp, Homo sapiens
ttccgcttcgggctcgctgacttccggcttagggccgagggtggggaactgccgggcgcggaagcgatgggcatatctgtggcttattttcagcactgtcgcgcagacagtggcgcgatctcagctcactgcagcccccgcctgccgggctcccaaggtgctgggattacagcagcaccgcggatgtgacgtttggtgttcctgtgaacgtggggcggggcgggtcgtttgcttgctcagtgcctagacgatggtggtggaaagacgcttctgtgggttaggtcctaacggttaggaaggattcacaggcgggtcatgaggaaggagcagacccctcgggcagaagcccgcgaggagcactgggtgtggtgggggcaggggtgcctcctctgtcaagtggagatcggcgcctcgctcgtgcctgcgagtgcgcgccgcgtcgaatacagccgtacagaacgcactacaggaaagtgaagccgggagagagactgggaggcggcgcggggactgggggccgtagacgcctttgctcccgggcacttgttagaagagcgagtggatcgcgcttcctgtgcgtcactgaatcctcatgacggccactgaaacggacacgcaggatctttgcttttcaagagggaactgagtccaggccagactgggttgctcccctttctctcggcccctccacctttgcaagtgctgctccttctgcctggagtggctcctccagtcttttcccggctcacttcccaccgtccggtgtcagcaaaaacagcacttcctcacagcccgttgcagcccagcagtcgccttttgcttcttttgaagcacagccctgtgaccgcctcgtgtccttttgtttttccttgtcccccttcccctctggaacataagctccacaaaggcagggacctgggaatcccgttcgcctgcattccccagcaaacgcctaacgaacccaatggcccaggactgaaaattcctttccacttcggctttcccctctacatcccatcggttctgtggagctcgaggggcgtcactgtgtgtgtggcagggcacggtgggggctgagatcgtttcctgttggaacttctggcccaagaagcgcgggtcacaaggagaggggtcagttcggttcagagcgactcagcccctcgactcgggtcttaaaacctccgagccgccagttctgcctcaggccgcgcccccttaaagcgccaccagacgctgcgccccgttaaagcgccaccagacgccgcgccccgtcccggcctcccccgcgcgctggcgcggggctttctgggccagggcggggccggcgaactgcggcccggaacggctgaggaagggcccgtcccgccttccccggcgcgccatggagccccgggcggttgcagaagccgtggagacgggtgaggaggatgtgattatggaagctctgcggtcatacaaccaggagcactcccagagcttcacgtttgatgatgcccaacaggaggaccggaagagactggcggagctgctggtctccgtcctggaacagggcttgccaccctcccaccgtgtcatctggctgcagagtgtccgaatcctgtcccgggaccgcaactgcctggacccgttcaccagccgccagagcctgcaggcactagcctgctatgctgacatctctgtctctgaggggtccgtcccagagtccgcagacatggatgttgtactggagtccctcaagtgcctgtgcaacctcgtgctcagcagccctgtggcacagatgctggcagcagaggcccgcctagtggtgaagctcacagagcgtgtggggctgtaccgtgagaggagcttcccccacgatgtccagttctttgacttgcggctcctcttcctgctaacggcactccgcaccgatgtgcgccagcagctgtttcaggagctgaaaggagtgcgcctgctaactgacacactggagctgacgctgggggtgactcctgaagggaaccccccacccacgctccttccttcccaagagactgagcgggccatggagatcctcaaagtgctcttcaacatcaccctggactccatcaagggggaggtggacgaggaagacgctgccctttaccgacacctggggacccttctccggcactgtgtgatgatcgctactgctggagaccgcacagaggagttccacggccacgcagtgaacctcctggggaacttgcccctcaagtgtctggatgttctcctcaccctggagccacatggagactccacggagttcatgggagtgaatatggatgtgattcgtgccctcctcatcttcctagagaagcgtttgcacaagacacacaggctgaaggagagtgtagctcccgtgctgagcgtgctgactgaatgtgcccggatgcaccgcccagccaggaagttcctgaaggcccaggtgctgccccctctgcgggatgtgaggacacggcctgaggttggggagatgctgcggaacaagcttgtccgcctcatgacacacctggacacagatgtgaagagggtggctgccgagttcttgtttgtcctgtgctctgagagtggtgagttatggagacccaggtcccagcccaccccacctcagccaggcttgcacactgacctctgccttgcccctcagtgccccgattcatcaagtacacaggctatgggaatgctgctggccttctggctgccaggggcctcatggcaggaggccggcccgagggccagtactcagaggatgaggacacagacacagatgagtacaaggaagccaaagccagcataaaccctgtgaccgggagggtggaggagaagccgcctaaccctatggagggcatgacagaggagcagaaggagcacgaggccatgaagctggtgaccatgtttgacaagctctccaggaacagagtcatccagccaatggggatgagtccccggggtcatcttacgtccctgcaggatgccatgtgcgagactatggagcagcagctctcctcggaccctgactcggaccctgactgaggatggcagctcttctgctcccccatcaggactggtgctgcttccagagacttccttggggttgcaacctggggaagccacatcccactggatccacacccgcccccacttctccatcttagaaaccccttctcttgactcccgttctgttcatgatttgcctctggtccagtttctcatctctggactgcaacggtcttcttgtgctagaactcaggctcagcctcgaattccacagacgaagtactttcttttgtctgcgccaagaggaatgtgttcagaagctgctgcctgagggcagggcctacctgggcacacagaagagcatatgggagggcaggggtttgggtgtgggtgcacacaaagcaagcaccatctgggattggcacactggcagagccagtgtgttggggtatgtgctgcacttcccagggagaaaacctgtcagaactttccatacgagtatatcagaacacacccttccaaggtatgtatgctctgttgttcctgtcctgtcttcactgagcgcagggctggaggcctcttagacattctccttggtcctcgttcagctgcccactgtagtatccacagtgcccgagttctcgctggttttggcaattaaacctccttcctactggtttagactacacttacaacaaggaaaatgcccctcgtgtgaccatagattgagatttataccacataccacacatagccacagaaacatcatcttgaaataaagaagagttttggacaaaaa

SEQ ID NO: 365834 - DNA, 4170 bp, Homo sapiens
ttccgcttcgggctcgctgacttccggcttagggccgagggtggggaactgccgggcgcggaagcgatgggcatatctgtggcttattttcagcactgtcgcgcagacagtggcgcgatctcagctcactgcagcccccgcctgccgggctcccaaggtgctgggattacagcagcaccgcggatgtgacgtttggtgttcctgtgaacgtggggcggggcgggtcgtttgcttgctcagtgcctagacgatggtggtggaaagacgcttctgtgggttaggtcctaacggttaggaaggattcacaggcgggtcatgaggaaggagcagacccctcgggcagaagcccgcgaggagcactgggtgtggtgggggcaggggtgcctcctctgtcaagtggagatcggcgcctcgctcgtgcctgcgagtgcgcgccgcgtcgaatacagccgtacagaacgcactacaggaaagtgaagccgggagagagactgggaggcggcgcggggactgggggccgtagacgcctttgctcccgggcacttgttagaagagcgagtggatcgcgcttcctgtgcgtcactgaatcctcatgacggccactgaaacggacacgcaggatctttgcttttcaagagggaactgagtccaggccagactgggttgctcccctttctctcggcccctccacctttgcaagtgctgctccttctgcctggagtggctcctccagtcttttcccggctcacttcccaccgtccggtgtcagcaaaaacagcacttcctcacagcccgttgcagcccagcagtcgccttttgcttcttttgaagcacagccctgtgaccgcctcgtgtccttttgtttttccttgtcccccttcccctctggaacataagctccacaaaggcagggacctgggaatcccgttcgcctgcattccccagcaaacgcctaacgaacccaatggcccaggactgaaaattcctttccacttcggctttcccctctacatcccatcggttctgtggagctcgaggggcgtcactgtgtgtgtggcagggcacggtgggggctgagatcgtttcctgttggaacttctggcccaagaagcgcgggtcacaaggagaggggtcagttcggttcagagcgactcagcccctcgactcgggtcttaaaacctccgagccgccagttctgcctcaggccgcgcccccttaaagcgccaccagacgctgcgccccgttaaagcgccaccagacgccgcgccccgtcccggcctcccccgcgcgctggcgcggggctttctgggccagggcggggccggcgaactgcggcccggaacggctgaggaagggcccgtcccgccttccccggcgcgccatggagccccgggcggttgcagaagccgtggagacgggtgaggaggatgtgattatggaagctctgcggtcatacaaccaggagcactcccagagcttcacgtttgatgatgcccaacaggaggaccggaagagactggcggagctgctggtctccgtcctggaacagggcttgccaccctcccaccgtgtcatctggctgcagagtgtccgaatcctgtcccgggaccgcaactgcctggacccgttcaccagccgccagagcctgcaggcactagcctgctatgctgacatctctgtctctgaggggtccgtcccagagtccgcagacatggatgttgtactggagtccctcaagtgcctgtgcaacctcgtgctcagcagccctgtggcacagatgctggcagcagaggcccgcctagtggtgaagctcacagagcgtgtggggctgtaccgtgagaggagcttcccccacgatgtccagttctttgacttgcggctcctcttcctgctaacggcactccgcaccgatgtgcgccagcagctgtttcaggagctgaaaggagtgcgcctgctaactgacacactggagctgacgctgggggtgactcctgaagggaaccccccacccacgctccttccttcccaagagactgagcgggccatggagatcctcaaagtgctcttcaacatcaccctggactccatcaagggggaggtggacgaggaagacgctgccctttaccgacacctggggacccttctccggcactgtgtgatgatcgctactgctggagaccgcacagaggagttccacggccacgcagtgaacctcctggggaacttgcccctcaagtgtctggatgttctcctcaccctggagccacatggagactccacggagttcatgggagtgaatatggatgtgattcgtgccctcctcatcttcctagagaagcgtttgcacaagacacacaggctgaaggagagtgtagctcccgtgctgagcgtgctgactgaatgtgcccggatgcaccgcccagccaggaagttcctgaaggcccaggtgctgccccctctgcgggatgtgaggacacggcctgaggttggggagatgctgcggaacaagcttgtccgcctcatgacacacctggacacagatgtgaagagggtggctgccgagttcttgtttgtcctgtgctctgagagtgtgccccgattcatcaagtacacaggctatgggaatgctgctggccttctggctgccaggggcctcatggcaggaggccggcccgagggccagtactcagaggatgaggacacagacacagatgagtacaaggaagccaaagccagcataaaccctgtgaccgggagggtggaggagaagccgcctaaccctatggagggcatgacagaggagcagaaggagcacgaggccatgaagctggtgaccatgtttgacaagctctccaggaacagagtcatccagccaatggggatgagtccccggggtcatcttacgtccctgcaggatgccatgtgcgagactatggagcagcagctctcctcggaccctgactcggaccctgactgaggatggcagctcttctgctcccccatcaggactggtgctgcttccagagacttccttggggttgcaacctggggaagccacatcccactggatccacacccgcccccacttctccatcttagaaaccccttctcttgactcccgttctgttcatgatttgcctctggtccagtttctcatctctggactgcaacggtcttcttgtgctagaactcaggctcagcctcgaattccacagacgaagtactttcttttgtctgcgccaagaggaatgtgttcagaagctgctgcctgagggcagggcctacctgggcacacagaagagcatatgggagggcaggggtttgggtgtgggtgcacacaaagcaagcaccatctgggattggcacactggcagagccagtgtgttggggtatgtgctgcacttcccagggagaaaacctgtcagaactttccatacgagtatatcagaacacacccttccaaggtatgtatgctctgttgttcctgtcctgtcttcactgagcgcagggctggaggcctcttagacattctccttggtcctcgttcagctgcccactgtagtatccacagtgcccgagttctcgctggttttggcaattaaacctccttcctactggtttagactacacttacaacaaggaaaatgcccctcgtgtgaccatagattgagatttataccacataccacacatagccacagaaacatcatcttgaaataaagaagagttttggacaaaaatgtatgtgtaaattatcaaataaaggggccaggcacagtggctcatgcctgtaatcccagcactttgggaggccgaggtgggtggatcacttgaagccaggagttcgagaccagcctggccaacatagcaaaaccttgtctctattacaaatatgcccatgtgctaggtgtggtgggacacacctgtaatcccagctacccaggagaatcgcttaaacccgggaggcggaagttgcagtgagctgagatcgtaacaccgcactccaccctgagtgacagggcaagactcaaaaaataaaaaaggaacattaactagggttagaaactaacttcattctttttagaattcaacagttttcctaggtcaccaattccaccttttgttcttattaaggcgcaaagtcacaggacccccttcctgggagtcact

SEQ ID NO: 365835 - DNA, 1513 bp, Homo sapiens
tattgctcaaggctgttctagaggatcccagtgtgagcctactttaactccacggagttcatgggagtgaatatggatgtgattcgtgccctcctcatcttcctagagaagcgtttgcacaagacacacaggctgaaggagagtgtagctcccgtgctgagcgtgctgactgaatgtgcccggatgcaccgcccagccaggaagttcctgaaggcccaggtgctgccccctctgcgggatgtgaggacacggcctgaggttggggagatgctgcggaacaagcttgtccgcctcatgacacacctggacacagatgtgaagagggtggctgccgagttcttgtttgtcctgtgctctgagagtgtgccccgattcatcaagtacacaggctatgggaatgctgctggccttctggctgccaggggcctcatggcaggaggccggcccgagggccagtactcagaggatgaggacacagacacagatgagtacaaggaagccaaagccagcataaaccctgtgaccgggagggtggaggagaagccgcctaaccctatggagggcatgacagaggagcagaaggagcacgaggccatgaagctggtgaccatgtttgacaagctctccaggaacagagtcatccagccaatggggatgagtccccggggtcatcttacgtccctgcaggatgccatgtgcgagactatggagcagcagctctcctcggaccctgactcggaccctgactgaggatggcagctcttctgctcccccatcaggactggtgctgcttccagagacttccttggggttgcaacctggggaagccacatcccactggatccacacccgcccccacttctccatcttagaaaccccttctcttgactcccgttctgttcatgatttgcctctggtccagtttctcatctctggactgcaacggtcttcttgtgctagaactcaggctcagcctcgaattccacagacgaagtactttcttttgtctgcgccaagaggaatgtgttcagaagctgctgcctgagggcagggcctacctgggcacacagaagagcatatgggagggcaggggtttgggtgtgggtgcacacaaagcaagcaccatctgggattggcacactggcagagccagtgtgttggggtatgtgctgcacttcccagggagaaaacctgtcagaactttccatacgagtatatcagaacacacccttccaaggtatgtatgctctgttgttcctgtcctgtcttcactgagcgcagggctggaggcctcttagacattctccttggtcctcgttcagctgcccactgtagtatccacagtgcccgagttctcgctggttttggcaattaaacctccttcctactggtttagactacacttacaacaaggaaaatgcccctcgtgtgaccatagattgagatttataccacataccacacatagccacagaaacatcatcttgaaataaagaagagttttggacaaaaa

SEQ ID NO: 365836 - DNA, 2543 bp, Homo sapiens
ttccgcttcgggctcgctgacttccggcttagggccgagggtggggaactgccgggcgcggaagcgatgggcatatctgtggcttattttcagcactgtcgcgcagacagtggcgcgatctcagctcactgcagcccccgcctgccgggctcccaaggtgctgggattacagcagcaccgcggatgtgacgtttggtgttcctgtgaacgtggggcggggcgggtcgtttgcttgctcagtgcctagacgatggtggtggaaagacgcttctgtgggttaggtcctaacggttaggaaggattcacaggcgggtcatgaggaaggagcagacccctcgggcagaagcccgcgaggagcactgggtgtggtgggggcaggggtgcctcctctgtcaagtggagatcggcgcctcgctcgtgcctgcgagtgcgcgccgcgtcgaatacagccgtacagaacgcactacaggaaagtgaagccgggagagagactgggaggcggcgcggggactgggggccgtagacgcctttgctcccgggcacttgttagaagagcgagtggatcgcgcttcctgtgcgtcactgaatcctcatgacggccactgaaacggacacgcaggatctttgcttttcaagagggaactgagtccaggccagactgggttgctcccctttctctcggcccctccacctttgcaagtgctgctccttctgcctggagtggctcctccagtcttttcccggctcacttcccaccgtccggtgtcagcaaaaacagcacttcctcacagcccgttgcagcccagcagtcgccttttgcttcttttgaagcacagccctgtgaccgcctcgtgtccttttgtttttccttgtcccccttcccctctggaacataagctccacaaaggcagggacctgggaatcccgttcgcctgcattccccagcaaacgcctaacgaacccaatggcccaggactgaaaattcctttccacttcggctttcccctctacatcccatcggttctgtggagctcgaggggcgtcactgtgtgtgtggcagggcacggtgggggctgagatcgtttcctgttggaacttctggcccaagaagcgcgggtcacaaggagaggggtcagttcggttcagagcgactcagcccctcgactcgggtcttaaaacctccgagccgccagttctgcctcaggccgcgcccccttaaagcgccaccagacgctgcgccccgttaaagcgccaccagacgccgcgccccgtcccggcctcccccgcgcgctggcgcggggctttctgggccagggcggggccggcgaactgcggcccggaacggctgaggaagggcccgtcccgccttccccggcgcgccatggagccccgggcggttgcagaagccgtggagacgggtgaggaggatgtgattatggaagctctgcggtcatacaaccaggagcactcccagagcttcacgtttgatgatgcccaacaggaggaccggaagagactggcggagctgctggtctccgtcctggaacagggcttgccaccctcccaccgtgtcatctggctgcagagtgtccgaatcctgtcccgggaccgcaactgcctggacccgttcaccagccgccagagcctgcaggcactagcgaacagagtcatccagccaatggggatgagtccccggggtcatcttacgtccctgcaggatgccatgtgcgagactatggagcagcagctctcctcggaccctgactcggaccctgactgaggatggcagctcttctgctcccccatcaggactggtgctgcttccagagacttccttggggttgcaacctggggaagccacatcccactggatccacacccgcccccacttctccatcttagaaaccccttctcttgactcccgttctgttcatgatttgcctctggtccagtttctcatctctggactgcaacggtcttcttgtgctagaactcaggctcagcctcgaattccacagacgaagtactttcttttgtctgcgccaagaggaatgtgttcagaagctgctgcctgagggcagggcctacctgggcacacagaagagcatatgggagggcaggggtttgggtgtgggtgcacacaaagcaagcaccatctgggattggcacactggcagagccagtgtgttggggtatgtgctgcacttcccagggagaaaacctgtcagaactttccatacgagtatatcagaacacacccttccaaggtatgtatgctctgttgttcctgtcctgtcttcactgagcgcagggctggaggcctcttagacattctccttggtcctcgttcagctgcccactgtagtatccacagtgcccgagttctcgctggttttggcaattaaacctccttcctactggtttagactacacttacaacaaggaaaatgcccctcgtgtgaccatagattgagatttataccacataccacacatagccacagaaacatcatcttgaaataaagaagagttttggacaaaaa

SEQ ID NO: 365837 - DNA, 916 bp, Homo sapiens
tgttcctggagagcttgtcaaacatggtcaccgaacagagtcatccagccaatggggatgagtccccggggtcatcttacgtccctgcaggatgccatgtgcgagactatggagcagcagctctcctcggaccctgactcggaccctgactgaggatggcagctcttctgctcccccatcaggactggtgctgcttccagagacttccttggggttgcaacctggggaagccacatcccactggatccacacccgcccccacttctccatcttagaaaccccttctcttgactcccgttctgttcatgatttgcctctggtccagtttctcatctctggactgcaacggtcttcttgtgctagaactcaggctcagcctcgaattccacagacgaagtactttcttttgtctgcgccaagaggaatgtgttcagaagctgctgcctgagggcagggcctacctgggcacacagaagagcatatgggagggcaggggtttgggtgtgggtgcacacaaagcaagcaccatctgggattggcacactggcagagccagtgtgttggggtatgtgctgcacttcccagggagaaaacctgtcagaactttccatacgagtatatcagaacacacccttccaaggtatgtatgctctgttgttcctgtcctgtcttcactgagcgcagggctggaggcctcttagacattctccttggtcctcgttcagctgcccactgtagtatccacagtgcccgagttctcgctggttttggcaattaaacctccttcctactggtttagactacacttacaacaaggaaaatgcccctcgtgtgaccatagattgagatttataccacataccacacatagccacagaaacatcatcttgaaataaagaagagttttggacaaaaa

SEQ ID NO: 365838 - DNA, 479 bp, Homo sapiens
catagtccctgcttccacacccatgtggacccctgtagggtgggacaggatgacaaatgggcaagagcttccagaatcaagcacctgttcctaagtgctatctgggataccagaaggtggcagatggcaggagctggttacctgtgccgcttctggagggaggcctcttcctgcagttgccttgcccacctcaccccactgggaaaataggtggcttgcctcctgtcctggagagtcactaatgcattccccacattccacccactgggaaacagcataaaccctgtgaccgggagggtggaggagaagccgcctaaccctatggagggcatgacagaggagcagaaggagcacgaggccatgaagctggtgaccatgtttgacaagctctccaggtgtgtggcatgaggaggaggggcctgcagctgggagaagggagagctgacccacatcctgtcttgtgagccccaggaggtagg

SEQ ID NO: 365839 - DNA, 634 bp, Homo sapiens
ctttaattgctttgtgttttcttcccagctctggtttatagttgaagtaattagacttaaagcagttatttctcccaagtcacaaagcttacgagtacctctgagttacgctctatccctgtccttttcaaaagtgacacagacacccaccacccactcttggccttctgctgactaactgcagaggggcctcttcccaaacctctgccgccaggaccagctgttgtgtatgttggtgggaaggggtggtggggaggtgtaactctgtgccagtcacaagttaggcaggggcatagccccagtgacagagaatcctctacagacacacaggctgaaggagagtgtagctcccgtgctgagcgtgctgactgaatgtgcccggatgcaccgcccagccaggaagttcctgaaggcccaggtataaggctgaggagctggtgctcctgggggatgtggtttcggccctgatcacagacccttggctgctctaagcccaagcttagggatggccacctccccaggtgctgccccctctgcgggatgtgaggacacggcctgaggttggggagatgctgcggaacaagcttgtccgcctcatgacacacctggacacagatgtgaagagggtggctgc

SEQ ID NO: 365840 - DNA, 2493 bp, Homo sapiens
gcggcggggtgcggggggcaggtctgggatgcagtgttgcggggagagtgggggtgcacccgttgggtggcaggcgtgtagggatgggggcgagtgccgaccctgccatccgttctgagcagtggctgctgcctgagttagaggccaataggccgcccgcatcagcggacgcggatcctacccctctgtggatttgaattcactagttctctctgcagcactcccagagcttcacgtttgatgatgcccaacaggaggaccggaagagactggcggagctgctggtctccgtcctggaacagggcttgccaccctcccaccgtgtcatctggctgcagagtgtccgaatcctgtcccgggaccgcaactgcctggacccgttcaccagccgccagagcctgcaggcactagcctgctatgctgacatctctgtctctgaggggtccgtcccagagtccgcagacatggatgttgtactggagtccctcaagtgcctgtgcaacctcgtgctcagcagccctgtggcacagatgctggcagcagaggcccgcctagtggtgaagctcacagagcgtgtggggctgtaccgtgagaggagcttcccccacgatgtccagttctttgacttgcggctcctcttcctgctaacggcactccgcaccgatgtgcgccagcagctgtttcaggagctgaaaggagtgcgcctgctaactgacacactggagctgacgctgggggtgactcctgaagggaaccccccacccacgctccttccttcccaagagactgagcgggccatggagatcctcaaagtgctcttcaacatcaccctggactccatcaagggggaggtggacgaggaagacgctgccctttaccgacacctggggacccttctccggcactgtgtgatgatcgctactgctggagaccgcacagaggagttccacggccacgcagtgaacctcctggggaacttgcccctcaagtgtctggatgttctcctcaccctggagccacatggagactccacggagttcatgggagtgaatatggatgtgattcgtgccctcctcatcttcctagagaagcgtttgcacaagacacacaggctgaaggagagtgtagctcccgtgctgagcgtgctgactgaatgtgcccggatgcaccgcccagccaggaagttcctgaaggcccaggtgctgccccctctgcgggatgtgaggacacggcctgaggttggggagatgctgcggaacaagcttgtccgcctcatgacacacctggacacagatgtgaagagggtggctgccgagttcttgtttgtcctgtgctctgagagtgtgccccgattcatcaagtacacaggctatgggaatgctgctggccttctggctgccaggggcctcatggcaggaggccggcccgagggccagtactcagaggatgaggacacagacacagatgagtacaaggaagccaaagccagcataaaccctgtgaccgggagggtggaggagaagccgcctaaccctatggagggcatgacagaggagcagaaggagcacgaggccatgaagctggtgaccatgtttgacaagctctccaggaacagagtcatccagccaatggggatgagtccccggggtcatcttacgtccctgcaggatgccatgtgcgagactatggagcagcagctctcctcggaccctgactcggaccctgactgaggatggcagctcttctgctcccccatcaggactggtgctgcttccagagacttccttggggttgcaacctggggaagccacatcccactggatccacacccgcccccacttctccatcttagaaaccccttctcttgactcccgttctgttcatgatttgcctctggtccagtttctcatctctggactgcaacggtcttcttgtgctagaactcaggctcagcctcgaattccacagacgaagtactttcttttgtctgcgccaagaggaatgtgttcagaagctgctgcctgagggcagggcctacctgggcacacagaagagcatatgggagggcaggggtttgggtgtgggtgcacacaaagcaagcaccatctgggattggcacactggcagagccagtgtgttggggtatgtgctgcacttcccagggagaaaacctgtcagaactttccatacgagtatatcagaacacacccttccaaggtatgtatgctctgttgttcctgtcctgtcttcactgagcgcagggctggaggcctcttagacattctccttggtcctcgttcagctgcccactgtagtatccacagtgcccgagttctcgctggttttggcaattaaacctccttcctactggtttagactacacttacaacaaggaaaatgcccctcgtgtgaccatagattgagatttataccacataccacacatagccacagaaacatcatcttgaaataaagaagagttttggacaaaaa

SEQ ID NO: 365841 - DNA, 3075 bp, Homo sapiens
ttccgcttcgggctcgctgacttccggcttagggccgagggtggggaactgccgggcgcggaagcgatgggcatatctgtggcttattttcagcactgtcgcgcagacagtggcgcgatctcagctcactgcagcccccgcctgccgggctcccaaggtgctgggattacagcagcaccgcggatgtgacgtttggtgttcctgtgaacgtggggcggggcgggtcgtttgcttgctcagtgcctagacgatggtggtggaaagacgcttctgtgggttaggtcctaacggttaggaaggattcacaggcgggtcatgaggaaggagcagacccctcgggcagaagcccgcgaggagcactgggtgtggtgggggcaggggtgcctcctctgtcaagtggagatcggcgcctcgctcgtgcctgcgagtgcgcgccgcgtcgaatacagccgtacagaacgcactacaggaaagtgaagccgggagagagactgggaggcggcgcggggactgggggccgtagacgcctttgctcccgggcacttgttagaagagcgagtggatcgcgcttcctgtgcgtcactgaatcctcatgacggccactgaaacggacacgcaggatctttgcttttcaagagggaactgagtccaggccagactgggttgctcccctttctctcggcccctccacctttgcaagtgctgctccttctgcctggagtggctcctccagtcttttcccggctcacttcccaccgtccggtgtcagcaaaaacagcacttcctcacagcccgttgcagcccagcagtcgccttttgcttcttttgaagcacagccctgtgaccgcagactggcggagctgctggtctccgtcctggaacagggcttgccaccctcccaccgtgtcatctggctgcagagtgtccgaatcctgtcccgggaccgcaactgcctggacccgttcaccagccgccagagcctgcaggcactagcctgctatgctgacatctctgtctctgaggggtccgtcccagagtccgcagacatggatgttgtactggagtccctcaagtgcctgtgcaacctcgtgctcagcagccctgtggcacagatgctggcagcagaggcccgcctagtggtgaagctcacagagcgtgtggggctgtaccgtgagaggagcttcccccacgatgtccagttctttgacttgcggctcctcttcctgctaacggcactccgcaccgatgtgcgccagcagctgtttcaggagctgaaaggagtgcgcctgctaactgacacactggagctgacgctgggggtgactcctgaagggaaccccccacccacgctccttccttcccaagagactgagcgggccatggagatcctcaaagtgctcttcaacatcaccctggactccatcaagggggaggtggacgaggaagacgctgccctttaccgacacctggggacccttctccggcactgtgtgatgatcgctactgctggagaccgcacagaggagttccacggccacgcagtgaacctcctggggaacttgcccctcaagtgtctggatgttctcctcaccctggagccacatggagactccacggagttcatgggagtgaatatggatgtgattcgtgccctcctcatcttcctagagaagcgtttgcacaagacacacaggctgaaggagagtgtagctcccgtgctgagcgtgctgactgaatgtgcccggatgcaccgcccagccaggaagttcctgaaggcccaggtgctgccccctctgcgggatgtgaggacacggcctgaggttggggagatgctgcggaacaagcttgtccgcctcatgacacacctggacacagatgtgaagagggtggctgccgagttcttgtttgtcctgtgctctgagagtgtgccccgattcatcaagtacacaggctatgggaatgctgctggccttctggctgccaggggcctcatggcaggaggccggcccgagggccagtactcagaggatgaggacacagacacagatgagtacaaggaagccaaagccagcataaaccctgtgaccgggagggtggaggagaagccgcctaaccctatggagggcatgacagaggagcagaaggagcacgaggccatgaagctggtgaccatgtttgacaagctctccaggaacagagtcatccagccaatggggatgagtccccggggtcatcttacgtccctgcaggatgccatgtgcgagactatggagcagcagctctcctcggaccctgactcggaccctgactgaggatggcagctcttctgctcccccatcaggactggtgctgcttccagagacttccttggggttgcaacctggggaagccacatcccactggatccacacccgcccccacttctccatcttagaaaccccttctcttgactcccgttctgttcatgatttgcctctggtccagtttctcatctctggactgcaacggtcttcttgtgctagaactcaggctcagcctcgaattccacagacgaagtactttcttttgtctgcgccaagaggaatgtgttcagaagctgctgcctgagggcagggcctacctgggcacacagaagagcatatgggagggcaggggtttgggtgtgggtgcacacaaagcaagcaccatctgggattggcacactggcagagccagtgtgttggggtatgtgctgcacttcccagggagaaaacctgtcagaactttccatacgagtatatcagaacacacccttccaaggtatgtatgctctgttgttcctgtcctgtcttcactgagcgcagggctggaggcctcttagacattctccttggtcctcgttcagctgcccactgtagtatccacagtgcccgagttctcgctggttttggcaattaaacctccttcctactggtttagactacacttacaacaaggaaaatgcccctcgtgtgaccatagattgagatttataccacataccacacatagccacagaaacatcatcttgaaataaagaagagttttggacaaaaa

SEQ ID NO: 365842 - DNA, 2217 bp, Homo sapiens
tccgccccgccctccccccgccaacagtatgtatagtacgatcccgtgtcatctggctgcagagtgtccgaatcctgtcccgggaccgcaactgcctggacccgttcaccagccgccagagcctgcaggcactagcctgctatgctgacatctctgtctctgaggggtccgtcccagagtccgcagacatggatgttgtactggagtccctcaagtgcctgtgcaacctcgtgctcagcagccctgtggcacagatgctggcagcagaggcccgcctagtggtgaagctcacagagcgtgtggggctgtaccgtgagaggagcttcccccacgatgtccagttctttgacttgcggctcctcttcctgctaacggcactccgcaccgatgtgcgccagcagctgtttcaggagctgaaaggagtgcgcctgctaactgacacactggagctgacgctgggggtgactcctgaagggaaccccccacccacgctccttccttcccaagagactgagcgggccatggagatcctcaaagtgctcttcaacatcaccctggactccatcaagggggaggtggacgaggaagacgctgccctttaccgacacctggggacccttctccggcactgtgtgatgatcgctactgctggagaccgcacagaggagttccacggccacgcagtgaacctcctggggaacttgcccctcaagtgtctggatgttctcctcaccctggagccacatggagactccacggagttcatgggagtgaatatggatgtgattcgtgccctcctcatcttcctagagaagcgtttgcacaagacacacaggctgaaggagagtgtagctcccgtgctgagcgtgctgactgaatgtgcccggatgcaccgcccagccaggaagttcctgaaggcccaggtgctgccccctctgcgggatgtgaggacacggcctgaggttggggagatgctgcggaacaagcttgtccgcctcatgacacacctggacacagatgtgaagagggtggctgccgagttcttgtttgtcctgtgctctgagagtgtgccccgattcatcaagtacacaggctatgggaatgctgctggccttctggctgccaggggcctcatggcaggaggccggcccgagggccagtactcagaggatgaggacacagacacagatgagtacaaggaagccaaagccagcataaaccctgtgaccgggagggtggaggagaagccgcctaaccctatggagggcatgacagaggagcagaaggagcacgaggccatgaagctggtgaccatgtttgacaagctctccaggaacagagtcatccagccaatggggatgagtccccggggtcatcttacgtccctgcaggatgccatgtgcgagactatggagcagcagctctcctcggaccctgactcggaccctgactgaggatggcagctcttctgctcccccatcaggactggtgctgcttccagagacttccttggggttgcaacctggggaagccacatcccactggatccacacccgcccccacttctccatcttagaaaccccttctcttgactcccgttctgttcatgatttgcctctggtccagtttctcatctctggactgcaacggtcttcttgtgctagaactcaggctcagcctcgaattccacagacgaagtactttcttttgtctgcgccaagaggaatgtgttcagaagctgctgcctgagggcagggcctacctgggcacacagaagagcatatgggagggcaggggtttgggtgtgggtgcacacaaagcaagcaccatctgggattggcacactggcagagccagtgtgttggggtatgtgctgcacttcccagggagaaaacctgtcagaactttccatacgagtatatcagaacacacccttccaaggtatgtatgctctgttgttcctgtcctgtcttcactgagcgcagggctggaggcctcttagacattctccttggtcctcgttcagctgcccactgtagtatccacagtgcccgagttctcgctggttttggcaattaaacctccttcctactggtttagactacacttacaacaaggaaaatgcccctcgtgtgaccatagattgagatttataccacataccacacatagccacagaaacatcatcttgaaataaagaagagttttggacaaaaa

SEQ ID NO: 365843 - DNA, 3682 bp, Homo sapiens
ttccgcttcgggctcgctgacttccggcttagggccgagggtggggaactgccgggcgcggaagcgatgggcatatctgtggcttattttcagcactgtcgcgcagacagtggcgcgatctcagctcactgcagcccccgcctgccgggctcccaaggtgctgggattacagcagcaccgcggatgtgacgtttggtgttcctgtgaacgtggggcggggcgggtcgtttgcttgctcagtgcctagacgatggtggtggaaagacgcttctgtgggttaggtcctaacggttaggaaggattcacaggcgggtcatgaggaaggagcagacccctcgggcagaagcccgcgaggagcactgggtgtggtgggggcaggggtgcctcctctgtcaagtggagatcggcgcctcgctcgtgcctgcgagtgcgcgccgcgtcgaatacagccgtacagaacgcactacaggaaagtgaagccgggagagagactgggaggcggcgcggggactgggggccgtagacgcctttgctcccgggcacttgttagaagagcgagtggatcgcgcttcctgtgcgtcactgaatcctcatgacggccactgaaacggacacgcaggatctttgcttttcaagagggaactgagtccaggccagactgggttgctcccctttctctcggcccctccacctttgcaagtgctgctccttctgcctggagtggctcctccagtcttttcccggctcacttcccaccgtccggtgtcagcaaaaacagcacttcctcacagcccgttgcagcccagcagtcgccttttgcttcttttgaagcacagccctgtgaccgcctcgtgtccttttgtttttccttgtcccccttcccctctggaacataagctccacaaaggcagggacctgggaatcccgttcgcctgcattccccagcaaacgcctaacgaacccaatggcccaggactgaaaattcctttccacttcggctttcccctctacatcccatcggttctgtggagctcgaggggcgtcactgtgtgtgtggcagggcacggtgggggctgagatcgtttcctgttggaacttctggcccaagaagcgcgggtcacaaggagaggggtcagttcggttcagagcgactcagcccctcgactcgggtcttaaaacctccgagccgccagttctgcctcaggccgcgcccccttaaagcgccaccagacgctgcgccccgttaaagcgccaccagacgccgcgccccgtcccggcctcccccgcgcgctggcgcggggctttctgggccagggcggggccggcgaactgcggcccggaacggctgaggaagggcccgtcccgccttccccggcgcgccatggagccccgggcggttgcagaagccgtggagacgggtgaggaggatgtgattatggaagctctgcggtcatacaaccaggagcactcccagagcttcacgtttgatgatgcccaacaggaggaccggaagagactggcggagctgctggtctccgtcctggaacagggcttgccaccctcccaccgtgtcatctggctgcagagtgtccgaatcctgtcccgggaccgcaactgcctggacccgttcaccagccgccagagcctgcaggcactagcctgctatgctgacatctctgtctctgaggggtccgtcccagagtccgcagacatggatgttgtactggagtccctcaagtgcctgtgcaacctcgtgctcagcagccctgtggcacagatgctggcagcagaggcccgcctagtggtgaagctcacagagcgtgtggggctgtaccgtgagaggagcttcccccacgatgtccagttctttgacttgcggctcctcttcctgctaacggcactccgcaccgatgtgcgccagcagctgtttcaggagctgaaaggagtgcgcctgctaactgacacactggagctgacgctgggggtgactcctgaagggaaccccccacccacgctccttccttcccaagagactgagcgggccatggagatcctcaaagtgctcttcaacatcaccctggactccatcaagggggaggtggacgaggaagacgctgccctttaccgacacctggggacccttctccggcactgtgtgatgatcgctactgctggagaccgcacagaggagttccacggccacgcagtgaacctcctggggaacttgcccctcaagtgtctggatgttctcctcaccctggagccacatggagactccacggagttcatgggagtgaatatggatgtgattcgtgccctcctcatcttcctagagaagcgtttgcacaagacacacaggctgaaggagagtgtagctcccgtgctgagcgtgctgactgaatgtgcccggatgcaccgcccagccaggaagttcctgaaggcccaggtgctgccccctctgcgggatgtgaggacacggcctgaggttggggagatgctgcggaacaagcttgtccgcctcatgacacacctggacacagatgtgaagagggtggctgccgagttcttgtttgtcctgtgctctgagagtgtgccccgattcatcaagtacacaggctatgggaatgctgctggccttctggctgccaggggcctcatggcaggaggccggcccgagggccagtactcagaggatgaggacacagacacagatgagtacaaggaagccaaagccagcataaaccctgtgaccgggagggtggaggagaagccgcctaaccctatggagggcatgacagaggagcagaaggagcacgaggccatgaagctggtgaccatgtttgacaagctctccaggatgccatgtgcgagactatggagcagcagctctcctcggaccctgactcggaccctgactgaggatggcagctcttctgctcccccatcaggactggtgctgcttccagagacttccttggggttgcaacctggggaagccacatcccactggatccacacccgcccccacttctccatcttagaaaccccttctcttgactcccgttctgttcatgatttgcctctggtccagtttctcatctctggactgcaacggtcttcttgtgctagaactcaggctcagcctcgaattccacagacgaagtactttcttttgtctgcgccaagaggaatgtgttcagaagctgctgcctgagggcagggcctacctgggcacacagaagagcatatgggagggcaggggtttgggtgtgggtgcacacaaagcaagcaccatctgggattggcacactggcagagccagtgtgttggggtatgtgctgcacttcccagggagaaaacctgtcagaactttccatacgagtatatcagaacacacccttccaaggtatgtatgctctgttgttcctgtcctgtcttcactgagcgcagggctggaggcctcttagacattctccttggtcctcgttcagctgcccactgtagtatccacagtgcccgagttctcgctggttttggcaattaaacctccttcctactggtttagactacacttacaacaaggaaaatgcccctcgtgtgaccatagattgagatttataccacataccacacatagccacagaaacatcatcttgaaataaagaagagttttggacaaaaa

SEQ ID NO: 365844 - DNA, 4206 bp, Homo sapiens
  misc_feature (3744)..(3744): n is a, c, g, or t
  misc_feature (4206)..(4206): n is a, c, g, or t
ttccgcttcgggctcgctgacttccggcttagggccgagggtggggaactgccgggcgcggaagcgatgggcatatctgtggcttattttcagcactgtcgcgcagacagtggcgcgatctcagctcactgcagcccccgcctgccgggctcccaaggtgctgggattacagcagcaccgcggatgtgacgtttggtgttcctgtgaacgtggggcggggcgggtcgtttgcttgctcagtgcctagacgatggtggtggaaagacgcttctgtgggttaggtcctaacggttaggaaggattcacaggcgggtcatgaggaaggagcagacccctcgggcagaagcccgcgaggagcactgggtgtggtgggggcaggggtgcctcctctgtcaagtggagatcggcgcctcgctcgtgcctgcgagtgcgcgccgcgtcgaatacagccgtacagaacgcactacaggaaagtgaagccgggagagagactgggaggcggcgcggggactgggggccgtagacgcctttgctcccgggcacttgttagaagagcgagtggatcgcgcttcctgtgcgtcactgaatcctcatgacggccactgaaacggacacgcaggatctttgcttttcaagagggaactgagtccaggccagactgggttgctcccctttctctcggcccctccacctttgcaagtgctgctccttctgcctggagtggctcctccagtcttttcccggctcacttcccaccgtccggtgtcagcaaaaacagcacttcctcacagcccgttgcagcccagcagtcgccttttgcttcttttgaagcacagccctgtgaccgcctcgtgtccttttgtttttccttgtcccccttcccctctggaacataagctccacaaaggcagggacctgggaatcccgttcgcctgcattccccagcaaacgcctaacgaacccaatggcccaggactgaaaattcctttccacttcggctttcccctctacatcccatcggttctgtggagctcgaggggcgtcactgtgtgtgtggcagggcacggtgggggctgagatcgtttcctgttggaacttctggcccaagaagcgcgggtcacaaggagaggggtcagttcggttcagagcgactcagcccctcgactcgggtcttaaaacctccgagccgccagttctgcctcaggccgcgcccccttaaagcgccaccagacgctgcgccccgttaaagcgccaccagacgccgcgccccgtcccggcctcccccgcgcgctggcgcggggctttctgggccagggcggggccggcgaactgcggcccggaacggctgaggaagggcccgtcccgccttccccggcgcgccatggagccccgggcggttgcagaagccgtggagacgggtgaggaggatgtgattatggaagctctgcggtcatacaaccaggagcactcccagagcttcacgtttgatgatgcccaacaggaggaccggaagagactggcggagctgctggtctccgtcctggaacagggcttgccaccctcccaccgtgtcatctggctgcagagtgtccgaatcctgtcccgggaccgcaactgcctggacccgttcaccagccgccagagcctgcaggcactagcctgctatgctgacatctctgtctctgaggggtccgtcccagagtccgcagacatggatgttgtactggagtccctcaagtgcctgtgcaacctcgtgctcagcagccctgtggcacagatgctggcagcagaggcccgcctagtggtgaagctcacagagcgtgtggggctgtaccgtgagaggagcttcccccacgatgtccagttctttgacttgcggctcctcttcctgctaacggcactccgcaccgatgtgcgccagcagctgtttcaggagctgaaaggagtgcgcctgctaactgacacactggagctgacgctgggggtgactcctgaagggaaccccccacccacgctccttccttcccaagagactgagcgggccatggagatcctcaaagtgctcttcaacatcaccctggactccatcaagggggaggtggacgaggaagacgctgccctttaccgacacctggggacccttctccggcactgtgtgatgatcgctactgctggagaccgcacagaggagttccacggccacgcagtgaacctcctggggaacttgcccctcaagtgtctggatgttctcctcaccctggagccacatggagactccacggagttcatgggagtgaatatggatgtgattcgtgccctcctcatcttcctagagaagcgtttgcacaagacacacaggctgaaggagagtgtagctcccgtgctgagcgtgctgactgaatgtgcccggatgcaccgcccagccaggaagttcctgaaggcccaggtgctgccccctctgcgggatgtgaggacacggcctgaggttggggagatgctgcggaacaagcttgtccgcctcatgacacacctggacacagatgtgaagagggtggctgccgagttcttgtttgtcctgtgctctgagagtgtgccccgattcatcaagtacacaggctatgggaatgctgctggccttctggctgccaggggcctcatggcaggaggccggcccgagggccagtactcagaggatgaggacacagacacagatgagtacaaggaagccaaagccagcataaaccctgtgaccgggagggtggaggagaagccgcctaaccctatggagggcatgacagaggagcagaaggagcacgaggccatgaagctggtgaccatgtttgacaagctctccaggaacagagtcatccagccaatggggatgagtccccggggtcatcttacgtccctgcaggatgccatgtgcgagactatggagcagcagctctcctcggaccctgactcggaccctgactgaggatggcagctcttctgctcccccatcaggactggtgctgcttccagagacttccttggggttgcaacctggggaagccacatcccactggatccacacccgcccccacttctccatcttagaaaccccttctcttgactcccgttctgttcatgatttgcctctggtccagtttctcatctctggactgcaacggtcttcttgtgctagaactcaggctcagcctcgaattccacagacgaagtactttcttttgtctgcgccaagaggaatgtgttcagaagctgctgcctgagggcagggcctacctgggcacacagaagagcatatgggagggcaggggtttgggtgtgggtgcacacaaagcaagcaccatctgggattggcacactggcagagccagtgtgttggggtatgtgctgcacttcccagggagaaaacctgtcagaactttccatacgagtatatcagaacacacccttccaaggtatgtatgctctgttgttcctgtcctgtcttcactgagcgcagggctggaggcctcttagacattctccttggtcctcgttcagctgcccactgtagtatccacagtgcccgagttctcgctggttttggcaattaaacctccttcctactggtttagactacacttacaacaaggaaaatgcccctcgtgtgaccatagattgagatttataccacataccacacatagccacagaaacatcatcttgaaataaagaagagttttggacaaaaaaaanaaaaaaaaacactcgagactagttctctcggcaaaagccttggagtcctggtccttttctctcttccccgggacagcaatgaagctttcaaccaacttcggcttccaacctttcttccaccaaacttaccgggctccctggggctctggtccaaggccgcccagcttaggggcgcccgggccgggtccaagcaagcgcgggcaaggggtctatcgcaggggccgctgagggggctcctgggtacccgaggaatctccggaggatcccggcttccaccaggtttcgaggggggcggcagtggggcgtccggggggccgggccaccggggaatagccggggggtctctggaccagagaaatgggaggcactccagaaccgaaaaagggagaccattgcaaaaggccttgaaacaaccggcctgggacatttaaccgtggaccagatgtgaggaacccttggaan

SEQ ID NO: 365845 - DNA, 3754 bp, Homo sapiens
ttccgcttcgggctcgctgacttccggcttagggccgagggtggggaactgccgggcgcggaagcgatgggcatatctgtggcttattttcagcactgtcgcgcagacagtggcgcgatctcagctcactgcagcccccgcctgccgggctcccaaggtgctgggattacagcagcaccgcggatgtgacgtttggtgttcctgtgaacgtggggcggggcgggtcgtttgcttgctcagtgcctagacgatggtggtggaaagacgcttctgtgggttaggtcctaacggttaggaaggattcacaggcgggtcatgaggaaggagcagacccctcgggcagaagcccgcgaggagcactgggtgtggtgggggcaggggtgcctcctctgtcaagtggagatcggcgcctcgctcgtgcctgcgagtgcgcgccgcgtcgaatacagccgtacagaacgcactacaggaaagtgaagccgggagagagactgggaggcggcgcggggactgggggccgtagacgcctttgctcccgggcacttgttagaagagcgagtggatcgcgcttcctgtgcgtcactgaatcctcatgacggccactgaaacggacacgcaggatctttgcttttcaagagggaactgagtccaggccagactgggttgctcccctttctctcggcccctccacctttgcaagtgctgctccttctgcctggagtggctcctccagtcttttcccggctcacttcccaccgtccggtgtcagcaaaaacagcacttcctcacagcccgttgcagcccagcagtcgccttttgcttcttttgaagcacagccctgtgaccgcctcgtgtccttttgtttttccttgtcccccttcccctctggaacataagctccacaaaggcagggacctgggaatcccgttcgcctgcattccccagcaaacgcctaacgaacccaatggcccaggactgaaaattcctttccacttcggctttcccctctacatcccatcggttctgtggagctcgaggggcgtcactgtgtgtgtggcagggcacggtgggggctgagatcgtttcctgttggaacttctggcccaagaagcgcgggtcacaaggagaggggtcagttcggttcagagcgactcagcccctcgactcgggtcttaaaacctccgagccgccagttctgcctcaggccgcgcccccttaaagcgccaccagacgctgcgccccgttaaagcgccaccagacgccgcgccccgtcccggcctcccccgcgcgctggcgcggggctttctgggccagggcggggccggcgaactgcggcccggaacggctgaggaagggcccgtcccgccttccccggcgcgccatggagccccgggcggttgcagaagccgtggagacgggtgaggaggatgtgattatggaagctctgcggtcatacaaccaggagcactcccagagcttcacgtttgatgatgcccaacaggaggaccggaagagactggcggagctgctggtctccgtcctggaacagggcttgccaccctcccaccgtgtcatctggctgcagagtgtccgaatcctgtcccgggaccgcaactgcctggacccgttcaccagccgccagagcctgcaggcactagcctgctatgctgacatctctgtctctgaggggtccgtcccagagtccgcagacatggatgttgtactggagtccctcaagtgcctgtgcaacctcgtgctcagcagccctgtggcacagatgctggcagcagaggcccgcctagtggtgaagctcacagagcgtgtggggctgtaccgtgagaggagcttcccccacgatgtccagttctttgacttgcggctcctcttcctgctaacggcactccgcaccgatgtgcgccagcagctgtttcaggagctgaaaggagtgcgcctgctaactgacacactggagctgacgctgggggtgactcctgaagggaaccccccacccacgctccttccttcccaagagactgagcgggccatggagatcctcaaagtgctcttcaacatcaccctggactccatcaagggggaggtggacgaggaagacgctgccctttaccgacacctggggacccttctccggcactgtgtgatgatcgctactgctggagaccgcacagaggagttccacggccacgcagtgaacctcctggggaacttgcccctcaagtgtctggatgttctcctcaccctggagccacatggagactccacggagttcatgggagtgaatatggatgtgattcgtgccctcctcatcttcctagagaagcgtttgcacaagacacacaggctgaaggagagtgtagctcccgtgctgagcgtgctgactgaatgtgcccggatgcaccgcccagccaggaagttcctgaaggcccaggtgctgccccctctgcgggatgtgaggacacggcctgaggttggggagatgctgcggaacaagcttgtccgcctcatgacacacctggacacagatgtgaagagggtggctgccgagttcttgtttgtcctgtgctctgagagtgtgccccgattcatcaagtacacaggctatgggaatgctgctggccttctggctgccaggggcctcatggcaggaggccggcccgagggccagtactcagaggatgaggacacagacacagatgagtacaaggaagccaaagccagcataaaccctgtgaccgggagggtggaggagaagccgcctaaccctatggagggcatgacagaggagcagaaggagcacgaggccatgaagctggtgaccatgtttgacaagctctccaggaacagagtcatccagccaatggggatgagtccccggggtcatcttacgtccctgcaggatgccatgtgcgagactatggagcagcagctctcctcggaccctgactcggaccctgactgaggatggcagctcttctgctcccccatcaggactggtgctgcttccagagacttccttggggttgcaacctggggaagccacatcccactggatccacacccgcccccacttctccatcttagaaaccccttctcttgactcccgttctgttcatgatttgcctctggtccagtttctcatctctggactgcaacggtcttcttgtgctagaactcaggctcagcctcgaattccacagacgaagtactttcttttgtctgcgccaagaggaatgtgttcagaagctgctgcctgagggcagggcctacctgggcacacagaagagcatatgggagggcaggggtttgggtgtgggtgcacacaaagcaagcaccatctgggattggcacactggcagagccagtgtgttggggtatgtgctgcacttcccagggagaaaacctgtcagaactttccatacgagtatatcagaacacacccttccaaggtatgtatgctctgttgttcctgtcctgtcttcactgagcgcagggctggaggcctcttagacattctccttggtcctcgttcagctgcccactgtagtatccacagtgcccgagttctcgctggttttggcaattaaacctccttcctactggtttagactacacttacaacaaggaaaatgcccctcgtgtgaccatagattgagatttataccacataccacacatagtacccgacatatctgtataaggtttggggggggtggtgcggcgcgtaggtggtgtgtgg

SEQ ID NO: 365846 - DNA, 3239 bp, Homo sapiens
ttccgcttcgggctcgctgacttccggcttagggccgagggtggggaactgccgggcgcggaagcgatgggcatatctgtggcttattttcagcactgtcgcgcagacagtggcgcgatctcagctcactgcagcccccgcctgccgggctcccaaggtgctgggattacagcagcaccgcggatgtgacgtttggtgttcctgtgaacgtggggcggggcgggtcgtttgcttgctcagtgcctagacgatggtggtggaaagacgcttctgtgggttaggtcctaacggttaggaaggattcacaggcgggtcatgaggaaggagcagacccctcgggcagaagcccgcgaggagcactgggtgtggtgggggcaggggtgcctcctctgtcaagtggagatcggcgcctcgctcgtgcctgcgagtgcgcgccgcgtcgaatacagccgtacagaacgcactacaggaaagtgaagccgggagagagactgggaggcggcgcggggactgggggccgtagacgcctttgctcccgggcacttgttagaagagcgagtggatcgcgcttcctgtgcgtcactgaatcctcatgacggccactgaaacggacacgcaggatctttgcttttcaagagggaactgagtccaggccagactgggttgctcccctttctctcggcccctccacctttgcaagtgctgctccttctgcctggagtggctcctccagtcttttcccggctcacttcccaccgtccggtgtcagcaaaaacagcacttcctcacagcccgttgcagcccagcagtcgccttttgcttcttttgaagcacagccctgtgaccgcctcgtgtccttttgtttttccttgtcccccttcccctctggaacataagctccacaaaggcagggacctgggaatcccgttcgcctgcattccccagcaaacgcctaacgaacccaatggcccaggactgaaaattcctttccacttcggctttcccctctacatcccatcggttctgtggagctcgaggggcgtcactgtgtgtgtggcagggcacggtgggggctgagatcgtttcctgttggaacttctggcccaagaagcgcgggtcacaaggagaggggtcagttcggttcagagcgactcagcccctcgactcgggtcttaaaacctccgagccgccagttctgcctcaggccgcgcccccttaaagcgccaccagacgctgcgccccgttaaagcgccaccagacgccgcgccccgtcccggcctcccccgcgcgctggcgcggggctttctgggccagggcggggccggcgaactgcggcccggaacggctgaggaagggcccgtcccgccttccccggcgcgccatggagccccgggcggttgcagaagccgtggagacgggtgaggaggatgtgattatggaagctctgcggtcatacaaccaggagcactcccagagcttcacgtttgatgatgcccaacaggaggaccggaagagactggcggagctgctggtctccgtcctggaacagggcttgccaccctcccaccgtgtcatctggctgcagagtgtccgaatcctgtcccgggaccgcaactgcctggacccgttcaccagccgccagagcctgcaggcactagcctgctatgctgacatctctgtctctgaggggtccgtcccagagtccgcagacatggatgttgtactggagtccctcaagtgcctgtgcaacctcgtgctcagcagccctgtggcacagatgctggcagcagaggcccgcctagtggtgaagctcacagagcgtgtggggctgtaccgtgagaggagcttcccccacgatgtccagttctttgacttgcggctcctcttcctgctaacggcactccgcaccgatgtgcgccagcagctgtttcaggagctgaaaggagtgcgcctgctaactgacacactggagctgacgctgggggtgactcctgaagggaaccccccacccacgctccttccttcccaagagactgagcgggccatggagatcctcaaagtgctcttcaacatcaccctggactccatcaagggggaggtggacgaggaagacgctgccctttaccgacacctggggacccttctccggcactgtgtgatgatcgctactgctggagaccgcacagaggagttccacggccacgcagtgaacctcctggggaacttgcccctcaagtgtctggatgttctcctcaccctggagccacatggagactccacggagttcatgggagtgaatatggatgtgattcgtgccctcctcatcttcctagagaagcgtttgcacaagacacacaggctgaaggagagtgtagctcccgtgctgagcgtgctgactgaatgtgcccggatgcaccgcccagccaggaagttcctgaaggcccaggtgctgccccctctgcgggatgtgaggacacggcctgaggttggggagatgctgcggaacaagcttgtccgcctcatgacacacctggacacagatgtgaagagggtggctgccgagttcttgtttgtcctgtgctctgagagtgtgccccgattcatcaagtacacaggctatgggaatgctgctggccttctggctgccaggggcctcatggcaggaggccggcccgagggccagtactcagaggatgaggacacagacacagatgagtacaaggaagccaaagccagcataaaccctgtgaccgggagggtggaggagaagccgcctaaccctatggagggcatgacagaggagcagaaggagcacgaggccatgaagctggtgaccatgtttgacaagctctccaggaacagagtcatccagccaatggggatgagtccccggggtcatcttacgtccctgcaggatgccatgtgcgagactatggagcagcagctctcctcggaccctgactcggaccctgactgaggatggcagctcttctgctcccccatcaggactggtgctgcttccagagacttccttggggttgcaacctggggaagccacatcccactggatccacacccgcccccacttctccatcttagaaacctccttcctactggtttagactacacttacaacaaggaaaatgcccctcgtgtgaccatagattgagatttataccacataccacacatagccacagaaacatcatcttgaaataaagaagagttttggacaaaaa

SEQ ID NO: 365847 - DNA, 1236 bp, Homo sapiens
aaggcatagtacgagggctgcggttgaattcggccgatgtgaagagggtggctgccgagttcttgtttgtcctgtgctctgagagtgtgccccgattcatcaagtacacaggctatgggaatgctgctggccttctggctgccaggggcctcatggcaggaggccggcccgagggccagtactcagaggatgaggacacagacacagatgagtacaaggaagccaaagccagcataaaccctgtgaccgggagggtggaggagaagccgcctaaccctatggagggcatgacagaggagcagaaggagcacgaggccatgaagctggtgaccatgtttgacaagctctccaggaacagagtcatccagccaatggggatgagtccccggggtcatcttacgtccctgcaggatgccatgtgcgagactatggagcagcagctctcctcggaccctgactcggaccctgactgaggatggcagctcttctgctcccccatcaggactggtgctgcttccagagacttccttggggttgcaacctggggaagccacatcccactggatccacacccgcccccacttctccatcttagaaaccccttctcttgactcccgttctgttcatgatttgcctctggtccagtttctcatctctggactgcaacggtcttcttgtgctagaactcaggctcagcctcgaattccacagacgaagtactttcttttgtctgcgccaagaggaatgtgttcagaagctgctgcctgagggcagggcctacctgggcacacagaagagcatatgggagggcaggggtttgggtgtgggtgcacacaaagcaagcaccatctgggattggcacactggcagagccagtgtgttggggtatgtgctgcacttcccagggagaaaacctgtcagaactttccatacgagtatatcagaacacacccttccaaggtatgtatgctctgttgttcctgtcctgtcttcactgagcgcagggctggaggcctcttagacattctccttggtcctcgttcagctgcccactgtagtatccacagtgcccgagttctcgctggttttggcaattaaacctccttcctactggtttagactacacttacaacaaggaaaatgcccctcgtgtgaccatagattgagatttataccacataccacacatagccacagaaacatcatcttgaaataaagaagagttttggacaaaaa

SEQ ID NO: 365848 - DNA, 1048 bp, Homo sapiens
agagtcactaatgcattccccacattccacccactgggaaacagcataaaccctgtgaccgggagggtggaggagaagccgcctaaccctatggagggcatgacagaggagcagaaggagcacgaggccatgaagctggtgaccatgtttgacaagctctccaggaacagagtcatccagccaatggggatgagtccccggggtcatcttacgtccctgcaggatgccatgtgcgagactatggagcagcagctctcctcggaccctgactcggaccctgactgaggatggcagctcttctgctcccccatcaggactggtgctgcttccagagacttccttggggttgcaacctggggaagccacatcccactggatccacacccgcccccacttctccatcttagaaaccccttctcttgactcccgttctgttcatgatttgcctctggtccagtttctcatctctggactgcaacggtcttcttgtgctagaactcaggctcagcctcgaattccacagacgaagtactttcttttgtctgcgccaagaggaatgtgttcagaagctgctgcctgagggcagggcctacctgggcacacagaagagcatatgggagggcaggggtttgggtgtgggtgcacacaaagcaagcaccatctgggattggcacactggcagagccagtgtgttggggtatgtgctgcacttcccagggagaaaacctgtcagaactttccatacgagtatatcagaacacacccttccaaggtatgtatgctctgttgttcctgtcctgtcttcactgagcgcagggctggaggcctcttagacattctccttggtcctcgttcagctgcccactgtagtatccacagtgcccgagttctcgctggttttggcaattaaacctccttcctactggtttagactacacttacaacaaggaaaatgcccctcgtgtgaccatagattgagatttataccacataccacacatagccacagaaacatcatcttgaaataaagaagagttttggacaaaaa

SEQ ID NO: 365849 - DNA, 3166 bp, Homo sapiens
cgatgattggctggagtggcccgagtcgggaaaatggctgcgagtacctccatggtcccggtggctgtgacggcggcagtggcgcctgtcctgtccataaacagcgatttctcagatttgcgggaaattaaaaagcaactgctgcttattgcgggccttacccgggagcggggcctactacacagtagcaaatggtcggcggagttggctttctctctccctgcattgcctctggccgagctgcaaccgcctccgcctattacagaggaagatgcccaggatatggatgcctataccctggccaaggcctactttgacgttaaagagtatgatcgggcagcacatttcctgcatggctgcaatagcaagaaagcctattttctgtatatgtattccagatatctgtctggagaaaaaaagaaggacgatgaaacagttgatagcttaggccccctggaaaaaggacaagtgaaaaatgaggcgcttagagaattgagagtggagctcagcaaaaaacaccaagctcgagaacttgatggatttggactttatctgtatggtgtggtgcttcgaaaactggacttggttaaagaggccattgatgtgtttgtggaagctactcatgttttgcccttgcattggggagcctggttagaactctgtaacctgatcacagacaaagagatgctgaagttcctgtctttgccagacacctggatgaaagagttttttctggctcatatatacacagagttgcagttgatagaggaggccctgcaaaagtatcagaatctcattgatgtgggcttctctaagagctcgtatattgtttcccaaattgcagttgcctatcacaatatcagagatattgacaaagccctctccatttttaatgagctaaggaaacaagacccttacaggattgaaaatatggacacattctccaaccttctttatgtcaggagcatgaaatcggagttgagttatctggctcataacctctgtgagattgataaatatcgtgtagaaacgtgctgtgtaattggcaattattacagtttacgttctcagcatgagaaagcagccttatatttccagagagccctgaaattaaatcctcggtatcttggtgcctggacactaatgggacatgagtacatggagatgaagaacacgtctgctgctatccaggcttatagacatgccattgaggtcaacaaacgggactacagagcttggtatggcctcgggcagacctatgaaatccttaagatgccattttactgcctttattattatagacgggcccaccagcttcgacccaatgattctcgcatgctggttgctttaggagaatgttacgagaaactcaatcaactagtggaagccaaaaagtgttattggagagcttacgccgtgggagatgtggagaaaatggctctggtgaaactggcaaagcttcatgaacagttgactgagtcagaacaggctgcccagtgttacatcaaatatatccaagatatctattcctgtggggaaatagtagaacacttggaggaaagcactgcctttcgctatctggcccagtactattttaagtgcaaactgtgggatgaagcttcaacttgtgcacaaaagtgttgtgcatttaatgatacccgggaagaaggtaaggccttactccggcaaatcctacagcttcggaaccaaggcgagactcctaccaccgaggtgcctgctccctttttcctacctgcttcactctctgctaacaatacccccacacgcagagtttctccactcaacttgtcttctgtcacgccatagttggctactctcaagccagcacattgttagacccatcttaattaagccttacctccatgtaaagaacagcacgtctgttccaaggacctcagctcttcttgtttctacagatggcaacagctccatagggacagcttgtataattaccttcagaggccaactgacagaatcctggcaggaacagacattatcttgccagttagaagtacttctgtctcacttatgtccaaagagtggctatagatcttggccttcttccctgaatgctttttttttttgggcccccaagaaagtcccttttatagcactttagcacaggcaatgctacaggaacaaagtttcaatgctgctgagagtgaaagaaaggaggaaagtctgccactctaccctgagctggcagtagggcactgagtaccctaggaagaagtcagagcaatggatacaaatgaccttgctcttggatttgctgagcatgatccctattctgatgtcagagattaggtttaaatggaatagagctatccatttgttcttactctctagggagacaatcttccaaaacagttttgggggggtcttctaaagctttcaaattggaagtaactttattcaactagagttgaataaaagaagggcaaaaataatctcacagagcttggaactgctgatagcccttactgagggcaaaagatggctatattgttagctatactcctaccaaagcaagcaaggagataggattatagataatttcacggacatttggaaataacattggtgattatacagacaagaataaactcacttcaagctggtctgttttaataaattttcaacgtaattgtctatttttttccctcccatctgcaacagaatacatttttttcagcctttatctagatgaggtaaagggaatcattcttatggtgctcttggagagtttcaggcctgtgcatgtgtgtacagcaggaggtaatatgctataatgtctgctgtaatatatttgcacagtagatgctatggatcattctgagctcagggtccagactttattcttattcccagaattttgtgttacgtttttacctcctaacatatgacacttcatcttatattaaggaaggtttagaatatctaatacgacttgaattcatttgttactaagccttctcaggcaagctgtatactagttactggtctccactgccatgccttttcaaggttcccatggtccagaatgatgtttgattcttaatttttctgtcccttttataatttgttttaatgattttgctacatttggaattcaataaaaaatgtgaacaataaaaaaaaaaaa

SEQ ID NO: 365850 - DNA, 914 bp, Homo sapiens
  misc_feature (799)..(799): n is a, c, g, or t
cgatgattggctggagtggcccgagtcgggaaaatggctgcgagtacctccatggtcccggtggctgtgacggcggcagtggcgcctgtcctgtccataaacagcgatttctcagatttgcgggaaattaaaaagcaactgctgcttattgcgggccttacccgggagcggggcctactacacagtagcaaatggtcggcggagttggctttctctctccctgcattgcctctggccgagctgcaaccgcctccgcctattacagaggaagatgcccaggatatggatgcctataccctggccaaggcctactttgacgttaaagagtatgatcgggcagcacatttcctgcatggctgcaatagcaagaaagcctattttctgtatatgtattccagatatctggtgagggccattttaaaatgtcattctgcctttagtgaaacatccatatttagaaccaatggaaaagttaaatcttttaaatagcttagcagtgggccactgaatgaatgtactttatacatagcaataataaaaaaaagatatcataaataaagttaaaaaggatggtagagaagaaaatattcttaggaatgactaacaggataagtaacaacctgattatttatttactttaggttatataaggttcttcatgcctgtgaattatattattgtgtaagaattaagttaaaaagcctgggctgacttttaaatttataaattcatttatcatgtttatagtatattatggggcttctgggtttaaaagtgtggaggacaggggtaccctttntggtggataggcactttttttggaaattgagattcacactgggtctcttagggcacattggtcaggggctggggggcgggatgtgttgggggggaaaaaacccgggggcggcggg

SEQ ID NO: 365851 - DNA, 867 bp, Homo sapiens
cgatgattggctggagtggcccgagtcgggaaaatggctgcgagtacctccatggtcccggtggctgtgacggcggcagtggcgcctgtcctgtccataaacagcgatttctcagatttgcgggaaattaaaaagcaactgctgcttattgcgggccttacccgggagcggggcctactacacagtagcaaatggtcggcggagttggctttctctctccctgcattgcctctggccgagctgcaaccgcctccgcctattacagaggaagatgcccaggatatggatgcctataccctggccaaggcctactttgacgttaaagagtatgatcgggcagcacatttcctgcatggctgcaatagcaagaaagcctattttctgtatatgtattccagatatctgtctggagaaaaaaagaaggacgatgaaacagttgatagcttaggccccctggaaaaaggacaagtgaaaaatgaggcgcttagagaattgagagtggagctcagcaaaaaacaccaagctcgagaacttgatggatttggactttatctgtatggtgtggtgcttcgaaaactggacttggttaaagaggccattgatgtgtttgtggaagctactcatgttttgcccttgcattggggagcctggttagaactctgtaacctgatcacagacaaagagatggtaaattgtgatgagctatgtgaaaaaccctctgcttcaagccttttgtaattctgtagtaatataggggtggggaaagttttggcagggctttggttatagttctccctttgctgcgcctctggtgtcttttcgctgttttggaagtaagtctttgtttgaaagactgatgactagctc

SEQ ID NO: 365852 - DNA, 1072 bp, Homo sapiens
tatttcaacacttttttgtgaagtgttctcttcgctaactggtgtccgcggcaataaaatagttggggcatcgcttatttaggggttgaaggagaccctagccggtgcgcgagggccttctttcaaaaacgtttccattgcggaataaaagcacgctgctatgggcctaccgggagggggctaatacacatagcaatggtcgcggagttgcttctctctcggcatgctctgccgagctgcaactgcctccgctattacagaggaagatgcccaggatatggatgcctataccctggccaaggcctactttgacgttaaagagtatgatcgggcagcacatttcctgcatggctgcaatagcaagaaagcctattttctgtatatgtattccagatatctggtgagggccattttaaaatgtcattctgcctttagtgaaacatccatatttagaaccaatggaaaagttaaatcttttaaatagcttagcagtgggccactgaatgaatgtactttatacatagcaataataaaaaaaagatatcataaataaagttaaaaaggatggtagagaagaaaatattcttaggaatgactaacaggataagtaacaacctgattatttatttactttaggttatataaggttcttcatgcctgtgaattatattattgtgtaagaattaagttaaaaagcctgggctgacttttaaatttataaattcatttatcatgtttatagtatatttattgtttttctttcatggctattaaaaagtatgactgtaaaggacaatgcaagtaaaccaacttaatactgtattgaataataagtacaatttattattttactttgaaacattatgaatttactttcctactttttcttagttgttatctatataaattgattaaaaaaacattttatgtacttctcatttcctagtacaggttgagtatcccttatttgaagtgcttgggaccaaaagtgtttcagatttcagatttttttcagattttggtatatttgcattatacttactggttgaaataaaaaatgctgcagtgagtg

SEQ ID NO: 365853 - DNA, 2677 bp, Homo sapiens
cgatgattggctggagtggcccgagtcgggaaaatggctgcgagtacctccatggtcccggtggctgtgacggcggcagtggcgcctgtcctgtccataaacagcgatttctcagatttgcgggaaattaaaaagcaactgctgcttattgcgggccttacccgggagcggggcctactacacagtagcaaatggtcggcggagttggctttctctctccctgcattgcctctggccgagctgcaaccgcctccgcctattacagaggaagatgcccaggatatggatgcctataccctggccaaggcctactttgacgttaaagagtatgatcgggcagcacatttcctgcatggctgcaatagcaagaaagcctattttctgtatatgtattccagatatctgtctggagaaaaaaagaaggacgatgaaacagttgatagcttaggccccctggaaaaaggacaagtgaaaaatgaggcgcttagagaattgagagtggagctcagcaaaaaacaccaagctcgagaacttgatggatttggactttatctgtatggtgtggtgcttcgaaaactggacttggttaaagaggccattgatgtgtttgtggaagctactcatgttttgcccttgcattggggagcctggttagaactctgtaacctgatcacagacaaagagatgctgaagttcctgtctttgccagacacctggatgaaagagttttttctggctcatatatacacagagttgcagttgatagaggaggccctgcaaaagtatcagaatctcattgatgtgggcttctctaagagctcgtatattgtttcccaaattgcagttgcctatcacaatatcagagatattgacaaagccctctccatttttaatgagctaaggaaacaagacccttacaggattgaaaatatggacacattctccaaccttctttatgtcaggagcatgaaatcggagttgagttatctggctcataacctctgtgagattgataaatatcgtgtagaaacgtgctgtgtaattggcaattattacagtttacgttctcagcatgagaaagcagccttatatttccagagagccctgaaattaaatcctcggtatcttggtgcctggacactaatgggacatgagtacatggagatgaagaacacgtctgctgctatccaggcttatagacatgccattgaggtcaacaaacgggactacagagcttggtatggcctcgggcagacctatgaaatccttaagatgccattttactgcctttattattatagacgggcccaccagcttcgacccaatgattctcgcatgctggttgctttaggagaatgttacgagaaactcaatcaactagtggaagccaaaaagtgttattggagagcttacgccgtgggagatgtggagaaaatggctctggtgaaactggcaaagcttcatgaacagttgactgagtcagaacaggctgcccagtgttacatcaaatatatccaagatatctattcctgtggggaaatagtagaacacttggaggaaagcactgcctttcgctatctggcccagtactattttaagtgcaaactgtgggatgaagcttcaacttgtgcacaaaagtgttgtgcatttaatgatacccgggaagaaggtaaggccttactccggcaaatcctacagcttcggaaccaaggcgagactctctaccctgagctggcagtagggcactgagtaccctaggaagaagtcagagcaatggatacaaatgaccttgctcttggatttgctgagcatgatccctattctgatgtcagagattaggtttaaatggaatagagctatccatttgttcttactctctagggagacaatcttccaaaacagttttgggggggtcttctaaagctttcaaattggaagtaactttattcaactagagttgaataaaagaagggcaaaaataatctcacagagcttggaactgctgatagcccttactgagggcaaaagatggctatattgttagctatactcctaccaaagcaagcaaggagataggattatagataatttcacggacatttggaaataacattggtgattatacagacaagaataaactcacttcaagctggtctgttttaataaattttcaacgtaattgtctatttttttccctcccatctgcaacagaatacatttttttcagcctttatctagatgaggtaaagggaatcattcttatggtgctcttggagagtttcaggcctgtgcatgtgtgtacagcaggaggtaatatgctataatgtctgctgtaatatatttgcacagtagatgctatggatcattctgagctcagggtccagactttattcttattcccagaattttgtgttacgtttttacctcctaacatatgacacttcatcttatattaaggaaggtttagaatatctaatacgacttgaattcatttgttactaagccttctcaggcaagctgtatactagttactggtctccactgccatgccttttcaaggttcccatggtccagaatgatgtttgattcttaatttttctgtcccttttataatttgttttaatgattttgctacatttggaattcaataaaaaatgtgaacaataaaaaaaaaaaa

SEQ ID NO: 365854 - DNA, 1077 bp, Homo sapiens
cgatgattggctggagtggcccgagtcgggaaaatggctgcgagtacctccatggtcccggtggctgtgacggcggcagtggcgcctgtcctgtccataaacagcgatttctcagatttgcgggaaattaaaaagcaactgctgcttattgcgggccttacccgggagcggggcctactacacagtagcaaatggtcggcggagttggctttctctctccctgcattgcctctggccgagctgcaaccgcctccgcctattacagaggaagatgcccaggatatggatgcctataccctggccaaggcctactttgacgttaaagagtatgatcgggcagcacatttcctgcatggctgcaatagcaagaaagcctattttctgtatatgtattccagatatctggtgagggccattttaaaatgtcattctgcctttagtgaaacatccatatttagaaccaatggaaaagttaaatcttttaaatagcttagcagtgggccactgaatgaatgtactttatacatagcaataataaaaaaaagatatcataaataaagttaaaaaggatggtagagaagaaaatattcttaggaatgactaacaggataagtaacaacctgattatttatttactttaggttatataaggttcttcatgcctgtgaattatattattgtgtaagaattaagttaaaaagcctgggctgacttttaaatttataaattcatttatcatgtttatagtatatttattgtttttctttcatggctattaaaaagtatgactgtaaaggacaatgcaagtaaaccaacttaatactgtattgaataataagtacaatttattattttactttgaaacattatgaatttactttcctactttttcttagttgttatctatataaattgattaaaaaaacattttatgtacttctcatttcctagtacaggttgagtatcccttatttgaagtgcttgggaccaaaagtgtttcagatttcagatttttttcagattttggtatatttgcattatacttactggttgaaataaaaaatgctgcagtgagtg

SEQ ID NO: 365855 - DNA, 3061 bp, Homo sapiens
cgatgattggctggagtggcccgagtcgggaaaatggctgcgagtacctccatggtcccggtggctgtgacggcggcagtggcgcctgtcctgtccataaacagcgatttctcagatttgcgggaaattaaaaagcaactgctgcttattgcgggccttacccgggagcggggcctactacacagtagcaaatggtcggcggagttggctttctctctccctgcattgcctctggccgagctgcaaccgcctccgcctattacagaggaagatgcccaggatatggatgcctataccctggccaaggcctactttgacgttaaagagtatgatcgggcagcacatttcctgcatggctgcaatagcaagaaagcctattttctgtatatgtattccagatatctggccccctggaaaaaggacaagtgaaaaatgaggcgcttagagaattgagagtggagctcagcaaaaaacaccaagctcgagaacttgatggatttggactttatctctactcatgttttgcccttgcattggggagcctggttagaactctgtaacctgatcacagacaaagagatgctgaagttcctgtctttgccagacacctggatgaaagagttttttctggctcatatatacacagagttgcagttgatagaggaggccctgcaaaagtatcagaatctcattgatgtgggcttctctaagagctcgtatattgtttcccaaattgcagttgcctatcacaatatcagagatattgacaaagccctctccatttttaatgagctaaggaaacaagacccttacaggattgaaaatatggacacattctccaaccttctttatgtcaggagcatgaaatcggagttgagttatctggctcataacctctgtgagattgataaatatcgtgtagaaacgtgctgtgtaattggcaattattacagtttacgttctcagcatgagaaagcagccttatatttccagagagccctgaaattaaatcctcggtatcttggtgcctggacactaatgggacatgagtacatggagatgaagaacacgtctgctgctatccaggcttatagacatgccattgaggtcaacaaacgggactacagagcttggtatggcctcgggcagacctatgaaatccttaagatgccattttactgcctttattattatagacgggcccaccagcttcgacccaatgattctcgcatgctggttgctttaggagaatgttacgagaaactcaatcaactagtggaagccaaaaagtgttattggagagcttacgccgtgggagatgtggagaaaatggctctggtgaaactggcaaagcttcatgaacagttgactgagtcagaacaggctgcccagtgttacatcaaatatatccaagatatctattcctgtggggaaatagtagaacacttggaggaaagcactgcctttcgctatctggcccagtactattttaagtgcaaactgtgggatgaagcttcaacttgtgcacaaaagtgttgtgcatttaatgatacccgggaagaaggtaaggccttactccggcaaatcctacagcttcggaaccaaggcgagactcctaccaccgaggtgcctgctccctttttcctacctgcttcactctctgctaacaatacccccacacgcagagtttctccactcaacttgtcttctgtcacgccatagttggctactctcaagccagcacattgttagacccatcttaattaagccttacctccatgtaaagaacagcacgtctgttccaaggacctcagctcttcttgtttctacagatggcaacagctccatagggacagcttgtataattaccttcagaggccaactgacagaatcctggcaggaacagacattatcttgccagttagaagtacttctgtctcacttatgtccaaagagtggctatagatcttggccttcttccctgaatgctttttttttttgggcccccaagaaagtcccttttatagcactttagcacaggcaatgctacaggaacaaagtttcaatgctgctgagagtgaaagaaaggaggaaagtctgccactctaccctgagctggcagtagggcactgagtaccctaggaagaagtcagagcaatggatacaaatgaccttgctcttggatttgctgagcatgatccctattctgatgtcagagattaggtttaaatggaatagagctatccatttgttcttactctctagggagacaatcttccaaaacagttttgggggggtcttctaaagctttcaaattggaagtaactttattcaactagagttgaataaaagaagggcaaaaataatctcacagagcttggaactgctgatagcccttactgagggcaaaagatggctatattgttagctatactcctaccaaagcaagcaaggagataggattatagataatttcacggacatttggaaataacattggtgattatacagacaagaataaactcacttcaagctggtctgttttaataaattttcaacgtaattgtctatttttttccctcccatctgcaacagaatacatttttttcagcctttatctagatgaggtaaagggaatcattcttatggtgctcttggagagtttcaggcctgtgcatgtgtgtacagcaggaggtaatatgctataatgtctgctgtaatatatttgcacagtagatgctatggatcattctgagctcagggtccagactttattcttattcccagaattttgtgttacgtttttacctcctaacatatgacacttcatcttatattaaggaaggtttagaatatctaatacgacttgaattcatttgttactaagccttctcaggcaagctgtatactagttactggtctccactgccatgccttttcaaggttcccatggtccagaatgatgtttgattcttaatttttctgtcccttttataatttgttttaatgattttgctacatttggaattcaataaaaaatgtgaacaataaaaaaaaaaaa

SEQ ID NO: 365856 - DNA, 1289 bp, Homo sapiens
cgatgattggctggagtggcccgagtcgggaaaatggctgcgagtacctccatggtcccggtggctgtgacggcggcagtggcgcctgtcctgtccataaacagcgatttctcagatttgcgggaaattaaaaagcaactgctgcttattgcgggccttacccgggagcggggcctactacacagtagcaaatggtcggcggagttggctttctctctccctgcattgcctctggccgagctgcaaccgcctccgcctattacagaggaagatgcccaggatatggatgcctataccctggccaaggcctactttgacgttaaagagtatgatcgggcagcacatttcctgcatggctgcaatagcaagaaagcctattttctgtatatgtattccagatatctggtgagggccattttaaaatgtcattctgcctttagtgaaacatccatatttagaaccaatggaaaagttaaatcttttaaatagcttagcagtgggccactgaatgaatgtactttatacatagcaataataaaaaaaagatatcataaataaagttaaaaaggatggtagagaagaaaatattcttaggaatgactaacaggataagtaacaacctgattatttatttactttaggttatataaggttcttcatgcctgtgaattatattattgtgtaagaattaagttaaaaagcctgggctgacttttaaatttataaattcatttatcatgtttatagtatatttattgtttttctttcatggctattaaaaagtatgactgtaaaggacaatgcaagtaaaccaacttaatactgtattgaataataagtacaatttattattttactttgaaacattatgaatttactttcctactttttcttagttgttatctatataaattgattaaaaaaacattttatgtacttctcatttcctagtacaggttgagtatcccttatttgaagtgcttgggaccaaaagtgtttcagatttcagatttttttcagattttggtatatttgcattatacttactggttgaaataaaaaatgctgcagtgagtgtcattggtgctttgagtgtcattggtgctgaaaaagttttgggttttggagcaatgcagatttcagatcttatgatttaggttgatcaactattagcatagcttgtatttgtcaagcgtggtaaattcttgcagttatggactatgtttaagtcatctttgtttttttttttttttccaatttaccattttaacatttttaaagtgtacagt

SEQ ID NO: 365857 - DNA, 318 bp, Homo sapiens
cctgtgaagacgtgcctttcgtcaagattgtaagtttcctgaggccttcccacccatgcggaactgaaaaaatcttcctgtgacttcctacaacttttgggataaggaccaaagtatttcaaatgacctacaagatcctctatcatctggactatggacttacttgctcactccagctgtcctatgctttcttcagcgcctccagtgtagcctgctctctttcacctcagggctaacttctattttttctccaggtcgaatgatctaaatatcacttcctcagggtggaaggaaatcttctgggactagctagtcaag

SEQ ID NO: 365858 - DNA, 422 bp, Homo sapiens
gcgtcgacgatctgtgggatgttcatgaaatcagtcttttgtgacatgaattatgaatatttttctctttgactgctgtctcgtagagattgcaacctatttatgttcccacatctttaccaacagtaaagtcttttactttacaaaaacagtatgttggccagggaagatggctcatgcctgcaatcccagcactttgggatgctgaggtgggtggattgcatgagcctaggagttcgagaccagcctgggcagcgtggcgagacctcatctctacaaagaaacaaaaaaattagctgggcaaggtggtgcacgcctgtagtccagctactctgggggctgaggtgggaggatcacttgagcccggagatagggtctcactgtcatccaggtcgacgcggccgcaattttagtagtagtag

SEQ ID NO: 365859 - DNA, 3888 bp, Homo sapiens
gtcgacccacgcgtcccgtccccctgctggggacagcagcttgggtccagcagagagctggctgggggcttgacaggagtttatcctaactgatgctgggtgggcgcaggccctgagatgggcgtcagggagaggggacgccagacacacggcctgagcagggtgaggagcagctgccagccccggcaggcccaggccctgtctgggtgcacaggacagagacacagcaagatgcccagggagtgccgcttcctgggctagagacaagcaccagcctgcagtggagaacgcaggaccccgctgcccagaaggagcagccacggcctgcggaggactggcccagcaaggtcccaggtcttccctctcctcagcgcctaagagagaggcccagtgcgggtgaggagtcgcgaggaagaggcggaaggcgccggaaggcaccatgttccgcaagaaaaagaagaaacgccctgagatctcagcgccacagaacttccagcaccgtgtccacacctccttcgaccccaaagaaggcaagtttgtgggcctccccccacaatggcagaacatcctggacacactgcggcgccccaagcccgtggtggacccttcgcgaatcacacgggtgcagctccagcccatgaagacagtggtgcggggcagcgcgatgcctgtggatggctacatctcggggctgctcaacgacatccagaagttgtcagtcatcagctccaacaccctgcgtggccgcagccccaccagccggcggcgggcacagtccctggggctgctgggggatgagcactgggccaccgacccagacatgtacctccagagcccccagtctgagcgcactgacccccacggcctctacctcagctgcaacgggggcacaccagcaggccacaagcagatgccgtggcccgagccacagagcccacgggtcctgcccaatgggctggctgcaaaggcacagtccctgggccccgccgagtttcagggtgcctcgcagcgctgtctgcagctgggtgcctgcctgcagagctccccaccaggagcctcgccccccacgggcaccaataggcatggaatgaaggctgccaagcatggctctgaggaggcccggccacagtcctgcctggtgggctcagccacaggcaggccaggtggggaaggcagccctagccctaagacccgggagagcagcctgaagcgcaggctattccgaagcatgttcctgtccactgctgccacagcccctccaagcagcagcaagccaggccctccaccacagagcaagcccaactcctctttccgaccgccgcagaaagacaaccccccaagcctggtggccaaggcccagtccttgccctcggaccagccggtggggaccttcagccctctgaccacttcggataccagcagcccccagaagtccctccgcacagccccggccacaggccagcttccaggccggtcttccccagcgggatccccccgcacctggcacgcccagatcagcaccagcaacctgtacctgccccaggaccccacggttgccaagggtgccctggctggtgaggacacaggtgttgtgacacatgagcagttcaaggctgcgctcaggatggtggtggaccagggtgacccccggctgctgctggacagctacgtgaagattggcgagggctccaccggcatcgtctgcttggcccgggagaagcactcgggccgccaggtggccgtcaagatgatggacctcaggaagcagcagcgcagggagctgctcttcaacgaggtggtgatcatgcgggactaccagcacttcaacgtggtggagatgtacaagagctacctggtgggcgaggagctgtgggtgctcatggagttcctgcagggaggagccctcacagacatcgtctcccaagtcaggctgaatgaggagcagattgccactgtgtgtgaggctgtgctgcaggccctggcctacctgcatgctcagggtgtcatccaccgggacatcaagagtgactccatcctgctgaccctcgatggcagggtgaagctctcggacttcggattctgtgctcagatcagcaaagacgtccctaagaggaagtccctggtgggaaccccctactggatggctcctgaagtgatctccaggtctttgtatgccactgaggtggatatctggtctctgggcatcatggtgattgagatggtagatggggagccaccgtacttcagtgactccccagtgcaagccatgaagaggctccgggacagccccccacccaagctgaaaaactctcacaaggtctccccagtgctgcgagacttcctggagcggatgctggtgcgggacccccaagagagagccacagcccaggagctcctagaccaccccttcctgctgcagacagggctacctgagtgcctggtgcccctgatccagctctaccgaaagcagacctccacctgctgagcccaccccaagtatgcctgccacctacgcccacaggcagggcacactgggcagccagcctgccggcaggacttgcctgcctcctcctctcagtattctctccaaagattgaaatgtgaagccccagccccaccctctgcccttcagcctactgggccaggccggacctgccccctcagtgtctctccctcccgagtccccagatggagacccctttctacaggatgaccccttgatatttgcacagggatatttctaagaaacgcagaggccagcgttcctggcctctgcagccaacacagtagaaaaggctgctgtggttttttaaaggcagttgtccactagtgtcctaggccactgcagagggcagactgctggtctccacagatacctgctgttctcagctccagcttcaaacctcgagtctcgagagggccacggggtggtttttatgaccggaatcccgcttcctccctcacgtctgatgtcctgaaggtgcagtcccacctgtacagcccctccccgcccagaactgtgaatggcctgctccaggccatggctgggggcagggagtgaggggacaatttctgagtgaaagagaaagaatggggtcggtggtgaaggtgctctcactttacagaatggagagaacatcgtgtgtgtgtgtgtgtgtgtgtgtgtgtgtgtgtgtgtgtgtgtgtgtgtaaggggaggaaagccaccttgacagcccaggtccctccaggtcacccacagccagtttcaggaaggctgcccctctctcccactaagttctggcctgaagggacctgctttcttggcctggcttccacctctccactcctgtgtctacctggccagtggagtggtccatgctaagtctaacactcctgggagctcaggaggcttctgagcttctcctgtactgtgcatcgtgagggccagagacaggaatgtaaggattggcaactgtgttacctttcaagtttatctcaataaccaggtcatcagggacccattgttctcttcagaaccctatctgggagagaaggcgaaccacctccgggtttccatcatgtcaaggtcacaggcatccatgtgtgcaaaccatctgccccagctgcctccacagactgctgtctccttgtcctcctcggccctgccccacttcagggctgctgtgagatggaattccaggaaagaacttcaggtgtctggaccctttctatctagataatatttttagattcttctgctccctagtgacctacctgggggcaaagaaattgcaaggacttttttttaagggtcagagttttcaaaacaaaagcatcttccctagaaatttttgtgaattgtttgcacttgtgcctgttttaaattaaattgagtgttcaaagcca

SEQ ID NO: 365860 - DNA, 3692 bp, Homo sapiens
agccaggagttcagtcgggaggcgggcgcggagcggttcccagcgcctggacgtcagccagtcgcaacacccgcgggaacacttgctacatttgccataatgcatttctgatctgtttccgcgcaggcctgcggaggactggcccagcaaggtcccaggtcttccctctcctcagcgcctaagagagaggcccagtgcgggtgaggagtcgcgaggaagaggcggaaggcgccggaaggcaccatgttccgcaagaaaaagaagaaacgccctgagatctcagcgccacagaacttccagcaccgtgtccacacctccttcgaccccaaagaaggcaagtttgtgggcctccccccacaatggcagaacatcctggacacactgcggcgccccaagcccgtggtggacccttcgcgaatcacacgggtgcagctccagcccatgaagacagtggtgcggggcagcgcgatgcctgtggatggctacatctcggggctgctcaacgacatccagaagttgtcagtcatcagctccaacaccctgcgtggccgcagccccaccagccggcggcgggcacagtccctggggctgctgggggatgagcactgggccaccgacccagacatgtacctccagagcccccagtctgagcgcactgacccccacggcctctacctcagctgcaacgggggcacaccagcaggccacaagcagatgccgtggcccgagccacagagcccacgggtcctgcccaatgggctggctgcaaaggcacagtccctgggccccgccgagtttcagggtgcctcgcagcgctgtctgcagctgggtgcctgcctgcagagctccccaccaggagcctcgccccccacgggcaccaataggcatggaatgaaggctgccaagcatggctctgaggaggcccggccacagtcctgcctggtgggctcagccacaggcaggccaggtggggaaggcagccctagccctaagacccgggagagcagcctgaagcgcaggctattccgaagcatgttcctgtccactgctgccacagcccctccaagcagcagcaagccaggccctccaccacagagcaagcccaactcctctttccgaccgccgcagaaagacaaccccccaagcctggtggccaaggcccagtccttgccctcggaccagccggtggggaccttcagccctctgaccacttcggataccagcagcccccagaagtccctccgcacagccccggccacaggccagcttccaggccggtcttccccagcgggatccccccgcacctggcacgcccagatcagcaccagcaacctgtacctgccccaggaccccacggttgccaagggtgccctggctggtgaggacacaggtgttgtgacacatgagcagttcaaggctgcgctcaggatggtggtggaccagggtgacccccggctgctgctggacagctacgtgaagattggcgagggctccaccggcatcgtctgcttggcccgggagaagcactcgggccgccaggtggccgtcaagatgatggacctcaggaagcagcagcgcagggagctgctcttcaacgaggtggtgatcatgcgggactaccagcacttcaacgtggtggagatgtacaagagctacctggtgggcgaggagctgtgggtgctcatggagttcctgcagggaggagccctcacagacatcgtctcccaagtcaggctgaatgaggagcagattgccactgtgtgtgaggctgtgctgcaggccctggcctacctgcatgctcagggtgtcatccaccgggacatcaagagtgactccatcctgctgaccctcgatggcagggtgaagctctcggacttcggattctgtgctcagatcagcaaagacgtccctaagaggaagtccctggtgggaaccccctactggatggctcctgaagtgatctccaggtctttgtatgccactgaggtggatatctggtctctgggcatcatggtgattgagatggtagatggggagccaccgtacttcagtgactccccagtgcaagccatgaagaggctccgggacagccccccacccaagctgaaaaactctcacaaggtctccccagtgctgcgagacttcctggagcggatgctggtgcgggacccccaagagagagccacagcccaggagctcctagaccaccccttcctgctgcagacagggctacctgagtgcctggtgcccctgatccagctctaccgaaagcagacctccacctgctgagcccaccccaagtatgcctgccacctacgcccacaggcagggcacactgggcagccagcctgccggcaggacttgcctgcctcctcctctcagtattctctccaaagattgaaatgtgaagccccagccccaccctctgcccttcagcctactgggccaggccggacctgccccctcagtgtctctccctcccgagtccccagatggagacccctttctacaggatgaccccttgatatttgcacagggatatttctaagaaacgcagaggccagcgttcctggcctctgcagccaacacagtagaaaaggctgctgtggttttttaaaggcagttgtccactagtgtcctaggccactgcagagggcagactgctggtctccacagatacctgctgttctcagctccagcttcaaacctcgagtctcgagagggccacggggtggtttttatgaccggaatcccgcttcctccctcacgtctgatgtcctgaaggtgcagtcccacctgtacagcccctccccgcccagaactgtgaatggcctgctccaggccatggctgggggcagggagtgaggggacaatttctgagtgaaagagaaagaatggggtcggtggtgaaggtgctctcactttacagaatggagagaacatcgtgtgtgtgtgtgtgtgtgtgtgtgtgtgtgtgtgtgtgtgtgtgtgtgtaaggggaggaaagccaccttgacagcccaggtccctccaggtcacccacagccagtttcaggaaggctgcccctctctcccactaagttctggcctgaagggacctgctttcttggcctggcttccacctctccactcctgtgtctacctggccagtggagtggtccatgctaagtctaacactcctgggagctcaggaggcttctgagcttctcctgtactgtgcatcgtgagggccagagacaggaatgtaaggattggcaactgtgttacctttcaagtttatctcaataaccaggtcatcagggacccattgttctcttcagaaccctatctgggagagaaggcgaaccacctccgggtttccatcatgtcaaggtcacaggcatccatgtgtgcaaaccatctgccccagctgcctccacagactgctgtctccttgtcctcctcggccctgccccacttcagggctgctgtgagatggaattccaggaaagaacttcaggtgtctggaccctttctatctagataatatttttagattcttctgctccctagtgacctacctgggggcaaagaaattgcaaggacttttttttaagggtcagagttttcaaaacaaaagcatcttccctagaaatttttgtgaattgtttgcacttgtgcctgttttaaattaaattgagtgttcaaagcca

SEQ ID NO: 365861 - DNA, 3653 bp, Homo sapiens
ggcgttcccgcgccgaggtccctcccgcggagggcgggcccggctcccacgacctcttcgagcgttcctgggcttcccgctccgcaggcctgcggaggactggcccagcaaggtcccaggtcttccctctcctcagcgcctaagagagaggcccagtgcgggtgaggagtcgcgaggaagaggcggaaggcgccggaaggcaccatgttccgcaagaaaaagaagaaacgccctgagatctcagcgccacagaacttccagcaccgtgtccacacctccttcgaccccaaagaaggcaagtttgtgggcctccccccacaatggcagaacatcctggacacactgcggcgccccaagcccgtggtggacccttcgcgaatcacacgggtgcagctccagcccatgaagacagtggtgcggggcagcgcgatgcctgtggatggctacatctcggggctgctcaacgacatccagaagttgtcagtcatcagctccaacaccctgcgtggccgcagccccaccagccggcggcgggcacagtccctggggctgctgggggatgagcactgggccaccgacccagacatgtacctccagagcccccagtctgagcgcactgacccccacggcctctacctcagctgcaacgggggcacaccagcaggccacaagcagatgccgtggcccgagccacagagcccacgggtcctgcccaatgggctggctgcaaaggcacagtccctgggccccgccgagtttcagggtgcctcgcagcgctgtctgcagctgggtgcctgcctgcagagctccccaccaggagcctcgccccccacgggcaccaataggcatggaatgaaggctgccaagcatggctctgaggaggcccggccacagtcctgcctggtgggctcagccacaggcaggccaggtggggaaggcagccctagccctaagacccgggagagcagcctgaagcgcaggctattccgaagcatgttcctgtccactgctgccacagcccctccaagcagcagcaagccaggccctccaccacagagcaagcccaactcctctttccgaccgccgcagaaagacaaccccccaagcctggtggccaaggcccagtccttgccctcggaccagccggtggggaccttcagccctctgaccacttcggataccagcagcccccagaagtccctccgcacagccccggccacaggccagcttccaggccggtcttccccagcgggatccccccgcacctggcacgcccagatcagcaccagcaacctgtacctgccccaggaccccacggttgccaagggtgccctggctggtgaggacacaggtgttgtgacacatgagcagttcaaggctgcgctcaggatggtggtggaccagggtgacccccggctgctgctggacagctacgtgaagattggcgagggctccaccggcatcgtctgcttggcccgggagaagcactcgggccgccaggtggccgtcaagatgatggacctcaggaagcagcagcgcagggagctgctcttcaacgaggtggtgatcatgcgggactaccagcacttcaacgtggtggagatgtacaagagctacctggtgggcgaggagctgtgggtgctcatggagttcctgcagggaggagccctcacagacatcgtctcccaagtcaggctgaatgaggagcagattgccactgtgtgtgaggctgtgctgcaggccctggcctacctgcatgctcagggtgtcatccaccgggacatcaagagtgactccatcctgctgaccctcgatggcagggtgaagctctcggacttcggattctgtgctcagatcagcaaagacgtccctaagaggaagtccctggtgggaaccccctactggatggctcctgaagtgatctccaggtctttgtatgccactgaggtggatatctggtctctgggcatcatggtgattgagatggtagatggggagccaccgtacttcagtgactccccagtgcaagccatgaagaggctccgggacagccccccacccaagctgaaaaactctcacaaggtctccccagtgctgcgagacttcctggagcggatgctggtgcgggacccccaagagagagccacagcccaggagctcctagaccaccccttcctgctgcagacagggctacctgagtgcctggtgcccctgatccagctctaccgaaagcagacctccacctgctgagcccaccccaagtatgcctgccacctacgcccacaggcagggcacactgggcagccagcctgccggcaggacttgcctgcctcctcctctcagtattctctccaaagattgaaatgtgaagccccagccccaccctctgcccttcagcctactgggccaggccggacctgccccctcagtgtctctccctcccgagtccccagatggagacccctttctacaggatgaccccttgatatttgcacagggatatttctaagaaacgcagaggccagcgttcctggcctctgcagccaacacagtagaaaaggctgctgtggttttttaaaggcagttgtccactagtgtcctaggccactgcagagggcagactgctggtctccacagatacctgctgttctcagctccagcttcaaacctcgagtctcgagagggccacggggtggtttttatgaccggaatcccgcttcctccctcacgtctgatgtcctgaaggtgcagtcccacctgtacagcccctccccgcccagaactgtgaatggcctgctccaggccatggctgggggcagggagtgaggggacaatttctgagtgaaagagaaagaatggggtcggtggtgaaggtgctctcactttacagaatggagagaacatcgtgtgtgtgtgtgtgtgtgtgtgtgtgtgtgtgtgtgtgtgtgtgtgtgtaaggggaggaaagccaccttgacagcccaggtccctccaggtcacccacagccagtttcaggaaggctgcccctctctcccactaagttctggcctgaagggacctgctttcttggcctggcttccacctctccactcctgtgtctacctggccagtggagtggtccatgctaagtctaacactcctgggagctcaggaggcttctgagcttctcctgtactgtgcatcgtgagggccagagacaggaatgtaaggattggcaactgtgttacctttcaagtttatctcaataaccaggtcatcagggacccattgttctcttcagaaccctatctgggagagaaggcgaaccacctccgggtttccatcatgtcaaggtcacaggcatccatgtgtgcaaaccatctgccccagctgcctccacagactgctgtctccttgtcctcctcggccctgccccacttcagggctgctgtgagatggaattccaggaaagaacttcaggtgtctggaccctttctatctagataatatttttagattcttctgctccctagtgacctacctgggggcaaagaaattgcaaggacttttttttaagggtcagagttttcaaaacaaaagcatcttccctagaaatttttgtgaattgtttgcacttgtgcctgttttaaattaaattgagtgttcaaagcca

SEQ ID NO: 365862 - DNA, 1008 bp, Homo sapiens
tagcttcaccccgactacccggcgtgcgcgtcctcctgccggcctgcaggcccggggcctccgcctgcttccccacagctgctccttgcggccccgcttgcgttcacgctgtcgcccgggccggcgcggccgcgggcaaccgctccccctcccacacctaccccgccccctccccgccttttccgccctccggtccccctccctcggcccgctgctgctgctccagatgaggtgatggcaacggccaacttcggcaagatccagatcgggatttacgtggagatcaagcgcagcgatggccgaatacatcaagcaatggtaacatctttaaatgaagataatgaaagtgtaactgttgaatggatagaaaatggagatacaaaaggcaaagagattgacctggagagcatcttttcacttaaccctgaccttgttcctgatgaagaaattgaacccagtccagaaacacctccacctccagcatcctcagccaaagtaaacaaaattgtaaagaatcgacggactgtagcttctattaagaatgaccctccttcaagagataatagagtggttggttcagcacgtgcacggcccagtcaatttcctgaacagtcttcctctgcacaacagaatgcacgtagaaaatctaattgtgtgaaagaagtagaaaaactgcaagaaaaacgagagaaaaggagattgcaacagcaagaacttagagaaaaaagagcccagcaaaaaaaaaacttgtgtggggcggccttgcggacgccgagaaaaaggtttctcaagaacactcgcgtgggggcggcgggggcgccccataggtgaaggcgcacccgggccacagagctgccccgagggagaaaacccgggcaaggcatcagggcggggtttccccccataaaaaaaggcccgcgcggacccggagtgttctcgaacacaccaagggattccgaggcacacacggctctcacagcggggtccagcagggagacgataaatacg

SEQ ID NO: 365863 - DNA, 3969 bp, Homo sapiens
tagcttcaccccgactacccggcgtgcgcgtcctcctgccggcctgcaggcccggggcctccgcctgcttccccacagctgctccttgcggccccgcttgcgttcacgctgtcgcccgggccggcgcggccgcgggcaaccgctccccctcccacacctaccccgccccctccccgccttttccgccctccggtccccctccctcggcccgctgctgctgctccagatgaggtgatggcaacggccaacttcggcaagatccagatcgggatttacgtggagatcaagcgcagcgatggccgaatacatcaagcaatggtaacatctttaaatgaagataatgaaagtgtaactgttgaatggatagaaaatggagatacaaaaggcaaagagattgacctggagagcatcttttcacttaaccctgaccttgttcctgatgaagaaattgaacccagtccagaaacacctccacctccagcatcctcagccaaagtaaacaaaattgtaaagaatcgacggactgtagcttctattaagaatgaccctccttcaagagataatagagtggttggttcagcacgtgcacggcccagtcaatttcctgaacagtcttcctctgcacaacagaatggtagtgtttcagatatatctccagttcaagctgcaaaaaaggaatttggacccccttcacgtagaaaatctaattgtgtgaaagaagtagaaaaactgcaagaaaaacgagagaaaaggagattgcaacagcaagaacttagagaaaaaagagcccaggacgttgatgctacaaacccaaattatgaaattatgtgtatgatcagagactttagaggaagtttggattatagaccattaacaacagcagatcctattgatgaacataggatatgtgtgtgtgtaagaaaacgaccactcaataaaaaagaaactcaaatgaaagatcttgatgtaatcacaattcctagtaaagatgttgtgatggtacatgaaccaaaacaaaaagtagatttaacaaggtacctagaaaaccaaacatttcgttttgattatgcctttgatgactcagctcctaatgaaatggtttacaggtttactgctagaccactagtggaaactatatttgaaaggggaatggctacatgctttgcttatgggcagactggaagtggaaaaactcatactatgggtggtgacttttcaggaaagaaccaagattgttctaaaggaatttatgcattagcagctcgagatgtctttttaatgctaaagaagccaaactataagaagctagaacttcaagtatatgcaaccttctttgaaatttatagtggaaaggtgtttgacttgctaaacaggaaaacaaaattaagagttctagaagatggaaaacagcaggttcaagtggtgggattacaggaacgggaggtcaaatgtgttgaagatgtactgaaactcattgacataggcaacagttgcagaacatccggtcaaacatctgcaaatgcacattcatctcggagccatgcagtgtttcagattattcttagaaggaaaggaaaactacatggcaaattttctctcattgatttggctggaaatgaaagaggagctgatacttccagtgcggacaggcaaactaggcttgaaggtgctgaaattaataaaagccttttagcactcaaggagtgcatcagagccttaggtagaaataaacctcatactcctttccgtgcaagtaaactcactcaggtgttaagagattctttcataggtgaaaactctcgtacctgcatgattgccacaatctctccaggaatggcatcctgtgaaaatactcttaatacattaagatatgcaaatagggtcaaagaattgactgtagatccaactgctgctggtgatgttcgtccaataatgcaccatccaccaaaccagattgatgacttagagacacagtggggtgtggggagttcccctcagagagatgatctaaaacttctttgtgaacaaaatgaagaagaagtctctccacagttgtttactttccacgaagctgtttcacaaatggtagaaatggaagaacaagttgtagaagatcacagggcagtgttccaggaatctattcggtggttagaagatgaaaaggccctcttagagatgactgaagaagtagattatgatgtcgattcatatgctacacaacttgaagctattcttgagcaaaaaatagacattttaactgaactgcgggataaagtgaaatctttccgtgcagctctacaagaggaggaacaagccagcaagcaaatcaacccgaagagaccccgtgccctttaaaccggcatttgctgctaaaggatacccagaaccctcactactgtaacatacaacggttcagctgtaagggccatttgaaagtttggaattttaagtgtctgtggaaaatgttttgtccttcacctgaattacatttcaattttgtgaaacactcttttgtctacaaaatgcttctagtccaggaggcacaaccaagaactgggattaatgaagcattttgtttcatttacacaaatagtgatttacttttggagatccttgtcagttttattttctatttgatgaagtaagactgtggactcaatccagagccagatagtagggggaagccacagcatttccttttaactcagttcaatttttgtagtgagactgagcagttttaaatcctttgcgtgcatgcatacctcatcagtgattgtacataccttgcccactcctagagacagctgtgctcaccttttcctgctttgtgccttgattaaggctactgaccctaaatttctgaagcacagccaagaaaaattacattccttgtcattgtaaattacctttgtgtgtacatttttactgtatttgagacattttttgtgtgtgactagttaattttgcaggatgtgccatatcattgaacggaactaaagtctgtgacagtggatatagctgctggaccattccatcttatatgtaaagaaatctggaattattattttaaaaccatataacatgtgattataatttttcttagcattttctttgtaaagaactacaatataaactagttggtgtataataaaaagtaatgaaattctgagaagagttttatcttaggaaaatacatatatatgcagtgtgtgtgccagtgtggtattaacaagactaatagtgcagtttgatccttaccaatatcattacttaatttgaagtgttcattagcaccccaaaatataccttttctatgtactgttaaaagaaattggcttctgatgcatgaacatttacatgtacattgaaagtagtccataatagaagttagtttaagccaagtgtagacagtacattactcccttgaaaaagaattaagttgaaagagttgactttgccttaaaaggcagatctaacccaagctccatccagtaccaaatgtgaaacttcattgttgtttggtgagaatcgccaaattctcactaatacattggtatggtgtagggcatgctactttttaaacagcagcacttatttttacagattgctactccaaggaagaaaactggccacttttcatgtaaatattttgttcaaagatttgtatatctctctaggagttttccctcagttcccaggatggggtccaggagtagattaacagctaaaaatctcccaaggatatcttgttttgatttatttactccagggaactatcagctccttcacaggagccaaaggggagctatgaatagagggtcacatgagccagattctttactgttcataaaacccagagagtagttgtgaaagatcctaatacaattgtgaaaagctctgtaaacatgaaatctaaaacaaatgtagattttcacaatatgcttattaataaatgaagtctatggaata

SEQ ID NO: 365864 - DNA, 4571 bp, Homo sapiens
tagcttcaccccgactacccggcgtgcgcgtcctcctgccggcctgcaggcccggggcctccgcctgcttccccacagctgctccttgcggccccgcttgcgttcacgctgtcgcccgggccggcgcggccgcgggcaaccgctccccctcccacacctaccccgccccctccccgccttttccgccctccggtccccctccctcggcccgctgctgctgctccagatgaggtgatggcaacggccaacttcggcaagatccagatcgggatttacgtggagatcaagcgcagcgatggccgaatacatcaagcaatggtaacatctttaaatgaagataatgaaagtgtaactgttgaatggatagaaaatggagatacaaaaggcaaagagattgacctggagagcatcttttcacttaaccctgaccttgttcctgatgaagaaattgaacccagtccagaaacacctccacctccagcatcctcagccaaagtaaacaaaattgtaaagaatcgacggactgtagcttctattaagaatgaccctccttcaagagataatagagtggttggttcagcacgtgcacggcccagtcaatttcctgaacagtcttcctctgcacaacagaatggtagtgtttcagatatatctccagttcaagctgcaaaaaaggaatttggacccccttcacgtagaaaatctaattgtgtgaaagaagtagaaaaactgcaagaaaaacgagagaaaaggagattgcaacagcaagaacttagagaaaaaagagcccaggacgttgatgctacaaacccaaattatgaaattatgtgtatgatcagagactttagaggaagtttggattatagaccattaacaacagcagatcctattgatgaacataggatatgtgtgtgtgtaagaaaacgaccactcaataaaaaagaaactcaaatgaaagatcttgatgtaatcacaattcctagtaaagatgttgtgatggtacatgaaccaaaacaaaaagtagatttaacaaggtacctagaaaaccaaacatttcgttttgattatgcctttgatgactcagctcctaatgaaatggtttacaggtttactgctagaccactagtggaaactatatttgaaaggggaatggctacatgctttgcttatgggcagactggaagtggaaaaactcatactatgggtggtgacttttcaggaaagaaccaagattgttctaaaggaatttatgcattagcagctcgagatgtctttttaatgctaaagaagccaaactataagaagctagaacttcaagtatatgcaaccttctttgaaatttatagtggaaaggtgtttgacttgctaaacaggaaaacaaaattaagagttctagaagatggaaaacagcaggttcaagtggtgggattacaggaacgggaggtcaaatgtgttgaagatgtactgaaactcattgacataggcaacagttgcagaacatccggtcaaacatctgcaaatgcacattcatctcggagccatgcagtgtttcagattattcttagaaggaaaggaaaactacatggcaaattttctctcattgatttggctggaaatgaaagaggagctgatacttccagtgcggacaggcaaactaggcttgaaggtgctgaaattaataaaagccttttagcactcaaggagtgcatcagagccttaggtagaaataaacctcatactcctttccgtgcaagtaaactcactcaggtgttaagagattctttcataggtgaaaactctcgtacctgcatgattgccacaatctctccaggaatggcatcctgtgaaaatactcttaatacattaagatatgcaaatagggtcaaagaattgactgtagatccaactgctgctggtgatgttcgtccaataatgcaccatccaccaaaccagattgatgacttagagacacagtggggtgtggggagttcccctcagagagatgatctaaaacttctttgtgaacaaaatgaagaagaagtctctccacagttgtttactttccacgaagctgtttcacaaatggtagaaatggaagaacaagttgtagaagatcacagggcagtgttccaggaatctattcggtggttagaagatgaaaaggccctcttagagatgactgaagaagtagattatgatgtcgattcatatgctacacaacttgaagctattcttgagcaaaaaatagacattttaactgaactgcgggataaagtgaaatctttccgtgcagctctacaagaggaggaacaagccagcaagcaaatcaacccgaagagaccccgtgccctttaaaccggcatttgctgctaaaggatacccagaaccctcactactgtaacatacaacggttcagctgtaagggccatttgaaagtttggaattttaagtgtctgtggaaaatgttttgtccttcacctgaattacatttcaattttgtgaaacactcttttgtctacaaaatgcttctagtccaggaggcacaaccaagaactgggattaatgaagcattttgtttcatttacacaaatagtgatttacttttggagatccttgtcagttttattttctatttgatgaagtaagactgtggactcaatccagagccagatagtagggggaagccacagcatttccttttaactcagttcaatttttgtagtgagactgagcagttttaaatcctttgcgtgcatgcatacctcatcagtgattgtacataccttgcccactcctagagacagctgtgctcaccttttcctgctttgtgccttgattaaggctactgaccctaaatttctgaagcacagccaagaaaaattacattccttgtcattgtaaattacctttgtgtgtacatttttactgtatttgagacattttttgtgtgtgactagttaattttgcaggatgtgccatatcattgaacggaactaaagtctgtgacagtggatatagctgctggaccattccatcttatatgtaaagaaatctggaattattattttaaaaccatataacatgtgattataatttttcttagcattttctttgtaaagaactacaatataaactagttggtgtataataaaaagtaatgaaattctgagaagagttttatcttaggaaaatacatatatatgcagtgtgtgtgccagtgtggtattaacaagactaatagtgcagtttgatccttaccaatatcattacttaatttgaagtgttcattagcaccccaaaatataccttttctatgtactgttaaaagaaattggcttctgatgcatgaacatttacatgtacattgaaagtagtccataatagaagttagtttaagccaagtgtagacagtacattactcccttgaaaaagaattaagttgaaagagttgactttgccttaaaaggcagatctaacccaagctccatccagtaccaaatgtgaaacttcattgttgtttggtgagaatcgccaaattctcactaatacattggtatggtgtagggcatgctactttttaaacagcagcacttatttttacagattgctactccaaggaagaaaactggccacttttcatgtaaatattttgttcaaagatttgtatatctctctaggagttttccctcagttcccaggatggggtccaggagtagattaacagctaaaaatctcccaaggatatcttgttttgatttatttactccagggaactatcagctccttcacaggagccaaaggggagctatgaatagagggtcacatgagccagattctttactgttcataaaacccagagagtagttgtgaaagatcctaatacaattgtgaaaagctctgtaaacatgaaatctaaaacaaatgtagattttcacaatatgcttattaataaatgaagtctatggaataagttttagagataatttacttcagtcacctttgttttggaaaggactcaggttttcttgcagctgtaagatatattctatttgtgtttatttcaaagggaagaggaaggatggagaactgttacaattgaccttgcaaaggatatttaaaaaaaaggtagtttttgagattaaccaactttcaaagggcaataaagacatgtgaatttgctcattttaaagcacaacagatgattagcttcaaatttattatttgcattggatgggtactgtctttggaaagtctccttatagacaaatatgctgccttacactatgatggcttcattctgatcaggtattttaaaaattagtaccagaaaagatactggaggtaatataatacagtccttcagctttacagatagtgaaaactgaaggccagaaaaggaactaaaactcagcagttcataggggtagagggaaataacctgagaaagccgagttaaatcttaaaatttttactataaggatagagatgatacaagtgaactctgcaaaatagttttgtgaaattaaacaaaaaaatctactcttaatgtatattatttcatatttgtttaa

SEQ ID NO: 365865 - DNA, 3112 bp, Homo sapiens
tagcttcaccccgactacccggcgtgcgcgtcctcctgccggcctgcaggcccggggcctccgcctgcttccccacagctgctccttgcggccccgcttgcgttcacgctgtcgcccgggccggcgcggccgcgggcaaccgctccccctcccacacctaccccgccccctccccgccttttccgccctccggtccccctccctcggcccgctgctgctgctccagatgaggtgatggcaacggccaacttcggcaagatccagatcgggatttacgtggagatcaagcgcagcgatggccgaatacatcaagcaatggtaacatctttaaatgaagataatgaaagtgtaactgttgaatggatagaaaatggagatacaaaaggcaaagagattgacctggagagcatcttttcacttaaccctgaccttgttcctgatgaagaaattgaacccagtccagaaacacctccacctccagcatcctcagccaaagtaaacaaaattgtaaagaatcgacggactgtagcttctattaagaatgaccctccttcaagagataatagagtggttggttcagcacgtgcacggcccagtcaatttcctgaacagtcttcctctgcacaacagaatgcacgtagaaaatctaattgtgtgaaagaagtagaaaaactgcaagaaaaacgagagaaaaggagattgcaacagcaagaacttagagaaaaaagagcccaggacgttgatgctacaaacccaaattatgaaattatgtgtatgatcagagactttagaggaagtttggattatagaccattaacaacagcagatcctattgatgaacataggatatgtgtgtgtgtaagaaaacgaccactcaataaaaaagaaactcaaatgaaagatcttgatgtaatcacaattcctagtaaagatgttgtgatggtacatgaaccaaaacaaaaagtagatttaacaaggtacctagaaaaccaaacatttcgttttgattatgcctttgatgactcagctcctaatgaaatggtttacaggtttactgctagaccactagtggaaactatatttgaaaggggaatggctacatgctttgcttatgggcagactggaagtggaaaaactcatactatgggtggtgacttttcaggaaagaaccaagattgttctaaaggaatttatgcattagcagctcgagatgtctttttaatgctaaagaagccaaactataagaagctagaacttcaagtatatgcaaccttctttgaaatttatagtggaaaggtgtttgacttgctaaacaggaaaacaaaattaagagttctagaagatggaaaacagcaggttcaagtggtgggattacaggaacgggaggtcaaatgtgttgaagatgtactgaaactcattgacataggcaacagttgcagaacatccggtcaaacatctgcaaatgcacattcatctcggagccatgcagtgtttcagattattcttagaaggaaaggaaaactacatggcaaattttctctcattgatttggctggaaatgaaagaggagctgatacttccagtgcggacaggcaaactaggcttgaaggtgctgaaattaataaaagccttttagcactcaaggagtgcatcagagccttaggtagaaataaacctcatactcctttccgtgcaagtaaactcactcaggtgttaagagattctttcataggtgaaaactctcgtacctgcatgattgccacaatctctccaggaatggcatcctgtgaaaatactcttaatacattaagatatgcaaatagggtcaaagaattgactgtagatccaactgctgctggtgatgttcgtccaataatgcaccatccaccaaaccagattgatgacttagagacacagtggggtgtggggagttcccctcagagagatgatctaaaacttctttgtgaacaaaatgaagaagaagtctctccacagttgtttactttccacgaagctgtttcacaaatggtagaaatggaagaacaagttgtagaagatcacagggcagtgttccaggaatctattcggtggttagaagatgaaaaggccctcttagagatgactgaagaagtagattatgatgtcgattcatatgctacacaacttgaagctattcttgagcaaaaaatagacattttaactgaactgcgggataaagtgaaatctttccgtgcagctctacaagaggaggaacaagccagcaagcaaatcaacccgaagagaccccgtgccctttaaaccggcatttgctgctaaaggatacccagaaccctcactactgtaacatacaacggttcagctgtaagggccatttgaaagtttggaattttaagtgtctgtggaaaatgttttgtccttcacctgaattacatttcaattttgtgaaacactcttttgtctacaaaatgcttctagtccaggaggcacaaccaagaactgggattaatgaagcattttgtttcatttacacaaatagtgatttacttttggagatccttgtcagttttattttctatttgatgaagtaagactgtggactcaatccagagccagatagtagggggaagccacagcatttccttttaactcagttcaatttttgtagtgagactgagcagttttaaatcctttgcgtgcatgcatacctcatcagtgattgtacataccttgcccactcctagagacagctgtgctcaccttttcctgctttgtgccttgattaaggctactgaccctaaatttctgaagcacagccaagaaaaattacattccttgtcattgtaaattacctttgtgtgtacatttttactgtatttgagacattttttgtgtgtgactagttaattttgcaggatgtgccatatcattgaacggaactaaagtctgtgacagtggatatagctgctggaccattccatcttatatgtaaagaaatctggaattattattttaaaaccatataacatgtgattataatttttcttagcattttctttgtaaagaactacaatataaactagttggtgtataataaaaagtaatgaaattctga

SEQ ID NO: 365866 - DNA, 2871 bp, Homo sapiens
ggacgcgtgggtcgacccacgcgatccggatttacgtggagatcaagcgcagcgatggccgaatacatcaagcaatggtaacatctttaaatgaagataatgaaagtgtaactgttgaatggatagaaaatggagatacaaaaggcaaagagattgacctggagagcatcttttcacttaaccctgaccttgttcctgatgaagaaattgaacccagtccagaaacacctccacctccagcatcctcagccaaagtaaacaaaattgtaaagaatcgacggactgtagcttctattaagaatgaccctccttcaagagataatagagtggttggttcagcacgtgcacggcccagtcaatttcctgaacagtcttcctctgcacaacagaatgcacgtagaaaatctaattgtgtgaaagaagtagaaaaactgcaagaaaaacgagagaaaaggagattgcaacagcaagaacttagagaaaaaagagcccaggacgttgatgctacaaacccaaattatgaaattatgtgtatgatcagagactttagaggaagtttggattatagaccattaacaacagcagatcctattgatgaacataggatatgtgtgtgtgtaagaaaacgaccactcaataaaaaagaaactcaaatgaaagatcttgatgtaatcacaattcctagtaaagatgttgtgatggtacatgaaccaaaacaaaaagtagatttaacaaggtacctagaaaaccaaacatttcgttttgattatgcctttgatgactcagctcctaatgaaatggtttacaggtttactgctagaccactagtggaaactatatttgaaaggggaatggctacatgctttgcttatgggcagactggaagtggaaaaactcatactatgggtggtgacttttcaggaaagaaccaagattgttctaaaggaatttatgcattagcagctcgagatgtctttttaatgctaaagaagccaaactataagaagctagaacttcaagtatatgcaaccttctttgaaatttatagtggaaaggtgtttgacttgctaaacaggaaaacaaaattaagagttctagaagatggaaaacagcaggttcaagtggtgggattacaggaacgggaggtcaaatgtgttgaagatgtactgaaactcattgacataggcaacagttgcagaacatccggtcaaacatctgcaaatgcacattcatctcggagccatgcagtgtttcagattattcttagaaggaaaggaaaactacatggcaaattttctctcattgatttggctggaaatgaaagaggagctgatacttccagtgcggacaggcaaactaggcttgaaggtgctgaaattaataaaagccttttagcactcaaggagtgcatcagagccttaggtagaaataaacctcatactcctttccgtgcaagtaaactcactcaggtgttaagagattctttcataggtgaaaactctcgtacctgcatgattgccacaatctctccaggaatggcatcctgtgaaaatactcttaatacattaagatatgcaaatagggtcaaagaattgactgtagatccaactgctgctggtgatgttcgtccaataatgcaccatccaccaaaccagattgatgacttagagacacagtggggtgtggggagttcccctcagagagatgatctaaaacttctttgtgaacaaaatgaagaagaagtctctccacagttgtttactttccacgaagctgtttcacaaatggtagaaatggaagaacaagttgtagaagatcacagggcagtgttccaggaatctattcggtggttagaagatgaaaaggccctcttagagatgactgaagaagtagattatgatgtcgattcatatgctacacaacttgaagctattcttgagcaaaaaatagacattttaactgaactgcgggataaagtgaaatctttccgtgcagctctacaagaggaggaacaagccagcaagcaaatcaacccgaagagaccccgtgccctttaaaccggcatttgctgctaaaggatacccagaaccctcactactgtaacatacaacggttcagctgtaagggccatttgaaagtttggaattttaagtgtctgtggaaaatgttttgtccttcacctgaattacatttcaattttgtgaaacactcttttgtctacaaaatgcttctagtccaggaggcacaaccaagaactgggattaatgaagcattttgtttcatttacacaaatagtgatttacttttggagatccttgtcagttttattttctatttgatgaagtaagactgtggactcaatccagagccagatagtagggggaagccacagcatttccttttaactcagttcaatttttgtagtgagactgagcagttttaaatcctttgcgtgcatgcatacctcatcagtgattgtacataccttgcccactcctagagacagctgtgctcaccttttcctgctttgtgccttgattaaggctactgaccctaaatttctgaagcacagccaagaaaaattacattccttgtcattgtaaattacctttgtgtgtacatttttactgtatttgagacattttttgtgtgtgactagttaattttgcaggatgtgccatatcattgaacggaactaaagtctgtgacagtggatatagctgctggaccattccatcttatatgtaaagaaatctggaattattattttaaaaccatataacatgtgattataatttttcttagcattttctttgtaaagaactacaatataaactagttggtgtataataaaaagtaatgaaattctga

SEQ ID NO: 365867 - DNA, 2026 bp, Homo sapiens
attctccctactgtatcctaggtaaagagtaactgattcctctagaaatagaaaatttgagttgctttttaaaaatatttgttggatctcaattttctgtatatgaaatttttgacagctcgagatgtctttttaatgctaaagaagccaaactataagaagctagaacttcaagtatatgcaaccttctttgaaatttatagtggaaaggtgtttgacttgctaaacaggaaaacaaaattaagagttctagaagatggaaaacagcaggttcaagtggtgggattacaggaacgggaggtcaaatgtgttgaagatgtactgaaactcattgacataggcaacagttgcagaacatccggtcaaacatctgcaaatgcacattcatctcggagccatgcagtgtttcagattattcttagaaggaaaggaaaactacatggcaaattttctctcattgatttggctggaaatgaaagaggagctgatacttccagtgcggacaggcaaactaggcttgaaggtgctgaaattaataaaagccttttagcactcaaggagtgcatcagagccttaggtagaaataaacctcatactcctttccgtgcaagtaaactcactcaggtgttaagagattctttcataggtgaaaactctcgtacctgcatgattgccacaatctctccaggaatggcatcctgtgaaaatactcttaatacattaagatatgcaaatagggtcaaagaattgactgtagatccaactgctgctggtgatgttcgtccaataatgcaccatccaccaaaccagattgatgacttagagacacagtggggtgtggggagttcccctcagagagatgatctaaaacttctttgtgaacaaaatgaagaagaagtctctccacagttgtttactttccacgaagctgtttcacaaatggtagaaatggaagaacaagttgtagaagatcacagggcagtgttccaggaatctattcggtggttagaagatgaaaaggccctcttagagatgactgaagaagtagattatgatgtcgattcatatgctacacaacttgaagctattcttgagcaaaaaatagacattttaactgaactgcgggataaagtgaaatctttccgtgcagctctacaagaggaggaacaagccagcaagcaaatcaacccgaagagaccccgtgccctttaaaccggcatttgctgctaaaggatacccagaaccctcactactgtaacatacaacggttcagctgtaagggccatttgaaagtttggaattttaagtgtctgtggaaaatgttttgtccttcacctgaattacatttcaattttgtgaaacactcttttgtctacaaaatgcttctagtccaggaggcacaaccaagaactgggattaatgaagcattttgtttcatttacacaaatagtgatttacttttggagatccttgtcagttttattttctatttgatgaagtaagactgtggactcaatccagagccagatagtagggggaagccacagcatttccttttaactcagttcaatttttgtagtgagactgagcagttttaaatcctttgcgtgcatgcatacctcatcagtgattgtacataccttgcccactcctagagacagctgtgctcaccttttcctgctttgtgccttgattaaggctactgaccctaaatttctgaagcacagccaagaaaaattacattccttgtcattgtaaattacctttgtgtgtacatttttactgtatttgagacattttttgtgtgtgactagttaattttgcaggatgtgccatatcattgaacggaactaaagtctgtgacagtggatatagctgctggaccattccatcttatatgtaaagaaatctggaattattattttaaaaccatataacatgtgattataatttttcttagcattttctttgtaaagaactacaatataaactagttggtgtataataaaaagtaatgaaattctga

SEQ ID NO: 365868 - DNA, 1353 bp, Homo sapiens
actcgggaagctgaggtgggagaattgcttgaacccatgaggtggaggttgcagtgagcctagatcgcaccattgcactcaagcttgggtgacagagtgaggactccatctcaaaaaaaaaaaggtagactatgtattttacaatgtgaaacctgcctatactctaggaggaattccaataaattaaaacagagaactgtaaatgtgccaaacagaacagaaagctattgaaagatacagaaaaacaggtatttctggaaatctgtaacaaaaaactttcgcaatagttgagcattctatttagttccgagtttctagacaacaaagaacaaaaggaaaaatactgagttactgttaggaaataacacagctgacttgattgaacccataaagttgtaaactcttactgcgtgtaatacaatacttattccctctttcttttctttttccaagataaagtgaaatctttccgtgcagctctacaagaggaggaacaagccagcaagcaaatcaacccgaagagaccccgtgccctttaaaccggcatttgctgctaaaggatacccagaaccctcactactgtaacatacaacggttcagctgtaagggccatttgaaagtttggaattttaagtgtctgtggaaaatgttttgtccttcacctgaattacatttcaattttgtgaaacactcttttgtctacaaaatgcttctagtccaggaggcacaaccaagaactgggattaatgaagcattttgtttcatttacacaaatagtgatttacttttggagatccttgtcagttttattttctatttgatgaagtaagactgtggactcaatccagagccagatagtagggggaagccacagcatttccttttaactcagttcaatttttgtagtgagactgagcagttttaaatcctttgcgtgcatgcatacctcatcagtgattgtacataccttgcccactcctagagacagctgtgctcaccttttcctgctttgtgccttgattaaggctactgaccctaaatttctgaagcacagccaagaaaaattacattccttgtcattgtaaattacctttgtgtgtacatttttactgtatttgagacattttttgtgtgtgactagttaattttgcaggatgtgccatatcattgaacggaactaaagtctgtgacagtggatatagctgctggaccattccatcttatatgtaaagaaatctggaattattattttaaaaccatataacatgtgattataatttttcttagcattttctttgtaaagaactacaatataaactagttggtgtataataaaaagtaatgaaattctga

SEQ ID NO: 365869 - DNA, 625 bp, Homo sapiens
ataatttcttaactatttttattttaaggaagaagaagtctctccacagttgtttactttccacgaagctgtttcacaaatggtagaaatggaagaacaagttgtagaagatcacagggcagtgttccaggtaaagtaagacaggactttccttcaaaatatttcttgagataaattaagaatttgtcataattccttaaatatcacactattccttaaaaaatacttgtttgtatatatgtatatgtgtatttgtagggcatgtgacatggcaaatttttaatacaatgaacgatggctacaaataacatttctttgcaccatggtgaaacgttctactttatttacctcccgtcccccttattggtttttgtcatttgtccatttttagggaagagtgtcacttctgcccaccagtacttccttctaaatgttaggccaatgtatttgatagcagttaagaaaaactcttttaaagggttttggagcagttgaggaagtatcagttgttgcagaaaagagagactacttacttcaggagatggagagttactgctctgagctgtcagtggcaagttaagggaagggtgttatatcaccacctgtagcagtaactccttaggca

SEQ ID NO: 365870 - DNA, 3169 bp, Homo sapiens
tagcttcaccccgactacccggcgtgcgcgtcctcctgccggcctgcaggcccggggcctccgcctgcttccccacagctgctccttgcggccccgcttgcgttcacgctgtcgcccgggccggcgcggccgcgggcaaccgctccccctcccacacctaccccgccccctccccgccttttccgccctccggtccccctccctcggcccgctgctgctgctccagatgaggtgatggcaacggccaacttcggcaagatccagatcgggatttacgtggagatcaagcgcagcgatggccgaatacatcaagcaatggtaacatctttaaatgaagataatgaaagtgtaactgttgaatggatagaaaatggagatacaaaaggcaaagagattgacctggagagcatcttttcacttaaccctgaccttgttcctgatgaagaaattgaacccagtccagaaacacctccacctccagcatcctcagccaaagtaaacaaaattgtaaagaatcgacggactgtagcttctattaagaatgaccctccttcaagagataatagagtggttggttcagcacgtgcacggcccagtcaatttcctgaacagtcttcctctgcacaacagaatggtagtgtttcagatatatctccagttcaagctgcaaaaaaggaatttggacccccttcacgtagaaaatctaattgtgtgaaagaagtagaaaaactgcaagaaaaacgagagaaaaggagattgcaacagcaagaacttagagaaaaaagagcccaggacgttgatgctacaaacccaaattatgaaattatgtgtatgatcagagactttagaggaagtttggattatagaccattaacaacagcagatcctattgatgaacataggatatgtgtgtgtgtaagaaaacgaccactcaataaaaaagaaactcaaatgaaagatcttgatgtaatcacaattcctagtaaagatgttgtgatggtacatgaaccaaaacaaaaagtagatttaacaaggtacctagaaaaccaaacatttcgttttgattatgcctttgatgactcagctcctaatgaaatggtttacaggtttactgctagaccactagtggaaactatatttgaaaggggaatggctacatgctttgcttatgggcagactggaagtggaaaaactcatactatgggtggtgacttttcaggaaagaaccaagattgttctaaaggaatttatgcattagcagctcgagatgtctttttaatgctaaagaagccaaactataagaagctagaacttcaagtatatgcaaccttctttgaaatttatagtggaaaggtgtttgacttgctaaacaggaaaacaaaattaagagttctagaagatggaaaacagcaggttcaagtggtgggattacaggaacgggaggtcaaatgtgttgaagatgtactgaaactcattgacataggcaacagttgcagaacatccggtcaaacatctgcaaatgcacattcatctcggagccatgcagtgtttcagattattcttagaaggaaaggaaaactacatggcaaattttctctcattgatttggctggaaatgaaagaggagctgatacttccagtgcggacaggcaaactaggcttgaaggtgctgaaattaataaaagccttttagcactcaaggagtgcatcagagccttaggtagaaataaacctcatactcctttccgtgcaagtaaactcactcaggtgttaagagattctttcataggtgaaaactctcgtacctgcatgattgccacaatctctccaggaatggcatcctgtgaaaatactcttaatacattaagatatgcaaatagggtcaaagaattgactgtagatccaactgctgctggtgatgttcgtccaataatgcaccatccaccaaaccagattgatgacttagagacacagtggggtgtggggagttcccctcagagagatgatctaaaacttctttgtgaacaaaatgaagaagaagtctctccacagttgtttactttccacgaagctgtttcacaaatggtagaaatggaagaacaagttgtagaagatcacagggcagtgttccaggaatctattcggtggttagaagatgaaaaggccctcttagagatgactgaagaagtagattatgatgtcgattcatatgctacacaacttgaagctattcttgagcaaaaaatagacattttaactgaactgcgggataaagtgaaatctttccgtgcagctctacaagaggaggaacaagccagcaagcaaatcaacccgaagagaccccgtgccctttaaaccggcatttgctgctaaaggatacccagaaccctcactactgtaacatacaacggttcagctgtaagggccatttgaaagtttggaattttaagtgtctgtggaaaatgttttgtccttcacctgaattacatttcaattttgtgaaacactcttttgtctacaaaatgcttctagtccaggaggcacaaccaagaactgggattaatgaagcattttgtttcatttacacaaatagtgatttacttttggagatccttgtcagttttattttctatttgatgaagtaagactgtggactcaatccagagccagatagtagggggaagccacagcatttccttttaactcagttcaatttttgtagtgagactgagcagttttaaatcctttgcgtgcatgcatacctcatcagtgattgtacataccttgcccactcctagagacagctgtgctcaccttttcctgctttgtgccttgattaaggctactgaccctaaatttctgaagcacagccaagaaaaattacattccttgtcattgtaaattacctttgtgtgtacatttttactgtatttgagacattttttgtgtgtgactagttaattttgcaggatgtgccatatcattgaacggaactaaagtctgtgacagtggatatagctgctggaccattccatcttatatgtaaagaaatctggaattattattttaaaaccatataacatgtgattataatttttcttagcattttctttgtaaagaactacaatataaactagttggtgtataataaaaagtaatgaaattctga

SEQ ID NO: 365871 - DNA, 1004 bp, Homo sapiens
tagcttcaccccgactacccggcgtgcgcgtcctcctgccggcctgcaggcccggggcctccgcctgcttccccacagctgctccttgcggccccgcttgcgttcacgctgtcgcccgggccggcgcggccgcgggcaaccgctccccctcccacacctaccccgccccctccccgccttttccgccctccggtccccctccctcggcccgctgctgctgctccagatgaggtgatggcaacggccaacttcggcaagatccagatcgggatttacgtggagatcaagcgcagcgatggccgaatacatcaagcaatggtaacatctttaaatgaagataatgaaagtgtaactgttgaatggatagaaaatggagatacaaaaggcaaagagattgacctggagagcatcttttcacttaaccctgaccttgttcctgatgaagaaattgaacccagtccagaaacacctccacctccagcatcctcagccaaagtaaacaaaattgtaaagaatcgacggactgtagcttctattaagaatgaccctccttcaagagataatagagtggttggttcagcacgtgcacggcccagtcaatttcctgaacagtcttcctctgcacaacagaatggtagtgtttcagatatatctccagttcaagctgcaaaaaaggaatttggacccccttgtatgtaaattatgtatcaaggatttagtcattttaggcatacatgtattctctcttggtcatccttttaagtcctcaaagagtaaacactctaaatacaagcttgattgcagatttcattttaccactgtggaaaatttaacttcttcttattagtctgttaattgggttttttaaagtatattttggagcaaaaatttttttgtgaaattatagcaatgtttcagtttgagtttaaaattctgggcagatgataatttgtcagatgttacagaagaatgtgttgggctccttgattctttgaattaaaaag

SEQ ID NO: 365872 - DNA, 3285 bp, Homo sapiens
tagcttcaccccgactacccggcgtgcgcgtcctcctgccggcctgcaggcccggggcctccgcctgcttccccacagctgctccttgcggccccgcttgcgttcacgctgtcgcccgggccggcgcggccgcgggcaaccgctccccctcccacacctaccccgccccctccccgccttttccgccctccggtccccctccctcggcccgctgctgctgctccagatgaggtgatggcaacggccaacttcggcaagatccagatcgggatttacgtggagatcaagcgcagcgatggccgaatacatcaagcaatggtaacatctttaaatgaagataatgaaagtgtaactgttgaatggatagaaaatggagatacaaaaggcaaagagattgacctggagagcatcttttcacttaaccctgaccttgttcctgatgaagaaattgaacccagtccagaaacacctccacctccagcatcctcagccaaagtaaacaaaattgtaaagaatcgacggactgtagcttctattaagaatgaccctccttcaagagataatagagtggttggttcagcacgtgcacggcccagtcaatttcctgaacagtcttcctctgcacaacagaatggtagtgtttcagatatatctccagttcaagctgcaaaaaaggaatttggacccccttcacgtagaaaatctaattgtgtgaaagaagtagaaaaactgcaagaaaaacgagagaaaaggagattgcaacagcaagaacttagagaaaaaagagcccaggacgttgatgctacaaacccaaattatgaaattatgtgtatgatcagagactttagaggaagtttggattatagaccattaacaacagcagatcctattgatgaacataggatatgtgtgtgtgtaagaaaacgaccactcaataaaaaagaaactcaaatgaaagatcttgatgtaatcacaattcctagtaaagatgttgtgatggtacatgaaccaaaacaaaaagtagatttaacaaggtacctagaaaaccaaacatttcgttttgattatgcctttgatgactcagctcctaatgaaatggtttacaggtttactgctagaccactagtggaaactatatttgaaaggggaatggctacatgctttgcttatgggcagactggaagtggaaaaactcatactatgggtggtgacttttcaggaaagaaccaagattgttctaaaggaatttatgcattagcagctcgagatgtctttttaatgctaaagaagccaaactataagaagctagaacttcaagtatatgcaaccttctttgaaatttatagtggaaaggtgtttgacttgctaaacaggaaaacaaaattaagagttctagaagatggaaaacagcaggttcaagtggtgggattacaggaacgggaggtcaaatgtgttgaagatgtactgaaactcattgacataggcaacagttgcagaacatccggtcaaacatctgcaaatgcacattcatctcggagccatgcagtgtttcagattattcttagaaggaaaggaaaactacatggcaaattttctctcattgatttggctggaaatgaaagaggagctgatacttccagtgcggacaggcaaactaggcttgaaggtgctgaaattaataaaagccttttagcactcaaggagtgcatcagagccttaggtagaaataaacctcatactcctttccgtgcaagtaaactcactcaggtgttaagagattctttcataggtgaaaactctcgtacctgcatgattgccacaatctctccaggaatggcatcctgtgaaaatactcttaatacattaagatatgcaaatagagtaaaggagtttggaattagtccatcagacattcccttctcacagggtagtggcagtcgccctgatctctctccttcttatgaatatgacgacttttctccttcagttaccaggtggtcaaagaattgactgtagatccaactgctgctggtgatgttcgtccaataatgcaccatccaccaaaccagattgatgacttagagacacagtggggtgtggggagttcccctcagagagatgatctaaaacttctttgtgaacaaaatgaagaagaagtctctccacagttgtttactttccacgaagctgtttcacaaatggtagaaatggaagaacaagttgtagaagatcacagggcagtgttccaggaatctattcggtggttagaagatgaaaaggccctcttagagatgactgaagaagtagattatgatgtcgattcatatgctacacaacttgaagctattcttgagcaaaaaatagacattttaactgaactgcgggataaagtgaaatctttccgtgcagctctacaagaggaggaacaagccagcaagcaaatcaacccgaagagaccccgtgccctttaaaccggcatttgctgctaaaggatacccagaaccctcactactgtaacatacaacggttcagctgtaagggccatttgaaagtttggaattttaagtgtctgtggaaaatgttttgtccttcacctgaattacatttcaattttgtgaaacactcttttgtctacaaaatgcttctagtccaggaggcacaaccaagaactgggattaatgaagcattttgtttcatttacacaaatagtgatttacttttggagatccttgtcagttttattttctatttgatgaagtaagactgtggactcaatccagagccagatagtagggggaagccacagcatttccttttaactcagttcaatttttgtagtgagactgagcagttttaaatcctttgcgtgcatgcatacctcatcagtgattgtacataccttgcccactcctagagacagctgtgctcaccttttcctgctttgtgccttgattaaggctactgaccctaaatttctgaagcacagccaagaaaaattacattccttgtcattgtaaattacctttgtgtgtacatttttactgtatttgagacattttttgtgtgtgactagttaattttgcaggatgtgccatatcattgaacggaactaaagtctgtgacagtggatatagctgctggaccattccatcttatatgtaaagaaatctggaattattattttaaaaccatataacatgtgattataatttttcttagcattttctttgtaaagaactacaatataaactagttggtgtataataaaaagtaatgaaattctga

SEQ ID NO: 365873 - DNA, 3308 bp, Homo sapiens
tagcttcaccccgactacccggcgtgcgcgtcctcctgccggcctgcaggcccggggcctccgcctgcttccccacagctgctccttgcggccccgcttgcgttcacgctgtcgcccgggccggcgcggccgcgggcaaccgctccccctcccacacctaccccgccccctccccgccttttccgccctccggtccccctccctcggcccgctgctgctgctccagatgaggtgatggcaacggccaacttcggcaagatccagatcgggatttacgtggagatcaagcgcagcgatggatagagtcttattctgtctcccagactggagtgcaatggtgtgatgtcagttcactgcaacctctgcctcctgggctcaactgatcctccccgctcagcctcccaagtagctgggactacagatgcacaccacatccggccgaatacatcaagcaatggtaacatctttaaatgaagataatgaaagtgtaactgttgaatggatagaaaatggagatacaaaaggcaaagagattgacctggagagcatcttttcacttaaccctgaccttgttcctgatgaagaaattgaacccagtccagaaacacctccacctccagcatcctcagccaaagtaaacaaaattgtaaagaatcgacggactgtagcttctattaagaatgaccctccttcaagagataatagagtggttggttcagcacgtgcacggcccagtcaatttcctgaacagtcttcctctgcacaacagaatggtagtgtttcagatatatctccagttcaagctgcaaaaaaggaatttggacccccttcacgtagaaaatctaattgtgtgaaagaagtagaaaaactgcaagaaaaacgagagaaaaggagattgcaacagcaagaacttagagaaaaaagagcccaggacgttgatgctacaaacccaaattatgaaattatgtgtatgatcagagactttagaggaagtttggattatagaccattaacaacagcagatcctattgatgaacataggatatgtgtgtgtgtaagaaaacgaccactcaataaaaaagaaactcaaatgaaagatcttgatgtaatcacaattcctagtaaagatgttgtgatggtacatgaaccaaaacaaaaagtagatttaacaaggtacctagaaaaccaaacatttcgttttgattatgcctttgatgactcagctcctaatgaaatggtttacaggtttactgctagaccactagtggaaactatatttgaaaggggaatggctacatgctttgcttatgggcagactggaagtggaaaaactcatactatgggtggtgacttttcaggaaagaaccaagattgttctaaaggaatttatgcattagcagctcgagatgtctttttaatgctaaagaagccaaactataagaagctagaacttcaagtatatgcaaccttctttgaaatttatagtggaaaggtgtttgacttgctaaacaggaaaacaaaattaagagttctagaagatggaaaacagcaggttcaagtggtgggattacaggaacgggaggtcaaatgtgttgaagatgtactgaaactcattgacataggcaacagttgcagaacatccggtcaaacatctgcaaatgcacattcatctcggagccatgcagtgtttcagattattcttagaaggaaaggaaaactacatggcaaattttctctcattgatttggctggaaatgaaagaggagctgatacttccagtgcggacaggcaaactaggcttgaaggtgctgaaattaataaaagccttttagcactcaaggagtgcatcagagccttaggtagaaataaacctcatactcctttccgtgcaagtaaactcactcaggtgttaagagattctttcataggtgaaaactctcgtacctgcatgattgccacaatctctccaggaatggcatcctgtgaaaatactcttaatacattaagatatgcaaatagggtcaaagaattgactgtagatccaactgctgctggtgatgttcgtccaataatgcaccatccaccaaaccagattgatgacttagagacacagtggggtgtggggagttcccctcagagagatgatctaaaacttctttgtgaacaaaatgaagaagaagtctctccacagttgtttactttccacgaagctgtttcacaaatggtagaaatggaagaacaagttgtagaagatcacagggcagtgttccaggaatctattcggtggttagaagatgaaaaggccctcttagagatgactgaagaagtagattatgatgtcgattcatatgctacacaacttgaagctattcttgagcaaaaaatagacattttaactgaactgcgggataaagtgaaatctttccgtgcagctctacaagaggaggaacaagccagcaagcaaatcaacccgaagagaccccgtgccctttaaaccggcatttgctgctaaaggatacccagaaccctcactactgtaacatacaacggttcagctgtaagggccatttgaaagtttggaattttaagtgtctgtggaaaatgttttgtccttcacctgaattacatttcaattttgtgaaacactcttttgtctacaaaatgcttctagtccaggaggcacaaccaagaactgggattaatgaagcattttgtttcatttacacaaatagtgatttacttttggagatccttgtcagttttattttctatttgatgaagtaagactgtggactcaatccagagccagatagtagggggaagccacagcatttccttttaactcagttcaatttttgtagtgagactgagcagttttaaatcctttgcgtgcatgcatacctcatcagtgattgtacataccttgcccactcctagagacagctgtgctcaccttttcctgctttgtgccttgattaaggctactgaccctaaatttctgaagcacagccaagaaaaattacattccttgtcattgtaaattacctttgtgtgtacatttttactgtatttgagacattttttgtgtgtgactagttaattttgcaggatgtgccatatcattgaacggaactaaagtctgtgacagtggatatagctgctggaccattccatcttatatgtaaagaaatctggaattattattttaaaaccatataacatgtgattataatttttcttagcattttctttgtaaagaactacaatataaactagttggtgtataataaaaagtaatgaaattctga

SEQ ID NO: 365874 - DNA, 3893 bp, Homo sapiens
tagcttcaccccgactacccggcgtgcgcgtcctcctgccggcctgcaggcccggggcctccgcctgcttccccacagctgctccttgcggccccgcttgcgttcacgctgtcgcccgggccggcgcggccgcgggcaaccgctccccctcccacacctaccccgccccctccccgccttttccgccctccggtccccctccctcggcccgctgctgctgctccagatgaggtgatggcaacggccaacttcggcaagatccagatcgggatttacgtggagatcaagcgcagcgatggccgaatacatcaagcaatggtaacatctttaaatgaagataatgaaagtgtaactgttgaatggatagaaaatggagatacaaaaggcaaagagattgacctggagagcatcttttcacttaaccctgaccttgttcctgatgaagaaattgaacccagtccagaaacacctccacctccagcatcctcagccaaagtaaacaaaattgtaaagaatcgacggactgtagcttctattaagaatgaccctccttcaagagataatagagtggttggttcagcacgtgcacggcccagtcaatttcctgaacagtcttcctctgcacaacagaatggtagtgtttcagatatatctccagttcaagctgcaaaaaaggaatttggacccccttcacgtagaaaatctaattgtgtgaaagaagtagaaaaactgcaagaaaaacgagagaaaaggagattgcaacagcaagaacttagagaaaaaagagcccaggacgttgatgctacaaacccaaattatgaaattatgtgtatgatcagagactttagaggaagtttggattatagaccattaacaacagcagatcctattgatgaacataggatatgtgtgtgtgtaagaaaacgaccactcaataaaaaagaaactcaaatgaaagatcttgatgtaatcacaattcctagtaaagatgttgtgatggtacatgaaccaaaacaaaaagtagatttaacaaggtacctagaaaaccaaacatttcgttttgattatgcctttgatgactcagctcctaatgaaatggtttacaggtttactgctagaccactagtggaaactatatttgaaaggggaatggctacatgctttgcttatgggcagactggaagtggaaaaactcatactatgggtggtgacttttcaggaaagaaccaagattgttctaaaggaatttatgcattagcagctcgagatgtctttttaatgctaaagaagccaaactataagaagctagaacttcaagtatatgcaaccttctttgaaatttatagtggaaaggtgtttgacttgctaaacaggaaaacaaaattaagagttctagaagatggaaaacagcaggttcaagtggtgggattacaggaacgggaggtcaaatgtgttgaagatgtactgaaactcattgacataggcaacagttgcagaacatccggtcaaacatctgcaaatgcacattcatctcggagccatgcagtgtttcagattattcttagaaggaaaggaaaactacatggcaaattttctctcattgatttggctggaaatgaaagaggagctgatacttccagtgcggacaggcaaactaggcttgaaggtgctgaaattaataaaagccttttagcactcaaggagtgcatcagagccttaggtagaaataaacctcatactcctttccgtgcaagtaaactcactcaggtgttaagagattctttcataggtgaaaactctcgtacctgcatgattgccacaatctctccaggaatggcatcctgtgaaaatactcttaatacattaagatatgcaaatagggtcaaagaattgactgtagatccaactgctgctggtgatgttcgtccaataatgcaccatccaccaaaccagattgatgacttagagacacagtggggtgtggggagttcccctcagagagatgatctaaaacttctttgtgaacaaaatgaagaagaagtctctccacagttgtttactttccacgaagctgtttcacaaatggtagaaatggaagaacaagttgtagaagatcacagggcagtgttccaggaatctattcggtggttagaagatgaaaaggccctcttagagatgactgaagaagtagattatgatgtcgattcatatgctacacaacttgaagctattcttgagcaaaaaatagacattttaactgaactgcgggataaagtgaaatctttccgtgcagctctacaagaggaggaacaagccagcaagcaaatcaacccgaagagaccccgtgccctttaaaccggcatttgctgctaaaggatacccagaaccctcactactgtaacatacaacggttcagctgtaagggccatttgaaagtttggaattttaagtgtctgtggaaaatgttttgtccttcacctgaattacatttcaattttgtttcatttacacaaatagtgatttacttttggagatccttgtcagttttattttctatttgatgaagtaagactgtggactcaatccagagccagatagtagggggaagccacagcatttccttttaactcagttcaatttttgtagtgagactgagcagttttaaatcctttgcgtgcatgcatacctcatcagtgattgtacataccttgcccactcctagagacagctgtgctcaccttttcctgctttgtgccttgattaaggctactgaccctaaatttctgaagcacagccaagaaaaattacattccttgtcattgtaaattacctttgtgtgtacatttttactgtatttgagacattttttgtgtgtgactagttaattttgcaggatgtgccatatcattgaacggaactaaagtctgtgacagtggatatagctgctggaccattccatcttatatgtaaagaaatctggaattattattttaaaaccatataacatgtgattataatttttcttagcattttctttgtaaagaactacaatataaactagttggtgtataataaaaagtaatgaaattctgagaagagttttatcttaggaaaatacatatatatgcagtgtgtgtgccagtgtggtattaacaagactaatagtgcagtttgatccttaccaatatcattacttaatttgaagtgttcattagcaccccaaaatataccttttctatgtactgttaaaagaaattggcttctgatgcatgaacatttacatgtacattgaaagtagtccataatagaagttagtttaagccaagtgtagacagtacattactcccttgaaaaagaattaagttgaaagagttgactttgccttaaaaggcagatctaacccaagctccatccagtaccaaatgtgaaacttcattgttgtttggtgagaatcgccaaattctcactaatacattggtatggtgtagggcatgctactttttaaacagcagcacttatttttacagattgctactccaaggaagaaaactggccacttttcatgtaaatattttgttcaaagatttgtatatctctctaggagttttccctcagttcccaggatggggtccaggagtagattaacagctaaaaatctcccaaggatatcttgttttgatttatttactccagggaactatcagctccttcacaggagccaaaggggagctatgaatagagggtcacatgagccagattctttactgttcataaaacccagagagtagttgtgaaagatcctaatacaattgtgaaaagctctgtaaacatgaaatctaaaacaaatgtagattttcacaatatgcttattaataaatgaagtctatggaata

SEQ ID NO: 365875 - DNA, 3294 bp, Homo sapiens
tagcttcaccccgactacccggcgtgcgcgtcctcctgccggcctgcaggcccggggcctccgcctgcttccccacagctgctccttgcggccccgcttgcgttcacgctgtcgcccgggccggcgcggccgcgggcaaccgctccccctcccacacctaccccgccccctccccgccttttccgccctccggtccccctccctcggcccgctgctgctgctccagatgaggtgatggcaacggccaacttcggcaagatccagatcgggatttacgtggagatcaagcgcagcgatggccgaatacatcaagcaatggtaacatctttaaatgaagataatgaaagtgtaactgttgaatggatagaaaatggagatacaaaaggcaaagagattgacctggagagcatcttttcacttaaccctgaccttgttcctgatgaagaaattgaacccagtccagaaacacctccacctccagcatcctcagccaaagtaaacaaaattgtaaagaatcgacggactgtagcttctattaagaatgaccctccttcaagagataatagagtggttggttcagcacgtgcacggcccagtcaatttcctgaacagtcttcctctgcacaacagaatggtagtgtttcagatatatctccagttcaagctgcaaaaaaggaatttggacccccttcacgtagaaaatctaattgtgtgaaagaagtagaaaaactgcaagaaaaacgagagaaaaggagattgcaacagcaagaacttagagaaaaaagagcccaggacgttgatgctacaaacccaaattatgaaattatgtgtatgatcagagactttagaggaagtttggattatagaccattaacaacagcagatcctattgatgaacataggatatgtgtgtgtgtaagaaaacgaccactcaataaaaaagaaactcaaatgaaagatcttgatgtaatcacaattcctagtaaagatgttgtgatggtacatgaaccaaaacaaaaagtagatttaacaaggtacctagaaaaccaaacatttcgttttgattatgcctttgatgactcagctcctaatgaaatggtttacaggtttactgctagaccactagtggaaactatatttgaaaggggaatggctacatgctttgcttatgggcagactggaagtggaaaaactcatactatgggtggtgacttttcaggaaagaaccaagattgttctaaaggaatttatgcattagcagctcgagatgtctttttaatgctaaagaagccaaactataagaagctagaacttcaagtatatgcaaccttctttgaaatttatagtggaaaggtgtttgacttgctaaacaggaaaacaaaattaagagttctagaagatggaaaacagcaggttcaagtggtgggattacaggaacgggaggtcaaatgtgttgaagatgtactgaaactcattgacataggcaacagttgcagaacatccggtcaaacatctgcaaatgcacattcatctcggagccatgcagtgtttcagattattcttagaaggaaaggaaaactacatggcaaattttctctcattgatttggctggaaatgaaagaggagctgatacttccagtgcggacaggcaaactaggcttgaaggtgctgaaattaataaaagccttttagcactcaaggagtgcatcagagccttaggtagaaataaacctcatactcctttccgtgcaagtaaactcactcaggtgttaagagattctttcataggtgaaaactctcgtacctgcatgattgccacaatctctccaggaatggcatcctgtgaaaatactcttaatacattaagatatgcaaatagggtcaaagaattgactgtagatccaactgctgctggtgatgttcgtccaataatgcaccatccaccaaaccagattgatgacttagagacacagtggggtgtggggagttcccctcagagagatgatctaaaacttctttgtgaacaaaatgaagaagaagtctctccacagttgtttactttccacgaagctgtttcacaaatggtagaaatggaagaacaagttgtagaagatcacagggcagtgttccaggaatctattcggtggttagaagatgaaaaggccctcttagagatgactgaagaagtagattatgatgtcgattcatatgctacacaacttgaagctattcttgagcaaaaaatagacattttaactgaactgcgggataaagtgaaatctttccgtgcagctctacaagaggaggaacaagccagcaagcaaatcaacccgaagagaccccgtgccctttaaaccggcatttgctgctaaaggatacccagaaccctcactactgtaacatacaacggttcagctgtaagggccatttgaaagtttggaattttaagtgtctgtggaaaatgttttgtccttcacctgaattacatttcaattttgtgaaacactcttttgtctacaaaatgcttctagtccaggaggcacaaccaagaactgggattaatgaagcattttgtttcatttacacaaatagtgatttacttttggagatccttgtcagttttattttctatttgatgaagtaagactgtggactcaatccagagccagatagtagggggaagccacagcatttccttttaactcagttcaatttttgtagtgagactgagcagttttaaatcctttgcgtgcatgcatacctcatcagtgattgtacataccttgcccactcctagagacagctgtgctcaccttttcctgcttatctcctaggagataagcaggatgctgattttcctacccgtggcccaggtctgtgccttccccatgccaaggactctaggtcaaatgtcaataaatatgaacctcgagaaagttctgaaggccatgacacctgccttgcctccctcttccattctcttaggcacagtaatagcttatttgccctataagaaccttcccagagcagcagaggcccttctactccctcttgactgtctcagcctctgggattgcagcctttgtagtgtgcttccttgcttaaatcagaggtgctgatccagaggctcagtaaccccatcaacttggtggctctggtgtctcacacttgtatccttctgccctcgagacctggcacagcagtatcccttgaagaaatcctgaggctttgtagagtgctcctgaccatgtttaataattcttccctctcctgcttatctagggatcctctag

SEQ ID NO: 365876 - DNA, 505 bp, Homo sapiens
gtgtctgtgttcgttctctcttcctttgacttcaacaagcaaaacctgcctctcccaagggctgttaagaggaaattataagataaaatcctcaatttcaaatcaatctaaaatcttgtgaaaaaggtacacatttctcacttagaaaagggtattaataactgtaattaaaaattaagtttgaagaactaaaagttgcaaaagataccactaaagggatgcatgcagtggctcacacctgaaatcccagcactccgggaggctgaggtaggaggatcacctgagctcaggaatttaagaccagcctgggcaacatagggagacttcatctcaacaaaaaattttaaaaaaaattagctgggcatggtggcacatgcttgtgtttggtcccaactactcgaaaagctgaagtgggaagatcgcttgagcccaggagttcgagcgtatggtgagctatgatcctgctcctgcactccagcctgggtgagacagtaggaacctgtct

SEQ ID NO: 365877 - DNA, 641 bp, Homo sapiens
ggtgggcatctataataagcgactgagctacatagcttttaagcttccttagagctacattaaaattttaatttactttatccttattttaatcaagacagtggttttcaaacactgaattcctacaaatccttcatgctagatagtattataattactaatttacttctgcctatccccagcctgtcactctctatccgaagctcgctgatagatacggactgtctttttttttctgttcgagacagggtctcactcgagttgcccagactgaagtgcagtggcatgatcttggctcaccacagcctcaacctcccaggctcaggtaattttcccacatcagcctccagagtagctgggactacaagtgcacaccaccacacctagctagtttattttatttgtatttttagtagagacagggttttgccatgttgcccaggctggtctcgaactcctggactcaagcgatctgcctgcctcgacctcccaaggtgctggggttacatgcatgagccaccgcgcctggccaggactgtctttcataattatgaatacttagatgccaggaaattttagctttcctttacatagtatgttgtttacaaggaatctgtttttgaaccttactggttctcttt

SEQ ID NO: 365878 - DNA, 654 bp, Homo sapiens
cgtggagtgttgtggcgtgatctcggctctctgcaacctccgtctcctgggttcaagcgattctcctgcctcagctactttggagactgaggtgggagtaccccttgagcctgggaggcgcaggttgcagtgaaccaagatcacatcactgcacttcaacctgggtgacagagcaagaccctgtctcaaaaacaaaaaacaagcaaaaaaaacctagaggcaatatttttttttaaagtttgtcttttcttttctacccaaattactaatctatgccattaaggaaaggaataagaacctccatatgtattattatctccacagtcctgcagaagtacaatctgatctttaactttcatgctacaaataataatttgagtagattaatttgaattttatcaacaaaattattgccatatgatgtatcatttctgtgtttgaacaaagcatcgtaatgcaggataacttctactttattccctgtagttaaaaaaaaaaaaactatatagttcaagccaatatttaaaaattctaaacctaggctgggcatggtgactcatacctgtaatcccagcactttgggaggccgaggcaggtgaattgcttcagcccaggagttcgagaccagcctggccaatgtggtgaaaccccatc

SEQ ID NO: 365879 - DNA, 1279 bp, Homo sapiens
tataacctatgcacattctcccatatagtttaatcatctttagatacttataatgcctaatacaatgtaaatgctatgtaaatagttgttgttatactgtattgtttagggaataacaataagaaaaacagtctgtacatgttcactacagatgcaaccattgttaagcctgactacatctttttatctgcagttgattgaatctatggatgtggaacctgtgcatatggagggtcaactgtactataaataatacgaatatgccaacattatataatcattgctttctgcaactgtttactataatttcaaaattaatatcctattaactgttcctataaattatcaaatttggcaagtgtattactagcaggagatggaccttaaattatgacaactttatattttttgatagcatctcttgaaaaagaattttaatgattctaataagaggttctttttcttttttccatttccttgacaaatagtactcatttaaaaactagagggctaggcttagtggctcacgcctgtaatctcagcactttgggaggctgaggcgggcagatcgcttgaggtcaggagttcaagaccagcccgggcaacgtggtgaaacccggtctgtactaaaaaaaaaaaaaagaaaaagaaaaagaaaaaagaatacccaggtgtggtagtgcatgcctgtagtcccagctactttggagactgaggtgggagtaccccttgagcctgggaggcgcaggttgcagtgaaccaagatcacatcactgcacttcaacctgggtgacagagcaagaccctgtctcaaaaacaaaaaacaagcaaaaaaaacctagaggcaatatttttttttaaagtttgtcttttcttttctacccaaattactaatctatgccattaaggaaaggaataagaacctccatatgtattattatctccacagtcctgcagaagtacaatctgatctttaactttcatgctacaaataataatttgagtagattaatttgaattttatcaacaaaattattgccatatgatgtatcatttctgtgtttgaacaaagcatcgtaatgcaggataacttctactttattccctgtagttaaaaaaaaaaaaactatatagttcaagccaatatttaaaaattctaaacctaggctgggcatggtgactcatacctgtaatcccagcactttgggaggccgaggcaggtgaattgcttcagcccaggagttcgagaccagcctggccaatgtggtgaaaccccatc

SEQ ID NO: 365880 - DNA, 1225 bp, Homo sapiens
tataacctatgcacattctcccatatagtttaatcatctttagatacttataatgcctaatacaatgtaaatgctatgtaaatagttgttgttatactgtattgtttagggaataacaataagaaaaacagtctgtacatgttcactacagatgcaaccattgttaagcctgactacatctttttatctgcagttgattgaatctatggatgtggaacctgtgcatatggagggtcaactgtactataaataatacgaatatgccaacattatataatcattgctttctgcaactgtttactataatttcaaaattaatatcctattaactgttcctataaattatcaaatttggcaagtgtattactagcaggagatggaccttaaattatgacaactttatattttttgatagcatctcttgaaaaagaattttaatgattctaataagaggttctttttcttttttccatttccttgacaaatagtactcatttaagctgaggcgggcagatcgcttgaggtcaggagttcaagaccagcccgggcaacgtggtgaaacccggtctgtactaaaaaaaaaaaaaagaaaaagaaaaagaaaaaagaatacccaggtgtggtagtgcatgcctgtagtcccagctactttggagactgaggtgggagtaccccttgagcctgggaggcgcaggttgcagtgaaccaagatcacatcactgcacttcaacctgggtgacagagcaagaccctgtctcaaaaacaaaaaacaagcaaaaaaaacctagaggcaatatttttttttaaagtttgtcttttcttttctacccaaattactaatctatgccattaaggaaaggaataagaacctccatatgtattattatctccacagtcctgcagaagtacaatctgatctttaactttcatgctacaaataataatttgagtagattaatttgaattttatcaacaaaattattgccatatgatgtatcatttctgtgtttgaacaaagcatcgtaatgcaggataacttctactttattccctgtagttaaaaaaaaaaaaactatatagttcaagccaatatttaaaaattctaaacctaggctgggcatggtgactcatacctgtaatcccagcactttgggaggccgaggcaggtgaattgcttcagcccaggagttcgagaccagcctggccaatgtggtgaaaccccatc

SEQ ID NO: 365881 - DNA, 635 bp, Homo sapiens
tgtttttttagtgtccaacaggtatttttaacttctgggggcttccttttactgtttctaaatagcaacatttcatcaattgcagtatcactgacatacaaccatgttttgttatgccccctcaaggccagtcgccaatgactacagtatgtatttctggatattaaaaatagtcttgcttttttttttctaagatggattagctaaatcctgcataaaagaaacagtatgaactatgatttctaaaagtcttctttggcctaggattttaggattccgtgctacaatctcatgtgtctacttccaaagtccaaagtatgcttgaaatctacacattttgagtgactacctagtatttaccacaggctcatgagcttaagaacgtctacttttacaacttgttcagtggtaaaataagcactctttaatatatgctgatcctctcttttgctatgaaagaatgtattatttattttctttggatatatagccaatctttttgtgaagaacctccagctgggtagggtggctcatgcttataaagcccagtgctttgggaggccaatggaggaggattgcttgaggccagaagttcaagaccagcttgtgaaacatagcaagacactgtctctaca

SEQ ID NO: 365882 - DNA, 412 bp, Homo sapiens
ccttctgctgaatctataatagatcttctagttttcccttataaatattcaagtttattctccctagccaaagcacaaaactaaatccattctcttcagcgaactacgtcagacacataatgatctgcatgaagttttataacaatgtctttctatatttattagaaatatattcccccccataagaagcatgaattctagatgctgtgtgtccagtaggttgtccaggtatcagcacatcagcctttaggatgatgggaagatggagtacctacatcctcctttctcttgctgatgccagcttcgtgagttttccctttccccactaaggcttatttctaacccatgccaagtagcatttggaattcatcctaaccctggtgcatgacagatggtaatgcaggagtggctc

SEQ ID NO: 365883 - DNA, 3247 bp, Homo sapiens
tcctggcgagaagcgagccggcggcctgaggaggcgactgactgagcagcgcacccggggagcaaggaggcgcggtgaactgagcggcccctgagctgacagatacactgcgcagctggaacggcgagcgagccgacgggcgagtgaggggcgcagccatgatcacctcggccgctggaattatttctcttctggatgaagatgaaccacagcttaaggaatttgcactacacaaattgaatgcagttgttaatgacttctgggcagaaatttccgagtccgtagacaaaatagaggttttatacgaagatgaaggtttccggagtcggcagtttgcagccttagtggcatctaaagtattttatcacctgggggcttttgaggagtctctgaattatgctcttggagcaggggacctcttcaatgtcaatgataactctgaatatgtggaaactattatagcaaaatgcattgatcactacaccaaacaatgtgtggaaaatgcagatttgcctgaaggagaaaaaaaaccaattgaccagagattggaaggcatcgtaaataaaatgttccagcgatgtctagatgatcacaagtataaacaggctattggcattgctctggagacacgaagactggacgtctttgaaaagaccatactggagtcgaatgatgtcccaggaatgttagcttatagccttaagctctgcatgtctttaatgcagaataaacagtttcggaataaagtactaagagttctagttaaaatctacatgaacttggagaaacctgatttcatcaatgtttgtcagtgcttaattttcttagatgatcctcaggctgtgagtgatatcttagagaaactggtaaaggaagacaacctcctgatggcatatcagatttgttttgatttgtatgaaagtgctagccagcagtttttgtcatctgtaatccagaatcttcgaactgttggcacccctattgcttctgtgcctggatccactaatacgggtactgttccgggatcagagaaagacagtgactcgatggaaacagaagaaaagacaagcagtgcatttgtaggaaagacaccagaagccagtccagagcctaaggaccagactttgaaaatgattaaaattttaagtggtgaaatggctattgagttacatctgcagttcttaatacgaaacaataatacagacctcatgattctaaaaaacacaaaggatgcagtacggaattctgtatgtcatactgcaaccgttatagcaaactcttttatgcactgtgggacaaccagtgaccagtttcttagagataatttggaatggttagccagagccactaactgggcaaaatttactgctacagccagtttgggtgtaattcataagggtcatgaaaaagaagcattacagttaatggcaacataccttcccaaggatacttctccaggatcagcctatcaggaaggtggaggtctctatgcactaggtcttattcatgccaatcatggtggtgatataattgactatctgcttaatcagcttaagaacgccagcaatgatatcgttagacacggtggcagtctgggccttggtttggcagccatgggaactgcacgtcaagatgtttatgatttgctaaaaacaaacctttatcaggatgatgcagtaacaggggaagcagctggcctggccctaggtttggttatgttgggctctaaaaatgctcaggctattgaggacatggttggttatgcacaagaaactcaacatgagaagattctgcgtggtcttgcagttggcatagctttagtaatgtatgggaggatggaagaggctgatgctctcattgaatctctctgtcgtgacaaggacccaattcttcgaaggtctggaatgtatactgtagccatggcttattgtggctctggtaacaacaaagcaattcgacgcctgctacatgttgctgtaagtgatgttaatgatgatgtcaggagggcagcagtagaatcacttgggttcattctattcagaacccctgaacagtgcccaagtgttgtctctttgttgtcagagagttacaaccctcatgtgcgctacggagctgcaatggccttggggatatgctgtgctggtacaggaaacaaggaagccattaatttgctagaaccaatgacaaacgaccccgtgaactacgtgaggcaaggggcactcatagcttcagctctcatcatgatccagcagactgaaatcacttgtccaaaggtgaatcagttcagacagctgtattccaaagtcatcaatgataagcatgatgatgtcatggccaagtttggcgctattctggcccagggcatactggatgcaggtggtcataatgtcacaatctccttgcagtccaggactgggcatactcatatgccttctgtggttggcgtccttgtatttacccagttttggttctggtttcctctttcacacttcctgtcattggcttatacccctacctgtgtcattggccttaacaaggacttaaagatgccgaaagttcagtataaatcgaactgtaaaccatccacatttgcatatcctgcccctctggaagtaccaaaagaaaaagaaaaggaaaaggtttctactgctgtattatctataactgccaaggctaaaaagaaggaaaaagaaaaggaaaaaaaggaggaggagaaaatggaagtggatgaggcagagaaaaaggaggaaaaagagaagaaaaaagaacctgagccaaacttccagttattggataacccagcccgagttatgcctgcccagcttaaggtcctaaccatgccggagacctgtagataccagcctttcaaaccactctctattggaggcatcatcattctgaaggataccagtgaagacattgaggagctggtggaacctgtggcagcacatggcccaaaaatcgaggaggaggaacaagagccagaacccccagaaccatttgagtatattgatgattaagggccagaggatctcacttgcttatctgaagaagattgtccaggctcatattgggaatgcttatgaggaaattcatgccgagacctgctattcaatgcatgtatcgttgcctctgcactgacctgaagaaccctgtctccaagtctttggttgaagagaagatatatgactgttgagtgtgctctttcacagaacttggttttcaaataaatataagatctccagat

SEQ ID NO: 365884 - DNA, 1064 bp, Homo sapiens
tcctggcgagaagcgagccggcggcctgaggaggcgactgactgagcagcgcacccggggagcaaggaggcgcggtgaactgagcggcccctgagctgacagatacactgcgcagctggaacggcgagcgagccgacgggcgagtgaggggcgcagccatgatcacctcggccgctggaattatttctcttctggatgaagatgaaccacagcttaaggaatttgcactacacaaattgaatgcagttgttaatgacttctgggcagaaatttccgagtccgtagacaaaatagaggttttatacgaagatgaaggtttccggagtcggcagtttgcagccttagtggcatctaaagtattttatcacctgggggcttttgaggagtctctgaattatgctcttggagcaggggacctcttcaatgtcaatgataactctgaatatgtggaaactattatagcaaaatgcattgatcactacaccaaacaatgtgtggaaaatgcagatttgcctgaaggagaaaaaaaaccaaaagttccaaggccctgcttttgtttcttaaaagtactttaaaaaggaaattggtcgtatttgttatttacattttatattgcgtacatatagtgagggtcagccatttttaatgatcgtcggatgaccaaagcgagccttcggagagttctctgtactacttctgactttacatggggtgtgaccatgttcattataatcttaaggagaaaaaactggtaaaaagcaaatgacagggaaaacagccttatccgaagcctccaggacactaaagaagcaggacaagcggcacaacagaggcgggcaggactacacgggtaaacagcgcgagataacggccgatataagaacaccaaataggcaacaagcagccacaattaaggcacgatgagactctggaacaaagccgccagaaaggcaacaggcgaggtgaacaacaacaacacacgagcacgaagcgacacagacccacacagccaaataagcgagcgcgcagagtcaagatacgacagcagggatgtaactcggacg

SEQ ID NO: 365885 - DNA, 844 bp, Homo sapiens
aggtctggttgcaaatctagcatgctgtgtgttagatactgactagcaatttaggaaagatttgcagaaatctcagataaatattaaggtagaaacctgccattagtaggaaaatatatttatacctcaggaagactattagtttgggccttagagaaaggcagatttatactaaccttcctattttctaaacttacttttgaaaattatctttcagccttgatagtttcctaagctttacccaacttgcacagtacagcgtaggctatcatgatcactcagtctgtctgagaattgaggtgactcacgttagctcccatcaagcctttggcaatacctcatggaaaacccttgattacagctttcaaggcagttaattacaaaatgacttagaggtttatagctggaaactggaatcttgttagttttcaaaggggtaaaatattcagtccattaggagtttggaaactataatctgtcgtggcacaaactggtatattaggactgcagaggcagggttggggcctagttttagatttcaacagttaatagtaaagaggaaaaaaaagaatgtcttgaaattaagaatgaccctagctactactgttctttcttccctttcccaggatctcacttgcttatctgaagaagattgtccaggctcatattgggaatgcttatgaggaaattcatgccgagacctgctattcaatgcatgtatcgttgcctctgcactgacctgaagaaccctgtctccaagtctttggttgaagagaagatatatgactgttgagtgtgctctttcacagaacttggttttcaaataaatataagatctccagat

SEQ ID NO: 365886 - DNA, 3300 bp, Homo sapiens
  misc_feature (3249)..(3249): n is a, c, g, or t
  misc_feature (3264)..(3264): n is a, c, g, or t
  misc_feature (3266)..(3266): n is a, c, g, or t
  misc_feature (3269)..(3270): n is a, c, g, or t
tcctggcgagaagcgagccggcggcctgaggaggcgactgactgagcagcgcacccggggagcaaggaggcgcggtgaactgagcggcccctgagctgacagatacactgcgcagctggaacggcgagcgagccgacgggcgagtgaggggcgcagccatgatcacctcggccgctggaattatttctcttctggatgaagatgaaccacagcttaaggaatttgcactacacaaattgaatgcagttgttaatgacttctgggcagaaatttccgagtccgtagacaaaatagaggttttatacgaagatgaaggtttccggagtcggcagtttgcagccttagtggcatctaaagtattttatcacctgggggcttttgaggagtctctgaattatgctcttggagcaggggacctcttcaatgtcaatgataactctgaatatgtggaaactattatagcaaaatgcattgatcactacaccaaacaatgtgtggaaaatgcagatttgcctgaaggagaaaaaaaaccaattgaccagagattggaaggcatcgtaaataaaatgttccagcgatgtctagatgatcacaagtataaacaggctattggcattgctctggagacacgaagactggacgtctttgaaaagaccatactggagtcgaatgatgtcccaggaatgttagcttatagccttaagctctgcatgtctttaatgcagaataaacagtttcggaataaagtactaagagttctagttaaaatctacatgaacttggagaaacctgatttcatcaatgtttgtcagtgcttaattttcttagatgatcctcaggctgtgagtgatatcttagagaaactggtaaaggaagacaacctcctgatggcatatcagatttgttttgatttgtatgaaagtgctagccagcagtttttgtcatctgtaatccagaatcttcgaactgttggcacccctattgcttctgtgcctggatccactaatacgggtactgttccgggatcagagaaagacagtgactcgatggaaacagaagaaaagacaagcagtgcatttgtaggaaagacaccagaagccagtccagagcctaaggaccagactttgaaaatgattaaaattttaagtggtgaaatggctattgagttacatctgcagttcttaatacgaaacaataatacagacctcatgattctaaaaaacacaaaggatgcagtacggaattctgtatgtcatactgcaaccgttatagcaaactcttttatgcactgtgggacaaccagtgaccagtttcttagagataatttggaatggttagccagagccactaactgggcaaaatttactgctacagccagtttgggtgtaattcataagggtcatgaaaaagaagcattacagttaatggcaacataccttcccaaggatacttctccaggatcagcctatcaggaaggtggaggtctctatgcactaggtcttattcatgccaatcatggtggtgatataattgactatctgcttaatcagcttaagaacgccagcaatgatatcgttagacacggtggcagtctgggccttggtttggcagccatgggaactgcacgtcaagatgtttatgatttgctaaaaacaaacctttatcaggatgatgcagtaacaggggaagcagctggcctggccctaggtttggttatgttgggctctaaaaatgctcaggctattgaggacatggttggttatgcacaagaaactcaacatgagaagattctgcgtggtcttgcagttggcatagctttagtaatgtatgggaggatggaagaggctgatgctctcattgaatctctctgtcgtgacaaggacccaattcttcgaaggtctggaatgtatactgtagccatggcttattgtggctctggtaacaacaaagcaattcgacgcctgctacatgttgctgtaagtgatgttaatgatgatgtcaggagggcagcagtagaatcacttgggttcattctattcagaacccctgaacagtgcccaagtgttgtctctttgttgtcagagagttacaaccctcatgtgcgctacggagctgcaatggccttggggatatgctgtgctggtacaggaaacaaggaagccattaatttgctagaaccaatgacaaacgaccccgtgaactacgtgaggcaaggggcactcatagcttcagctctcatcatgatccagcagactgaaatcacttgtccaaaggtgaatcagttcagacagctgtattccaaagtcatcaatgataagcatgatgatgtcatggccaagtttggcgctattctggcccagggcatactggatgcaggtggtcataatgtcacaatctccttgcagtccaggactgggcatactcatatgccttctgtggttggcgtccttgtatttacccagttttggttctggtttcctctttcacacttcctgtcattggcttatacccctacctgtgtcattggccttaacaaggacttaaagatgccgaaagttcagtataaatcgaactgtaaaccatccacatttgcatatcctgcccctctggaagtaccaaaagaaaaagaaaaggaaaaggtttctactgctgtattatctataactgccaaggctaaaaagaaggaaaaagaaaaggaaaaaaaggaggaggagaaaatggaagtggatgaggcagagaaaaaggaggaaaaagagaagaaaaaagaacctgagccaaacttccagttattggataacccagcccgagttatgcctgcccagcttaaggtcctaaccatgccggagacctgtagataccagcctttcaaaccactctctattggaggcatcatcattctgaaggataccagtgaagacattgaggagctggtggaacctgtggcagcacatggcccaaaaatcgaggaggaggaacaagagccagaacccccagaaccatttgagtatattgatgattaagggccagaggatctcacttgcttatctgaagaagattgtccaggctcatattgggaatgcttatgaggaaattcatgccgagacctgctattcaatgcatgtatcgttgcctctgcactgacctgaagaaccctgtctccaagtctttggttgaagagaagatatatgactgttgagtgtgctctttcacagaacttggttttcaaataaatataagatctccagatcnagatgcggccgggcntntcnnttccctcccaccactctccaccttctatat

SEQ ID NO: 365887 - DNA, 3588 bp, Homo sapiens
tcctggcgagaagcgagccggcggcctgaggaggcgactgactgagcagcgcacccggggagcaaggaggcgcggtgaactgagcggcccctgagctgacagatacactgcgcagctggaacggcgagcgagccgacgggcgagtgaggggcgcagccatgatcacctcggccgctggaattatttctcttctggatgaagatgaaccacagcttaaggaatttgcactacacaaattgaatgcagttgttaatgacttctgggcagaaatttccgagtccgtagacaaaatagaggttttatacgaagatgaaggtttccggagtcggcagtttgcagccttagtggcatctaaagtattttatcacctgggggcttttgaggagtctctgaattatgctcttggagcaggggacctcttcaatgtcaatgataactctgaatatgtggaaactattatagcaaaatgcattgatcactacaccaaacaatgtgtggaaaatgcagatttgcctgaaggagaaaaaaaaccaattgaccagagattggaaggcatcgtaaataaaatgttccagcgatgtctagatgatcacaagtataaacaggctattggcattgctctggagacacgaagactggacgtctttgaaaagaccatactggagtcgaatgatgtcccaggaatgttagcttatagccttaagctctgcatgtctttaatgcagaataaacagtttcggaataaagtactaagagttctagttaaaatctacatgaacttggagaaacctgatttcatcaatgtttgtcagtgcttaattttcttagatgatcctcaggctgtgagtgatatcttagagaaactggtaaaggaagacaacctcctgatggcatatcagatttgttttgatttgtatgaaagtgctagccagcagtttttgtcatctgtaatccagaatcttcgaactgttggcacccctattgcttctgtgcctggatccactaatacgggtactgttccgggatcagagaaagacagtgactcgatggaaacagaagaaaagacaagcagtgcatttgtaggaaagacaccagaagccagtccagagcctaaggaccagactttgaaaatgattaaaattttaagtggtgaaatggctattgagttacatctgcagttcttaatacgaaacaataatacagacctcatgattctaaaaaacacaaaggatgcagtacggaattctgtatgtcatactgcaaccgttatagcaaactcttttatgcactgtgggacaaccagtgaccagtttcttagagataatttggaatggttagccagagccactaactgggcaaaatttactgctacagccagtttgggtgtaattcataagggtcatgaaaaagaagcattacagttaatggcaacataccttcccaaggatacttctccaggatcagcctatcaggaaggtggaggtctctatgcactaggtcttattcatgccaatcatggtggtgatataattgactatctgcttaatcagcttaagaacgccagcaatgatatcgttagacacggtggcagtctgggccttggtttggcagccatgggaactgcacgtcaagatgtttatgatttgctaaaaacaaacctttatcaggatgatgcagtaacaggggaagcagctggcctggccctaggtttggttatgttgggctctaaaaatgctcaggctattgaggacatggttggttatgcacaagaaactcaacatgagaagattctgcgtggtcttgcagttggcatagctttagtaatgtatgggaggatggaagaggctgatgctctcattgaatctctctgtcgtgacaaggacccaattcttcgaaggtctggaatgtatactgtagccatggcttattgtggctctggtaacaacaaagcaattcgacgcctgctacatgttgctgtaagtgatgttaatgatgatgtcaggagggcagcagtagaatcacttgggttcattctattcagaacccctgaacagtgcccaagtgttgtctctttgttgtcagagagttacaaccctcatgtgcgctacggagctgcaatggccttggggatatgctgtgctggtacaggaaacaaggaagccattaatttgctagaaccaatgacaaacgaccccgtgaactacgtgaggcaaggggcactcatagcttcagctctcatcatgatccagcagactgaaatcacttgtccaaaggtgaatcagttcagacagctgtattccaaagtcatcaatgataagcatgatgatgtcatggccaagtttggcgctattctggcccagggcatactggatgcaggtggtcataatgtcacaatctccttgcagtccaggactgggcatactcatatgccttctgtggttggcgtccttgtatttacccagttttggttctggtttcctctttcacacttcctgtcattggcttatacccctacctgtgtcattggccttaacaaggacttaaagatgccgaaagttcagtataaatcgaactgtaaaccatccacatttgcatatcctgcccctctggaagtaccaaaagaaaaagaaaaggaaaaggtttctactgctgtattatctataactgccaaggctaaaaagaaggaaaaagaaaaggaaaaaaaggaggaggagaaaatggaagtggatgaggcagagaaaaaggaggaaaaagagaagaaaaaagaacctgagccaaacttccagttattggataacccagcccgagttatgcctgcccagcttaaggtcctaaccatgccggagacctgtagataccagcctttcaaaccactctctattggaggcatcatcattctgaaggataccagtgaagacattgaggagctggtggaacctgtggcagcacatggcccaaaaatcgaggaggaggaacaagagccagaacccccagaaccatttgagtatattgatgattaagggccagaggatctcacttgcttatctgaagaagattgtccaggctcatattgggaatgcttatgaggaaattcatgccgagacctgctattcaatgcatgtatcgttgcctctgcactgacctgaagaaccctgtctccaagtctttggttgaagagaagatatatgactgttgagtgtgctctttcacagaacttggttttcaaataaatataagatctccagataaaaaaaaaaaaaaaacaagaaaaaaaaaaagaacaaaaacgaaacaataccaacacaacaaaaataaccaagaaagggggcggcctccggaaaagaactaacctgaggagggcgggacccccatgtacgaccctgccccgcgctttgtctagtgaccgcagagggcgcgcccacagggcgcaaagggcgcataatcaaggaggcacacggggcgcgctgatatacaaaccggccgcccatgggaagacaccgtgcctgcgctggggcattctgtgagagagccgcacctgcttggggggggggtcccgacaaactctagggggcgacccccacactcagg

SEQ ID NO: 365888 - DNA, 3298 bp, Homo sapiens
tcctggcgagaagcgagccggcggcctgaggaggcgactgactgagcagcgcacccggggagcaaggaggcgcggtgaactgagcggcccctgagctgacagatacactgcgcagctggaacggcgagcgagccgacgggcgagtgaggggcgcagccatgatcacctcggccgctggaattatttctcttctggatgaagatgaaccacagcttaaggaatttgcactacacaaattgaatgcagttgttaatgacttctgggcagaaatttccgagtccgtagacaaaatagaggttttatacgaagatgaaggtttccggagtcggcagtttgcagccttagtggcatctaaagtattttatcacctgggggcttttgaggagtctctgaattatgctcttggagcaggggacctcttcaatgtcaatgataactctgaatatgtggaaactattatagcaaaatgcattgatcactacaccaaacaatgtgtggaaaatgcagatttgcctgaaggagaaaaaaaaccaattgaccagagattggaaggcatcgtaaataaaatgttccagcgatgtctagatgatcacaagtataaacaggctattggcattgctctggagacacgaagactggacgtctttgaaaagaccatactggagtcgaatgatgtcccaggaatgttagcttatagccttaagctctgcatgtctttaatgcagaataaacagtttcggaataaagtactaagagttctagttaaaatctacatgaacttggagaaacctgatttcatcaatgtttgtcagtgcttaattttcttagatgatcctcaggctgtgagtgatatcttagagaaactggtaaaggaagacaacctcctgatggcatatcagatttgttttgatttgtatgaaagtgctagccagcagtttttgtcatctgtaatccagaatcttcgaactgttggcacccctattgcttctgtgcctggatccactaatacgggtactgttccgggatcagagaaagacagtgactcgatggaaacagaagaaaagacaagcagtgcatttgtaggaaagacaccagaagccagtccagagcctaaggaccagactttgaaaatgattaaaattttaagtggtgaaatggctattgagttacatctgcagttcttaatacgaaacaataatacagacctcatgattctaaaaaacacaaaggatgcagtacggaattctgtatgtcatactgcaaccgttatagcaaactcttttatgcactgtgggacaaccagtgaccagtttcttagagataatttggaatggttagccagagccactaactgggcaaaatttactgctacagccagtttgggtgtaattcataagggtcatgaaaaagaagcattacagttaatggcaacataccttcccaaggatacttctccaggatcagcctatcaggaaggtggaggtctctatgcactaggtcttattcatgccaatcatggtggtgatataattgactatctgcttaatcagcttaagaacgccagcaatgatatcgttagacacggtggcagtctgggccttggtttggcagccatgggaactgcacgtcaagatgtttatgatttgctaaaaacaaacctttatcaggatgatgcagtaacaggggaagcagctggcctggccctaggtttggttatgttgggctctaaaaatgctcaggctattgaggacatggttggttatgcacaagaaactcaacatgagaagattctgcgtggtcttgcagttggcatagctttagtaatgtatgggaggatggaagaggctgatgctctcattgaatctctctgtcgtgacaaggacccaattcttcgaaggtctggaatgtatactgtagccatggcttattgtggctctggtaacaacaaagcaattcgacgcctgctacatgttgctgtaagtgatgttaatgatgatgtcaggagggcagcagtagaatcacttgggttcattctattcagaacccctgaacagtgcccaagtgttgtctctttgttgtcagagagttacaaccctcatgtgcgctacggagctgcaatggccttggggatatgctgtgctggtacaggaaacaaggaagccattaatttgctagaaccaatgacaaacgaccccgtgaactacgtgaggcaaggggcactcatagcttcagctctcatcatgatccagcagactgaaatcacttgtccaaaggtgaatcagttcagacagctgtattccaaagtcatcaatgataagcatgatgatgtcatggccaagtttggcgctattctggcccagggcatactggatgcaggtggtcataatgtcacaatctccttgcagtccaggactgggcatactcatatgccttctgtggttggcgtccttgtatttacccagttttggttctggtttcctctttcacacttcctgtcattggcttatacccctacctgtgtcattggccttaacaaggacttaaagatgccgaaagttcagtataaatcgaactgtaaaccatccacatttgcatatcctgcccctctggaagtaccaaaagaaaaagaaaaggaaaaggtttctactgctgtattatctataactgccaaggctaaaaagaaggaaaaagaaaaggaaaaaaaggaggaggagaaaatggaagtggatgaggcagagaaaaaggaggaaaaagagaagaaaaaagaacctgagccaaacttccagttattggataacccagcccgagttatgcctgcccagcttaaggtcctaaccatgccggagacctgtagataccagcctttcaaaccactctctattggaggcatcatcattctgaaggataccagtgaagacattgaggagctggtggaacctgtggcagcacatggcccaaaaatcgaggaggaggaacaagagccagaacccccagaaccatttgagtatattgatgattaagggccagaggatctcacttgcttatctgaagaagattgtccaggctcatattgggaatgcttatgaggaaattcatgccgagacctgctattcaatgcatgtatcgttgcctctgcactgacctgaagaaccctgtctccaagtctttggttgaagagaagatatatgactgttgagtgtgctctttcacagaacttggttttcaaataaatataagatctccagatgcggcaagttctcctttttttcttcttttcccccccccgcactcccacccg

SEQ ID NO: 365889 - DNA, 2952 bp, Homo sapiens
tcctggcgagaagcgagccggcggcctgaggaggcgactgactgagcagcgcacccggggagcaaggaggcgcggtgaactgagcggcccctgagctgacagatacactgcgcagctggaacggcgagcgagccgacgggcgagtgaggggcgcagccatgatcacctcggccgctggaattatttctcttctggatgaagatgaaccacagcttaaggaatttgcactacacaaattgaatgcagttgttaatgacttctgggcagaaatttccgagtccgtagacaaaatagaggttttatacgaagatgaaggtttccggagtcggcagtttgcagccttagtggcatctaaagtattttatcacctgggggcttttgaggagtctctgaattatgctcttggagcaggggacctcttcaatgtcaatgataactctgaatatgtggaaactattatagcaaaatgcattgatcactacaccaaacaatgtgtggaaaatgcagatttgcctgaaggagaaaaaaaaccaattgaccagagattggaaggcatcgtaaataaaatgttccagcgatgtctagatgatcacaagtataaacaggctattggcattgctctggagacacgaagactggacgtctttgaaaagaccatactggagtcgaatgatgtcccaggaatgttagcttatagccttaagctctgcatgtctttaatgcagaataaacagtttcggaataaagtactaagagttctagttaaaatctacatgaacttggagaaacctgatttcatcaatgtttgtcagtgcttaattttcttagatgatcctcaggctgtgagtgatatcttagagaaactggtaaaggaagacaacctcctgatggcatatcagatttgttttgatttgtatgaaagtgctagccagcagtttttgtcatctgtaatccagaatcttcgaactgttggcacccctattgcttctgtgcctggatccactaatacgggtactgttccgggatcagagaaagacagtgactcgatggaaacagaagaaaagacaagcagtgcatttgtaggaaagacaccagaagccagtccagagcctaaggaccagactttgaaaatgattaaaattttaagtggtgaaatggctattgagttacatctgcagttcttaatacgaaacaataatacagacctcatgattctaaaaaacacaaaggatgcagtacggaattctgtatgtcatactgcaaccgttatagcaaactcttttatgcactgtgggacaaccagtgaccagtttcttagagataatttggaatggttagccagagccactaactgggcaaaatttactgctacagccagtttgggtgtaattcataagggtcatgaaaaagaagcattacagttaatggcaacataccttcccaaggatacttctccaggatcagcctatcaggaaggtggaggtctctatgcactaggtcttattcatgccaatcatggtggtgatataattgactatctgcttaatcagcttaagaacgccagcaatgatatcgttagacacggtggcagtctgggccttggtttggcagccatgggaactgcacgtcaagatgtttatgatttgctaaaaacaaacctttatcaggatgatgcagtaacaggggaagcagctggcctggccctaggtttggttatgttgggctctaaaaatgctcaggctattgaggacatggttggttatgcacaagaaactcaacatgagaagattctgcgtggtcttgcagttggcatagctttagtaatgtatgggaggatggaagaggctgatgctctcattgaatctctctgtcgtgacaaggacccaattcttcgaaggtctggaatgtatactgtagccatggcttattgtggctctggtaacaacaaagcaattcgacgcctgctacatgttgctgtaagtgatgttaatgatgatgtcaggagggcagcagtagaatcacttgggttcattctattcagaacccctgaacagtgcccaagtgttgtctctttgttgtcagagagttacaaccctcatgtgcgctacggagctgcaatggccttggggatatgctgtgctggtacaggaaacaaggaagccattaatttgctagaaccaatgacaaacgaccccgtgaactacgtgaggcaaggggcactcatagcttcagctctcatcatgatccagcagactgaaatcacttgtccaaaggtgaatcagttcagacagctgtattccaaagtcatcaatgataagcatgatgatgtcatggccaagtttggcgctattctggcccagggcatactggatgcaggtggtcataatgtcacaatctccttgcagtccaggactgggcatactcatatgccttctgtggttggcgtccttgtatttacccagttttggttctggtttcctctttcacacttcctgtcattggcttatacccctacctgtgtcattggccttaacaaggacttaaagatgccgaaagttcagtataaatcgaactgtaaaccatccacatttgcatatcctgcccctctggaagtaccaaaagaaaaagaaaaggaaaaggtttctactgctgtattatctataactgccaaggctaaaaagaaggaaaaagaaaaggaaaaaagataagatgagtaggagggcaggtccaaaagaagtgattcagcaaaatgaaaggggtcctcagggattaaaggggatgaatttacctgtcatccctaagaatctacaaaggagatgctcaggacagaaactgtatcaacacaactagtagcaagaagttactcggatgatatcagatgtttatttgggaaacttgctagtagagaaagctacatataatattagatgcaaagggacacagaagtccagt

SEQ ID NO: 365890 - DNA, 3716 bp, Homo sapiens
tcctggcgagaagcgagccggcggcctgaggaggcgactgactgagcagcgcacccggggagcaaggaggcgcggtgaactgagcggcccctgagctgacagatacactgcgcagctggaacggcgagcgagccgacgggcgagtgaggggcgcagccatgatcacctcggccgctggaattatttctcttctggatgaagatgaaccacagcttaaggaatttgcactacacaaattgaatgcagttgttaatgacttctgggcagaaatttccgagtccgtagacaaaatagaggttttatacgaagatgaaggtttccggagtcggcagtttgcagccttagtggcatctaaagtattttatcacctgggggcttttgaggagtctctgaattatgctcttggagcaggggacctcttcaatgtcaatgataactctgaatatgtggaaactattataggtaattatcgtctatctgcaaaatgcattgatcactacaccaaacaatgtgtggaaaatgcagatttgcctgaaggagaaaaaaaaccaattgaccagagattggaaggcatcgtaaataaaatgttccagcgatgtctagatgatcacaagtataaacaggctattggcattgctctggagacacgaagactggacgtctttgaaaagaccatactggagtcgaatgatgtcccaggaatgttagcttatagccttaagctctgcatgtctttaatgcagaataaacagtttcggaataaagtactaagagttctagttaaaatctacatgaacttggagaaacctgatttcatcaatgtttgtcagtgcttaattttcttagatgatcctcaggctgtgagtgatatcttagagaaactggtaaaggaagacaacctcctgatggcatatcagatttgttttgatttgtatgaaagtgctagccagcagtttttgtcatctgtaatccagaatcttcgaactgttggcacccctattgcttctgtgcctggatccactaatacgggtactgttccgggatcagagaaagacagtgactcgatggaaacagaagaaaagacaagcagtgcatttgtaggaaagacaccagaagccagtccagagcctaaggaccagactttgaaaatgattaaaattttaagtggtgaaatggctattgagttacatctgcagttcttaatacgaaacaataatacagacctcatgattctaaaaaacacaaaggatgcagtacggaattctgtatgtcatactgcaaccgttatagcaaactcttttatgcactgtgggacaaccagtgaccagtttcttagagataatttggaatggttagccagagccactaactgggcaaaatttactgctacagccagtttgggtgtaattcataagggtcatgaaaaagaagcattacagttaatggcaacataccttcccaaggatacttctccaggatcagcctatcaggaaggtggaggtctctatgcactaggtcttattcatgccaatcatggtggtgatataattgactatctgcttaatcagcttaagaacgccagcaatgatatcgttagacacggtggcagtctgggccttggtttggcagccatgggaactgcacgtcaagatgtttatgatttgctaaaaacaaacctttatcaggatgatgcagtaacaggggaagcagctggcctggccctaggtttggttatgttgggctctaaaaatgctcaggctattgaggacatggttggttatgcacaagaaactcaacatgagaagattctgcgtggtcttgcagttggcatagctttagtaatgtatgggaggatggaagaggctgatgctctcattgaatctctctgtcgtgacaaggacccaattcttcgaaggtctggaatgtatactgtagccatggcttattgtggctctggtaacaacaaagcaattcgacgcctgctacatgttgctgtaagtgatgttaatgatgatgtcaggagggcagcagtagaatcacttgggttcattctattcagaacccctgaacagtgcccaagtgttgtctctttgttgtcagagagttacaaccctcatgtgcgctacggagctgcaatggccttggggatatgctgtgctggtacaggaaacaaggaagccattaatttgctagaaccaatgacaaacgaccccgtgaactacgtgaggcaaggggcactcatagcttcagctctcatcatgatccagcagactgaaatcacttgtccaaaggtgaatcagttcagacagctgtattccaaagtcatcaatgataagcatgatgatgtcatggccaagtttggcgctattctggcccagggcatactggatgcaggtggtcataatgtcacaatctccttgcagtccaggactgggcatactcatatgccttctgtggttggcgtccttgtatttacccagttttggttctggtttcctctttcacacttcctgtcattggcttatacccctacctgtgtcattggccttaacaaggacttaaagatgccgaaagttcagtataaatcgaactgtaaaccatccacatttgcatatcctgcccctctggaagtaccaaaagaaaaagaaaaggaaaaggtttctactgctgtattatctataactgccaaggctaaaaagaaggaaaaagaaaaggaaaaaaaggaggaggagaaaatggaagtggatgaggcagagaaaaaggaggaaaaagagaagaaaaaagaacctgagccaaacttccagttattggataacccagcccgagttatgcctgcccagcttaaggtcctaaccatgccggagacctgtagataccagcctttcaaaccactctctattggaggcatcatcattctgaaggataccagtgaagacattgaggagctggtggaacctgtggcagcacatggcccaaaaatcgaggaggaggaacaagagccagaacccccagaaccatttgagtatattgatgattaagggccagaggatctcacttgcttatctgaagaagattgtccaggctcatattgggaatgcttatgaggaaattcatgccgagacctgctattcaatgcatgtatcgttgcctctgcactgacctgaagaaccctgtctccaagtctttggttgaagagaagatatatgactgttgagtgtgctctttcacagaacttggttttcaaataaatataagatctccagatggacaagacatttgtttttcagcctgggtttttaataaatgtatctaatcctccccacaccatgaaatgcctaaatcccaagagccagagtcttgatttgctaggatgagtatgcacgactttcatattgatgaaaaagtcaaactattcttaaattatagaccatgaaaataatggaagggaaaaaaatcaaaccttgctcatcacccccaagaattctctacagttttgttgtggttgtgggttgttgtttaatatggggtctaatcagccagggcaacatggtgagacccccatctctacaaaaaaattgaaaaattagctgggtaggccaggcagggtggctcacgcctataatcccagcactttggaaggccaaggtgggcagattgcttgagccaaggagtttgagaccagcctgggcaacatggcaaaaactcacctctacaaa

SEQ ID NO: 365891 - DNA, 3572 bp, Homo sapiens
tcctggcgagaagcgagccggcggcctgaggaggcgactgactgagcagcgcacccggggagcaaggaggcgcggtgaactgagcggcccctgagctgacagatacactgcgcagctggaacggcgagcgagccgacgggcgagtgaggggcgcagccatgatcacctcggccgctggaattatttctcttctggatgaagatgaaccacagcttaaggaatttgcactacacaaattgaatgcagttgttaatgacttctgggcagaaatttccgagtccgtagacaaaatagaggttttatacgaagatgaaggtttccggagtcggcagtttgcagccttagtggcatctaaagtattttatcacctgggggcttttgaggagtctctgaattatgctcttggagcaggggacctcttcaatgtcaatgataactctgaatatgtggaaactattataggtaattatcgtctatctgcaaaatgcattgatcactacaccaaacaatgtgtggaaaatgcagatttgcctgaaggagaaaaaaaaccaattgaccagagattggaaggcatcgtaaataaaatgttccagcgatgtctagatgatcacaagtataaacaggctattggcattgctctggagacacgaagactggacgtctttgaaaagaccatactggagtcgaatgatgtcccaggaatgttagcttatagccttaagctctgcatgtctttaatgcagaataaacagtttcggaataaagtactaagagttctagttaaaatctacatgaacttggagaaacctgatttcatcaatgtttgtcagaatcttcgaactgttggcacccctattgcttctgtgcctggatccactaatacgggtactgttccgggatcagagaaagacagtgactcgatggaaacagaagaaaagacaagcagtgcatttgtaggaaagacaccagaagccagtccagagcctaaggaccagactttgaaaatgattaaaattttaagtggtgaaatggctattgagttacatctgcagttcttaatacgaaacaataatacagacctcatgattctaaaaaacacaaaggatgcagtacggaattctgtatgtcatactgcaaccgttatagcaaactcttttatgcactgtgggacaaccagtgaccagtttcttagagataatttggaatggttagccagagccactaactgggcaaaatttactgctacagccagtttgggtgtaattcataagggtcatgaaaaagaagcattacagttaatggcaacataccttcccaaggatacttctccaggatcagcctatcaggaaggtggaggtctctatgcactaggtcttattcatgccaatcatggtggtgatataattgactatctgcttaatcagcttaagaacgccagcaatgatatcgttagacacggtggcagtctgggccttggtttggcagccatgggaactgcacgtcaagatgtttatgatttgctaaaaacaaacctttatcaggatgatgcagtaacaggggaagcagctggcctggccctaggtttggttatgttgggctctaaaaatgctcaggctattgaggacatggttggttatgcacaagaaactcaacatgagaagattctgcgtggtcttgcagttggcatagctttagtaatgtatgggaggatggaagaggctgatgctctcattgaatctctctgtcgtgacaaggacccaattcttcgaaggtctggaatgtatactgtagccatggcttattgtggctctggtaacaacaaagcaattcgacgcctgctacatgttgctgtaagtgatgttaatgatgatgtcaggagggcagcagtagaatcacttgggttcattctattcagaacccctgaacagtgcccaagtgttgtctctttgttgtcagagagttacaaccctcatgtgcgctacggagctgcaatggccttggggatatgctgtgctggtacaggaaacaaggaagccattaatttgctagaaccaatgacaaacgaccccgtgaactacgtgaggcaaggggcactcatagcttcagctctcatcatgatccagcagactgaaatcacttgtccaaaggtgaatcagttcagacagctgtattccaaagtcatcaatgataagcatgatgatgtcatggccaagtttggcgctattctggcccagggcatactggatgcaggtggtcataatgtcacaatctccttgcagtccaggactgggcatactcatatgccttctgtggttggcgtccttgtatttacccagttttggttctggtttcctctttcacacttcctgtcattggcttatacccctacctgtgtcattggccttaacaaggacttaaagatgccgaaagttcagtataaatcgaactgtaaaccatccacatttgcatatcctgcccctctggaagtaccaaaagaaaaagaaaaggaaaaggtttctactgctgtattatctataactgccaaggctaaaaagaaggaaaaagaaaaggaaaaaaaggaggaggagaaaatggaagtggatgaggcagagaaaaaggaggaaaaagagaagaaaaaagaacctgagccaaacttccagttattggataacccagcccgagttatgcctgcccagcttaaggtcctaaccatgccggagacctgtagataccagcctttcaaaccactctctattggaggcatcatcattctgaaggataccagtgaagacattgaggagctggtggaacctgtggcagcacatggcccaaaaatcgaggaggaggaacaagagccagaacccccagaaccatttgagtatattgatgattaagggccagaggatctcacttgcttatctgaagaagattgtccaggctcatattgggaatgcttatgaggaaattcatgccgagacctgctattcaatgcatgtatcgttgcctctgcactgacctgaagaaccctgtctccaagtctttggttgaagagaagatatatgactgttgagtgtgctctttcacagaacttggttttcaaataaatataagatctccagatggacaagacatttgtttttcagcctgggtttttaataaatgtatctaatcctccccacaccatgaaatgcctaaatcccaagagccagagtcttgatttgctaggatgagtatgcacgactttcatattgatgaaaaagtcaaactattcttaaattatagaccatgaaaataatggaagggaaaaaaatcaaaccttgctcatcacccccaagaattctctacagttttgttgtggttgtgggttgttgtttaatatggggtctaatcagccagggcaacatggtgagacccccatctctacaaaaaaattgaaaaattagctgggtaggccaggcagggtggctcacgcctataatcccagcactttggaaggccaaggtgggcagattgcttgagccaaggagtttgagaccagcctgggcaacatggcaaaaactcacctctacaaa

SEQ ID NO: 365892 - DNA, 3749 bp, Homo sapiens
tcctggcgagaagcgagccggcggcctgaggaggcgactgactgagcagcgcacccggggagcaaggaggcgcggtgaactgagcggcccctgagctgacagatacactgcgcagctggaacggcgagcgagccgacgggcgagtgaggggcgcagccatgatcacctcggccgctggaattatttctcttctggatgaagatgaaccacagcttaaggaatttgcactacacaaattgaatgcagttgttaatgacttctgggcagaaatttccgagtccgtagacaaaatagaggttttatacgaagatgaaggtttccggagtcggcagtttgcagccttagtggcatctaaagtattttatcacctgggggcttttgaggagtctctgaattatgctcttggagcaggggacctcttcaatgtcaatgataactctgaatatgtggaaactattatagcaaaatgcattgatcactacaccaaacaatgtgtggaaaatgcagatttgcctgaaggagaaaaaaaaccaattgaccagagattggaaggcatcgtaaataaaatgttccagcgatgtctagatgatcacaagtataaacaggctattggcattgctctggagacacgaagactggacgtctttgaaaagaccatactggagtcgaatgatgtcccaggaatgttagcttatagccttaagctctgcatgtctttaatgcagaataaacagtttcggaataaagtactaagagttctagttaaaatctacatgaacttggagaaacctgatttcatcaatgtttgtcagtgcttaattttcttagatgatcctcaggctgtgagtgatatcttagagaaactggtaaaggaagacaacctcctgatggcatatcagatttgttttgatttgtatgaaagtgctagccagcagtttttgtcatctgtaatccagaatcttcgaactgttggcacccctattgcttctgtgcctggatccactaatacgggtactgttccgggatcagagaaagacagtgactcgatggaaacagaagaaaagacaagcagtgcatttgtaggaaagacaccagaagccagtccagagcctaaggaccagactttgaaaatgattaaaattttaagtggtgaaatggctattgagttacatctgcagttcttaatacgaaacaataatacagacctcatgattctaaaaaacacaaaggatgcagtacggaattctgtatgtcatactgcaaccgttatagcaaactcttttatgcactgtgggacaaccagtgaccagtttcttagagataatttggaatggttagccagagccactaactgggcaaaatttactgctacagccagtttgggtgtaattcataagggtcatgaaaaagaagcattacagttaatggcaacataccttcccaaggatacttctccaggatcagcctatcaggaaggtggaggtctctatgcactaggtcttattcatgccaatcatggtggtgatataattgactatctgcttaatcagcttaagaacgccagcaatgatatcgttagacacggtggcagtctgggccttggtttggcagccatgggaactgcacgtcaagatgtttatgatttgctaaaaacaaacctttatcaggatgatgcagtaacaggggaagcagctggcctggccctaggtttggttatgttgggctctaaaaatgctcaggctattgaggacatggttggttatgcacaagaaactcaacatgagaagattctgcgtggtcttgcagttggcatagctttagtaatgtatgggaggatggaagaggctgatgctctcattgaatctctctgtcgtgacaaggacccaattcttcgaaggtctggaatgtatactgtagccatggcttattgtggctctggtaacaacaaagcaattcgacgcctgctacatgttgctgtaagtgatgttaatgatgatgtcaggagggcagcagtagaatcacttgggttcattctattcagaacccctgaacagtgcccaagtgttgtctctttgttgtcagagagttacaaccctcatgtgcgctacggagctgcaatggccttggggatatgctgtgctggtacaggaaacaaggaagccattaatttgctagaaccaatgacaaacgaccccgtgaactacgtgaggcaaggggcactcatagcttcagctctcatcatgatccagcagactgaaatcacttgtccaaaggtgaatcagttcagacagctgtattccaaagtcatcaatgataagcatgatgatgtcatggccaagtttggcgctattctggcccagggcatactggatgcagggtcataatgtcacaatctccttgcagtccaggactgggcatactggatgcgtggtcataatgtcacaatctccttgcagtccaggactgggcatactcatatgccttctgtggttggcgtccttgtatttacccagttttggttctggtttcctctttcacacttcctgtcattggcttatacccctacctgtgtcattggccttaacaaggacttaaagatgccgaaagttcagtataaatcgaactgtaaaccatccacatttgcatatcctgcccctctggaagtaccaaaagaaaaagaaaaggaaaaggtttctactgctgtattatctataactgccaaggctaaaaagaaggaaaaagaaaaggaaaaaaaggaggaggagaaaatggaagtggatgaggcagagaaaaaggaggaaaaagagaagaaaaaagaacctgagccaaacttccagttattggataacccagcccgagttatgcctgcccagcttaaggtcctaaccatgccggagacctgtagataccagcctttcaaaccactctctattggaggcatcatcattctgaaggataccagtgaagacattgaggagctggtggaacctgtggcagcacatggcccaaaaatcgaggaggaggaacaagagccagaacccccagaaccatttgagtatattgatgattaagggccagaggatctcacttgcttatctgaagaagattgtccaggctcatattgggaatgcttatgaggaaattcatgccgagacctgctattcaatgcatgtatcgttgcctctgcactgacctgaagaaccctgtctccaagtctttggttgaagagaagatatatgactgttgagtgtgctctttcacagaacttggttttcaaataaatataagatctccagatggacaagacatttgtttttcagcctgggtttttaataaatgtatctaatcctccccacaccatgaaatgcctaaatcccaagagccagagtcttgatttgctaggatgagtatgcacgactttcatattgatgaaaaagtcaaactattcttaaattatagaccatgaaaataatggaagggaaaaaaatcaaaccttgctcatcacccccaagaattctctacagttttgttgtggttgtgggttgttgtttaatatggggtctaatcagccagggcaacatggtgagacccccatctctacaaaaaaattgaaaaattagctgggtaggccaggcagggtggctcacgcctataatcccagcactttggaaggccaaggtgggcagattgcttgagccaaggagtttgagaccagcctgggcaacatggcaaaaactcacctctacaaa

SEQ ID NO: 365893 - DNA, 2731 bp, Homo sapiens
tcctggcgagaagcgagccggcggcctgaggaggcgactgactgagcagcgcacccggggagcaaggaggcgcggtgaactgagcggcccctgagctgacagatacactgcgcagctggaacggcgagcgagccgacgggcgagtgaggggcgcagccatgatcacctcggccgctggaattatttctcttctggatgaagatgaaccacagcttaaggaatttgcactacacaaattgaatgcagttgttaatgacttctgggcagaaatttccgagtccgtagacaaaatagaggttttatacgaagatgaaggtttccggagtcggcagtttgcagccttagtggcatctaaagtattttatcacctgggggcttttgaggagtctctgaattatgctcttggagcaggggacctcttcaatgtcaatgataactctgaatatgtggaaactattatagcaaaatgcattgatcactacaccaaacaatgtgtggaaaatgcagatttgcctgaaggagaaaaaaaaccaattgaccagagattggaaggcatcgtaaataaaatgttccagcgatgtctagatgatcacaagtataaacaggctattggcattgctctggagacacgaagactggacgtctttgaaaagaccatactggagtcgaatgatgtcccaggaatgttagcttatagccttaagctctgcatgtctttaatgcagaataaacagtttcggaataaagtactaagagttctagttaaaatctacatgaacttggagaaacctgatttcatcaatgtttgtcagtgcttaattttcttagatgatcctcaggctgtgagtgatatcttagagaaactggtaaaggaagacaacctcctgatggcatatcagatttgttttgatttgtatgaaagtgctagccagcagtttttgtcatctgtaatccagaatcttcgaactgttggcacccctattgcttctgtgcctggatccactaatacgggtactgttccgggatcagagaaagacagtgactcgatggaaacagaagaaaagacaagcagtgcatttgtaggaaagacaccagaagccagtccagagcctaaggaccagactttgaaaatgattaaaattttaagtggtgaaatggctattgagttacatctgcagttcttaatacgaaacaataatacagacctcatgattctaaaaaacacaaaggatgcagtacggaattctgtatgtcatactgcaaccgttatagcaaactcttttatgcactgtgggacaaccagtgaccagtttcttagagataatttggaatggttagccagagccactaactgggcaaaatttactgctacagccagtttgggtgtaattcataagggtcatgaaaaagaagcattacagttaatggcaacataccttcccaaggatacttctccaggatcagcctatcaggaaggtggaggtctctatgcactaggtcttattcatgccaatcatggtggtgatataattgactatctgcttaatcagcttaagaacgccagcaatgatatcgttagacacggtggcagtctgggccttggtttggcagccatgggaactgcacgtcaagatgtttatgatttgctaaaaacaaacctttatcaggatgatgcagtaacaggggaagcagctggcctggccctaggtttggttatgttgggctctaaaaatgctcaggctattgaggacatggttggttatgcacaagaaactcaacatgagaagattctgcgtggtcttgcagttggcatagctttagtaatgtatgggaggatggaagaggctgatgctctcattgaatctctctgtcgtgacaaggacccaattcttcgaaggtctggaatgtatactgtagccatggcttattgtggctctggtaacaacaaagcaattcgacgcctgctacatgttgctgtaagtgatgttaatgatgatgtcaggagggcagcagtagaatcacttgggttcattctattcagaacccctgaacagtgcccaagtgttgtctctttgttgtcagagagttacaaccctcatgtgcgctacggagctgcaatggccttggggatatgctgtgctggtacaggaaacaaggaagccattaatttgctagaaccaatgacaaacgaccccgtgaactacgtgaggcaaggggcactcatagcttcagctctcatcatgatccagcagactgaaatcacttgtccaaaggtgaatcagttcagacagctgtattccaaagtcatcaatgataagcatgatgatgtcatggccaagtttggcgctattctggcccagggcatactggatgcaggtggtcataatgtcacaatctccttgcagtccaggactgggcatactcatatgccttctgtggttggcgtccttgtatttacccagttttggttctggtttcctctttcacacttcctgtcattggcttatacccctacctgtgtcattggccttaacaaggacttaaagatgccgaaagttcagtataaatcgaactgtaaaccatccacatttgcatatcctgcccctctggaagtaccaaaagaaaaagaaaaggaaaagcgaataagaaggcctacataaaagacattgcacacaaggatgtggctgaaagacatgcagaggcactaggaaaagcggaacaactgaatcct

SEQ ID NO: 365894 - DNA, 2015 bp, Homo sapiens
gtgggctccatatatgctcatagccatagacgagtacatagatgcgcttatgcacccgaaactcaaggactgaagacgattcgtgcgctgctcttgcaatatggggattacccctagatatactgtctggaaggatgcaagcgggtgatggtctcgattgaatctcactttcgtgactgggacaccccttgcggaaggacccaattcttcgaaggtctggaatgtatactgtagccatggcttattgtggctctggtaacaacaaagcaattcgacgcctgctacatgttgctgtaagtgatgttaatgatgatgtcaggagggcagcagtagaatcacttgggttcattctattcagaacccctgaacagtgcccaagtgttgtctctttgttgtcagagagttacaaccctcatgtgcgctacggagctgcaatggccttggggatatgctgtgctggtacaggaaacaaggaagccattaatttgctagaaccaatgacaaacgaccccgtgaactacgtgaggcaaggggcactcatagcttcagctctcatcatgatccagcagactgaaatcacttgtccaaaggtgaatcagttcagacagctgtattccaaagtcatcaatgataagcatgatgatgtcatggccaagtttggcgctattctggcccagggcatactggatgcaggtggtcataatgtcacaatctccttgcagtccaggactgggcatactcatatgccttctgtggttggcgtccttgtatttacccagttttggttctggtttcctctttcacacttcctgtcattggcttatacccctacctgtgtcattggccttaacaaggacttaaagatgccgaaagttcagtataaatcgaactgtaaaccatccacatttgcatatcctgcccctctggaagtaccaaaagaaaaagaaaaggaaaaggtttctactgctgtattatctataactgccaaggctaaaaagaaggaaaaagaaaaggaaaaaaaggaggaggagaaaatggaagtggatgaggcagagaaaaaggaggaaaaagagaagaaaaaagaacctgagccaaacttccagttattggataacccagcccgagttatgcctgcccagcttaaggtcctaaccatgccggagacctgtagataccagcctttcaaaccactctctattggaggcatcatcattctgaaggataccagtgaagacattgaggagctggtggaacctgtggcagcacatggcccaaaaatcgaggaggaggaacaagagccagaacccccagaaccatttgagtatattgatgattaagggccagaggatctcacttgcttatctgaagaagattgtccaggctcatattgggaatgcttatgaggaaattcatgccgagacctgctattcaatgcatgtatcgttgcctctgcactgacctgaagaaccctgtctccaagtctttggttgaagagaagatatatgactgttgagtgtgctctttcacagaacttggttttcaaataaatataagatctccagatggacaagacatttgtttttcagcctgggtttttaataaatgtatctaatcctccccacaccatgaaatgcctaaatcccaagagccagagtcttgatttgctaggatgagtatgcacgactttcatattgatgaaaaagtcaaactattcttaaattatagaccatgaaaataatggaagggaaaaaaatcaaaccttgctcatcacccccaagaattctctacagttttgttgtggttgtgggttgttgtttaatatggggtctaatcagccagggcaacatggtgagacccccatctctacaaaaaaattgaaaaattagctgggtaggccaggcagggtggctcacgcctataatcccagcactttggaaggccaaggtgggcagattgcttgagccaaggagtttgagaccagcctgggcaacatggcaaaaactcacctctacaaa

SEQ ID NO: 365895 - DNA, 2650 bp, Homo sapiens
tcctggcgagaagcgagccggcggcctgaggaggcgactgactgagcagcgcacccggggagcaaggaggcgcggtgaactgagcggcccctgagctgacagatacactgcgcagctggaacggcgagcgagccgacgggcgagtgaggggcgcagccatgatcacctcggccgctggaattatttctcttctggatgaagatgaaccacagcttaaggaatttgcactacacaaattgaatgcagttgttaatgacttctgggcagaaatttccgagtccgtagacaaaatagaggttttatacgaagatgaaggtttccggagtcggcagtttgcagccttagtggcatctaaagtattttatcacctgggggcttttgaggagtctctgaattatgctcttggagcaggggacctcttcaatgtcaatgataactctgaatatgtggaaactattatagcaaaatgcattgatcactacaccaaacaatgtgtggaaaatgcagatttgcctgaaggagaaaaaaaaccaattgaccagagattggaaggcatcgtaaataaaatgttccagcgatgtctagatgatcacaagtataaacaggctattggcattgctctggagacacgaagactggacgtctttgaaaagaccatactggagtcgaatgatgtcccaggaatgttagcttatagccttaagctctgcatgtctttaatgcagaataaacagtttcggaataaagtactaagagttctagttaaaatctacatgaacttggagaaacctgatttcatcaatgtttgtcagtgcttaattttcttagatgatcctcaggctgtgagtgatatcttagagaaactggtaaaggaagacaacctcctgatggcatatcagatttgttttgatttgtatgaaagtgctagccagcagtttttgtcatctgtaatccagaatcttcgaactgttggcacccctattgcttctgtgcctggatccactaatacgggtactgttccgggatcagagaaagacagtgactcgatggaaacagaagaaaagacaagcagtgcatttgtaggaaagacaccagaagccagtccagagcctaaggaccagactttgaaaatgattaaaattttaagtggtgaaatggctattgagttacatctgcagttcttaatacgaaacaataatacagacctcatgattctaaaaaacacaaaggatgcagtacggaattctgtatgtcatactgcaaccgttatagcaaactcttttatgcactgtgggacaaccagtgaccagtttcttagagataatttggaatggttagccagagccactaactgggcaaaatttactgctacagccagtttgggtgtaattcataagggtcatgaaaaagaagcattacagttaatggcaacataccttcccaaggatacttctccaggatcagcctatcaggaaggtggaggtctctatgcactaggtcttattcatgccaatcatggtggtgatataattgactatctgcttaatcagcttaagaacgccagcaatgatatcgttagacacggtggcagtctgggccttggtttggcagccatgggaactgcacgtcaagatgtttatgatttgctaaaaacaaacctttatcaggatgatgcagtaacaggggaagcagctggcctggccctaggtttggttatgttgggctctaaaaatgctcaggctattgaggacatggttggttatgcacaagaaactcaacatgagaagattctgcgtggtcttgcagttggcatagctttagtaatgtatgggaggatggaagaggctgatgctctcattgaatctctctgtcgtgacaaggacccaattcttcgaaggtctggaatgtatactgtagccatggcttattgtggctctggtaacaacaaagcaattcgacgcctgctacatgttgctgtaagtgatgttaatgatgatgtcaggagggcagcagtagaatcacttgggttcattctattcagaacccctgaacagtgcccaagtgttgtctctttgttgtcagagagttacaaccctcatgtgcgctacggagctgcaatggccttggggatatgctgtgctggtacaggaaacaaggaagccattaatttgctagaaccaatgacaaacgaccccgtgaactacgtgaggcaaggggcactcatagcttcagctctcatcatgatccagcagactgaaatcacttgtccaaaggtgaatcagttcagacagctgtattccaaagtcatcaatgataagcatgatgatgtcatggccaagtttggcgctattctggcccagggcatactggatgcaggtggtcataatgtcacaatctccttgcagtccaggactgggcatactcatatgccttctgtggttggcgtccttgtatttacccagttttggttctggtttcctctttcacacttcctgtcattggcttatacccctacctgtgtcattggccttaacaaggacttaaaggtttctactgctgtattatctataactgccaaggctaaaaagaaggaaaaagaaaaggaaaaaaaggaggaggagaaaatggaagtggtaggtataaattggtg

SEQ ID NO: 365896 - DNA, 2554 bp, Homo sapiens
tcctggcgagaagcgagccggcggcctgaggaggcgactgactgagcagcgcacccggggagcaaggaggcgcggtgaactgagcggcccctgagctgacagatacactgcgcagctggaacggcgagcgagccgacgggcgagtgaggggcgcagccatgatcacctcggccgctggaattatttctcttctggatgaagatgaaccacagcttaaggaatttgcactacacaaattgaatgcagttgttaatgacttctgggcagaaatttccgagtccgtagacaaaatagaggttttatacgaagatgaaggtttccggagtcggcagtttgcagccttagtggcatctaaagtattttatcacctgggggcttttgaggagtctctgaattatgctcttggagcaggggacctcttcaatgtcaatgataactctgaatatgtggaaactattatagcaaaatgcattgatcactacaccaaacaatgtgtggaaaatgcagatttgcctgaaggagaaaaaaaaccaattgaccagagattggaaggcatcgtaaataaaatgttccagcgatgtctagatgatcacaagtataaacaggctattggcattgctctggagacacgaagactggacgtctttgaaaagaccatactggagtcgaatgatgtcccaggaatgttagcttatagccttaagctctgcatgtctttaatgcagaataaacagtttcggaataaagtactaagagttctagttaaaatctacatgaacttggagaaacctgatttcatcaatgtttgtcagtgcttaattttcttagatgatcctcaggctgtgagtgatatcttagagaaactggtaaaggaagacaacctcctgatggcatatcagatttgttttgatttgtatgaaagtgctagccagcagtttttgtcatctgtaatccagaatcttcgaactgttggcacccctattgcttctgtgcctggatccactaatacgggtactgttccgggatcagagaaagacagtgactcgatggaaacagaagaaaagacaagcagtgcatttgtaggaaagacaccagaagccagtccagagcctaaggaccagactttgaaaatgattaaaattttaagtggtgaaatggctattgagttacatctgcagttcttaatacgaaacaataatacagacctcatgattctaaaaaacacaaaggatgcagtacggaattctgtatgtcatactgcaaccgttatagcaaactcttttatgcactgtgggacaaccagtgaccagtttcttagttttggttctggtttcctctttcacacttcctgtcattggcttatacccctacctgtgtcattggccttaacaaggacttaaagatgccgaaagttcagtataaatcgaactgtaaaccatccacatttgcatatcctgcccctctggaagtaccaaaagaaaaagaaaaggaaaaggtttctactgctgtattatctataactgccaaggctaaaaagaaggaaaaagaaaaggaaaaaaaggaggaggagaaaatggaagtggatgaggcagagaaaaaggaggaaaaagagaagaaaaaagaacctgagccaaacttccagttattggataacccagcccgagttatgcctgcccagcttaaggtcctaaccatgccggagacctgtagataccagcctttcaaaccactctctattggaggcatcatcattctgaaggataccagtgaagacattgaggagctggtggaacctgtggcagcacatggcccaaaaatcgaggaggaggaacaagagccagaacccccagaaccatttgagtatattgatgattaagggccagaggatctcacttgcttatctgaagaagattgtccaggctcatattgggaatgcttatgaggaaattcatgccgagacctgctattcaatgcatgtatcgttgcctctgcactgacctgaagaaccctgtctccaagtctttggttgaagagaagatatatgactgttgagtgtgctctttcacagaacttggttttcaaataaatataagatctccagatggacaagacatttgtttttcagcctgggtttttaataaatgtatctaatcctccccacaccatgaaatgcctaaatcccaagagccagagtcttgatttgctaggatgagtatgcacgactttcatattgatgaaaaagtcaaactattcttaaattatagaccatgaaaataatggaagggaaaaaaatcaaaccttgctcatcacccccaagaattctctacagttttgttgtggttgtgggttgttgtttaatatggggtctaatcagccagggcaacatggtgagacccccatctctacaaaaaaattgaaaaattagctgggtaggccaggcagggtggctcacgcctataatcccagcactttggaaggccaaggtgggcagattgcttgagccaaggagtttgagaccagcctgggcaacatggcaaaaactcacctctacaaa

SEQ ID NO: 365897 - DNA, 2677 bp, Homo sapiens
tcctggcgagaagcgagccggcggcctgaggaggcgactgactgagcagcgcacccggggagcaaggaggcgcggtgaactgagcggcccctgagctgacagatacactgcgcagctggaacggcgagcgagccgacgggcgagtgaggggcgcagccatgatcacctcggccgctggaattatttctcttctggatgaagatgaaccacagcttaaggaatttgcactacacaaattgaatgcagttgttaatgacttctgggcagaaatttccgagtccgtagacaaaatagaggttttatacgaagatgaaggtttccggagtcggcagtttgcagccttagtggcatctaaagtattttatcacctgggggcttttgaggagtctctgaattatgctcttggagcaggggacctcttcaatgtcaatgataactctgaatatgtggaaactattatagcaaaatgcattgatcactacaccaaacaatgtgtggaaaatgcagatttgcctgaaggagaaaaaaaaccaattgaccagagattggaaggcatcgtaaataaaatgttccagcgatgtctagatgatcacaagtataaacaggctattggcattgctctggagacacgaagactggacgtctttgaaaagaccatactggagtcgaatgatgtcccaggaatgttagcttatagccttaagctctgcatgtctttaatgcagaataaacagtttcggaataaagtactaagagttctagttaaaatctacatgaacttggagaaacctgatttcatcaatgtttgtcagtgcttaattttcttagatgatcctcaggctgtgagtgatatcttagagaaactggtaaaggaagacaacctcctgatggcatatcagatttgttttgatttgtatgaaagtgctagccagcagtttttgtcatctgtaatccagaatcttcgaactgttggcacccctattgcttctgtgcctggatccactaatacgggtactgttccgggatcagagaaagacagtgactcgatggaaacagaagaaaagacaagcagtgcatttgtaggaaagacaccagaagccagtccagagcctaaggaccagactttgaaaatgattaaaattttaagtggtgaaatggctattgagttacatctgcagttcttaatacgaaacaataatacagacctcatgattctaaaaaacacaaaggatgcagtacggaattctgtatgtcatactgcaaccgttatagcaaactcttttatgcactgtgggacaaccagtgaccagtttcttagagataatttggaatggttagccagagccactaactgggcaaaatttactgctacagccagtttgggtgtaattcataagggtcatgaaaaagaagcattacagttaatggcaacataccttcccaaggatacttctccaggatcagcctatcaggaaggtggaggtctctatgcactaggtcttattcatgccaatcatggtggtgatataattgactatctgcttaatcagcttaagaacgccagcaatgatatcgttagacacggtggcagtctgggccttggtttggcagccatgggaactgcacgtcaagatgtttatgatttgctaaaaacaaacctttatcaggatgatgcagtaacaggggaagcagctggcctggccctaggtttggttatgttgggctctaaaaatgctcaggctattgaggacatggttggttatgcacaagaaactcaacatgagaagattctgcgtggtcttgcagttggcatagctttagtaatgtatgggaggatggaagaggctgatgctctcattgaatctctctgtcgtgacaaggacccaattcttcgaaggtctggaatgtatactgtagccatggcttattgtggctctggtaacaacaaagcaattcgacgcctgctacatgttgctgtaagtgatgttaatgatgatgtcaggagggcagcagtagaatcacttgggttcattctattcagaacccctgaacagtgcccaagtgttgtctctttgttgtcagagagttacaaccctcatgtgcgctacggagctgcaatggccttggggatatgctgtgctggtacaggaaacaaggaagccattaatttgctagaaccaatgacaaacgaccccgtgaactacgtgaggcaaggggcactcatagcttcagctctcatcatgatccagcagactgaaatcacttgtccaaaggtgaatcagttcagacagctgtattccaaactctctattggaggcatcatcattctgaaggataccagtgaagacattgaggagctggtggaacctgtggcagcacatggcccaaaaatcgaggaggaggaacaagagccagaacccccagaaccatttgagtatattgatgattaagggccagaggatctcacttgcttatctgaagaagattgtccaggctcatattgggaatgcttatgaggaaattcatgccgagacctgctattcaatgcatgtatcgttgcctctgcactgacctgaagaaccctgtctccaagtctttggttgaagagaagatatatgactgttgagtgtgctctttcacagaacttggttttcaaataaatataagatctccagat

SEQ ID NO: 365898 - DNA, 2448 bp, Homo sapiens
tcctggcgagaagcgagccggcggcctgaggaggcgactgactgagcagcgcacccggggagcaaggaggcgcggtgaactgagcggcccctgagctgacagatacactgcgcagctggaacggcgagcgagccgacgggcgagtgaggggcgcagccatgatcacctcggccgctggaattatttctcttctggatgaagatgaaccacagcttaaggaatttgcactacacaaattgaatgcagttgttaatgacttctgggcagaaatttccgagtccgtagacaaaatagaggttttatacgaagatgaaggtttccggagtcggcagtttgcagccttagtggcatctaaagtattttatcacctgggggcttttgaggagtctctgaattatgctcttggagcaggggacctcttcaatgtcaatgataactctgaatatgtggaaactattatagcaaaatgcattgatcactacaccaaacaatgtgtggaaaatgcagatttgcctgaaggagaaaaaaaaccaattgaccagagattggaaggcatcgtaaataaaatgttccagcgatgtctagatgatcacaagtataaacaggctattggcattgctctggagacacgaagactggacgtctttgaaaagaccatactggagtcgaatgatgtcccaggaatgttagcttatagccttaagctctgcatgtctttaatgcagaataaacagtttcggaataaagtactaagagttctagttaaaatctacatgaacttggagaaacctgatttcatcaatgtttgtcagtgcttaattttcttagatgatcctcaggctgtgagtgatatcttagagaaactggtaaaggaagacaacctcctgatggcatatcagatttgttttgatttgtatgaaagtgctagccagcagtttttgtcatctgtaatccagaatcttcgaactgttggcacccctattgcttctgtgcctggatccactaatacgggtactgttccgggatcagagaaagacagtgactcgatggaaacagaagaaaagacaagcagtgcatttgtaggaaagacaccagaagccagtccagagcctaaggaccagactttgaaaatgattaaaattttaagtggtgaaatggctattgagttacatctgcagttcttaatacgaaacaataatacagacctcatgattctaaaaaacacaaaggatgcagtacggaattctgtatgtcatactgcaaccgttatagcaaactcttttatgcactgtgggacaaccagtgaccagtttcttagagataatttggaatggttagccagagccactaactgggcaaaatttactgctacagccagtttgggtgtaattcataagggtcatgaaaaagaagcattacagttaatggcaacataccttcccaaggatacttctccaggatcagcctatcaggaaggtggaggtctctatgcactaggtcttattcatgccaatcatggtggtgatataattgactatctgcttaatcagcttaagaacgccagcaatgatatcgttagacacggtggcagtctgggccttggtttggcagccatgggaactgcacgtcaagatgtttatgatttgctaaaaacaaacctttatcaggatgatgcagtaacaggggaagcagctggcctggccctaggtttggttatgttgggctctaaaaatgctcaggctattgaggacatggttggttatgcacaagaaactcaacatgagaagattctgcgtggtcttgcagttggcatagctttagtaatgtatgggaggatggaagaggctgatgctctcattgaatctctctgtcgtgacaaggacccaattcttcgaaggtctggaatgtatactgtagccatggcttattgtggctctggtaacaacaaagcaattcgacgcctgctacatgttgctgtaagtgatgttaatgatgatgtcaggagggcagcagtagaatcacttgggttcattctattcagaacccctgaacagtgcccaagtgttgtctctttgttgtcagagagttacaaccctcatgtgcgctacggagctgcaatggccttggggatatgctgtgctggtacaggaaacaaggtaaagcccacagccaatggggtcagttctttcttggcgccagactgttttccctcgccgcagaatttatgtaacagctgtaaaaatacaagtgcaatgtgatctgtaagagtaaacttgccatacaaagcttcccagtactccctcattctgcgatgctggattgcccaaagctgcttaagaataaatcgtcacattacatggatagctgtaactgaaacagtgcttttgaatttctttttgaaatcactgatttctgggttttttgtttttgttttctttgtttgtttat

SEQ ID NO: 365899 - DNA, 1520 bp, Homo sapiens
taactcattatcattggagcaatattattccctgttctaaaatggtaccgcaaatgagtagacttagactataattctttctcttgctccttcaggtgaatcagttcagacagctgtattccaaagtcatcaatgataagcatgatgatgtcatggccaagtttggcgctattctggcccagggcatactggatgcaggtggtcataatgtcacaatctccttgcagtccaggactgggcatactcatatgccttctgtggttggcgtccttgtatttacccagttttggttctggtttcctctttcacacttcctgtcattggcttatacccctacctgtgtcattggccttaacaaggacttaaagatgccgaaagttcagtataaatcgaactgtaaaccatccacatttgcatatcctgcccctctggaagtaccaaaagaaaaagaaaaggaaaaggtttctactgctgtattatctataactgccaaggctaaaaagaaggaaaaagaaaaggaaaaaaaggaggaggagaaaatggaagtggatgaggcagagaaaaaggaggaaaaagagaagaaaaaagaacctgagccaaacttccagttattggataacccagcccgagttatgcctgcccagcttaaggtcctaaccatgccggagacctgtagataccagcctttcaaaccactctctattggaggcatcatcattctgaaggataccagtgaagacattgaggagctggtggaacctgtggcagcacatggcccaaaaatcgaggaggaggaacaagagccagaacccccagaaccatttgagtatattgatgattaagggccagaggatctcacttgcttatctgaagaagattgtccaggctcatattgggaatgcttatgaggaaattcatgccgagacctgctattcaatgcatgtatcgttgcctctgcactgacctgaagaaccctgtctccaagtctttggttgaagagaagatatatgactgttgagtgtgctctttcacagaacttggttttcaaataaatataagatctccagatggacaagacatttgtttttcagcctgggtttttaataaatgtatctaatcctccccacaccatgaaatgcctaaatcccaagagccagagtcttgatttgctaggatgagtatgcacgactttcatattgatgaaaaagtcaaactattcttaaattatagaccatgaaaataatggaagggaaaaaaatcaaaccttgctcatcacccccaagaattctctacagttttgttgtggttgtgggttgttgtttaatatggggtctaatcagccagggcaacatggtgagacccccatctctacaaaaaaattgaaaaattagctgggtaggccaggcagggtggctcacgcctataatcccagcactttggaaggccaaggtgggcagattgcttgagccaaggagtttgagaccagcctgggcaacatggcaaaaactcacctctacaaa

SEQ ID NO: 365900 - DNA, 1262 bp, Homo sapiens
tgatgacaagagtagtaaattatttcagtaaatgtcctgcttagttttcccatttattctttgatttatatatatatatatatatatatatatatgtaatacagctaggaaatagaatagtgttgtaggactgagttctctagggcttgcatgtttgtatgtcagtaagggattacaacagtttaccctgctcatttccccaggtttctactgctgtattatctataactgccaaggctaaaaagaaggaaaaagaaaaggaaaaaaaggaggaggagaaaatggaagtggatgaggcagagaaaaaggaggaaaaagagaagaaaaaagaacctgagccaaacttccagttattggataacccagcccgagttatgcctgcccagcttaaggtcctaaccatgccggagacctgtagataccagcctttcaaaccactctctattggaggcatcatcattctgaaggataccagtgaagacattgaggagctggtggaacctgtggcagcacatggcccaaaaatcgaggaggaggaacaagagccagaacccccagaaccatttgagtatattgatgattaagggccagaggatctcacttgcttatctgaagaagattgtccaggctcatattgggaatgcttatgaggaaattcatgccgagacctgctattcaatgcatgtatcgttgcctctgcactgacctgaagaaccctgtctccaagtctttggttgaagagaagatatatgactgttgagtgtgctctttcacagaacttggttttcaaataaatataagatctccagatggacaagacatttgtttttcagcctgggtttttaataaatgtatctaatcctccccacaccatgaaatgcctaaatcccaagagccagagtcttgatttgctaggatgagtatgcacgactttcatattgatgaaaaagtcaaactattcttaaattatagaccatgaaaataatggaagggaaaaaaatcaaaccttgctcatcacccccaagaattctctacagttttgttgtggttgtgggttgttgtttaatatggggtctaatcagccagggcaacatggtgagacccccatctctacaaaaaaattgaaaaattagctgggtaggccaggcagggtggctcacgcctataatcccagcactttggaaggccaaggtgggcagattgcttgagccaaggagtttgagaccagcctgggcaacatggcaaaaactcacctctacaaa

SEQ ID NO: 365901 - DNA, 1072 bp, Homo sapiens
tttagtgtttgaatttaccttctgtaatatgtttgggagagggcttaatagaattgctgctacagtctacttcccttttgtttcccatgtattttttcatcggcttgcatcacgtggatttatagattaaagtgaaaaacccgggatatctgtgttattctctccatcattctgaaattgctggagaaaaaattggcttttaatttatacactctcgtgttcttcagtgtgcatcagattgactgggatcttgttagaatgcagattctgcagatctagggtggggccagcttttctgcatttttaacaagctccagatgataatgatgcttctggcccaggaccatatcttgagtaggaaggaattaggatactatatttggacagtaaacattcttcctgcagtgagactgaggctggtagtcaaggccatggctgggaaataactattcttaaattgggatgcatcatccaagtagaacagcatcacatgttataccatctagagctactgggttaagtttgcaaatacttcgtatagatcacagttatctttatcccagtaaagttctactccagtttttcacttccaaatcatttaagtagttttaaagtaccatttaacaagtatttactctagattgtggagcacgcttgaaatatgagtgtacgcttctgcacgcccctgtgtttccagcctctctattggaggcatcatcattctgaaggataccagtgaagacattgaggagctggtggaacctgtggcagcacatggcccaaaaatcgaggaggaggaacaagagccagaacccccagaaccatttgagtatattgatgattaagggccagaggatctcacttgcttatctgaagaagattgtccaggctcatattgggaatgcttatgaggaaattcatgccgagacctgctattcaatgcatgtatcgttgcctctgcactgacctgaagaaccctgtctccaagtctttggttgaagagaagatatatgactgttgagtgtgctctttcacagaacttggttttcaaataaatataagatctccagat

SEQ ID NO: 365902 - DNA, 737 bp, Homo sapiens
  misc_feature (692)..(692): n is a, c, g, or t
  misc_feature (734)..(734): n is a, c, g, or t
  misc_feature (736)..(737): n is a, c, g, or t
tcctggcgagaagcgagccggcggcctgaggaggcgactgactgagcagcgcacccggggagcaaggaggcgcggtgaactgagcggcccctgagctgacagatacactgcgcagctggaacggcgagcgagccgacgggcgagtgaggggcgcagccatgatcacctcggccgctggaattatttctcttctggatgaagatgaaccacagcttaaggaatttgcactacacaaattgaatgcagttgttaatgacttctgggcagaaatttccgagtccgtagacaaaatagaggttttatacgaagatgaaggtttccggagtcggcagtttgcagccttagtggcatctaaagtattttatcacctgggggcttttgaggagtctctgaattatgctcttggagcaggggacctcttcaatgtcaatgataactctgaatatgtggaaactattatagcaaaatgcattgatcactacaccaaacaatgtgtggaaaatgcagatttgcctgaaggagaaaaaaaaccaattgaccagagattggaaggcatcgtaaataaaatgttccagcgatgtctagatgatcacaagtataaacaggctattggcattgctctggagacacgaagactggacgtctttgaaaagaccatactggagtcgaattcaaaatgaatgttcccccangaaaatgtttaagcctttaataacccccttaaaacctcctgncnn

SEQ ID NO: 365903 - DNA, 3698 bp, Homo sapiens
tcctggcgagaagcgagccggcggcctgaggaggcgactgactgagcagcgcacccggggagcaaggaggcgcggtgaactgagcggcccctgagctgacagatacactgcgcagctggaacggcgagcgagccgacgggcgagtgaggggcgcagccatgatcacctcggccgctggaattatttctcttctggatgaagatgaaccacagcttaaggaatttgcactacacaaattgaatgcagttgttaatgacttctgggcagaaatttccgagtccgtagacaaaatagaggttttatacgaagatgaaggtttccggagtcggcagtttgcagccttagtggcatctaaagtattttatcacctgggggcttttgaggagtctctgaattatgctcttggagcaggggacctcttcaatgtcaatgataactctgaatatgtggaaactattatagcaaaatgcattgatcactacaccaaacaatgtgtggaaaatgcagatttgcctgaaggagaaaaaaaaccaattgaccagagattggaaggcatcgtaaataaaatgttccagcgatgtctagatgatcacaagtataaacaggctattggcattgctctggagacacgaagactggacgtctttgaaaagaccatactggagtcgaatgatgtcccaggaatgttagcttatagccttaagctctgcatgtctttaatgcagaataaacagtttcggaataaagtactaagagttctagttaaaatctacatgaacttggagaaacctgatttcatcaatgtttgtcagtgcttaattttcttagatgatcctcaggctgtgagtgatatcttagagaaactggtaaaggaagacaacctcctgatggcatatcagatttgttttgatttgtatgaaagtgctagccagcagtttttgtcatctgtaatccagaatcttcgaactgttggcacccctattgcttctgtgcctggatccactaatacgggtactgttccgggatcagagaaagacagtgactcgatggaaacagaagaaaagacaagcagtgcatttgtaggaaagacaccagaagccagtccagagcctaaggaccagactttgaaaatgattaaaattttaagtggtgaaatggctattgagttacatctgcagttcttaatacgaaacaataatacagacctcatgattctaaaaaacacaaaggatgcagtacggaattctgtatgtcatactgcaaccgttatagcaaactcttttatgcactgtgggacaaccagtgaccagtttcttagagataatttggaatggttagccagagccactaactgggcaaaatttactgctacagccagtttgggtgtaattcataagggtcatgaaaaagaagcattacagttaatggcaacataccttcccaaggatacttctccaggatcagcctatcaggaaggtggaggtctctatgcactaggtcttattcatgccaatcatggtggtgatataattgactatctgcttaatcagcttaagaacgccagcaatgatatcgttagacacggtggcagtctgggccttggtttggcagccatgggaactgcacgtcaagatgtttatgatttgctaaaaacaaacctttatcaggatgatgcagtaacaggggaagcagctggcctggccctaggtttggttatgttgggctctaaaaatgctcaggctattgaggacatggttggttatgcacaagaaactcaacatgagaagattctgcgtggtcttgcagttggcatagctttagtaatgtatgggaggatggaagaggctgatgctctcattgaatctctctgtcgtgacaaggacccaattcttcgaaggtctggaatgtatactgtagccatggcttattgtggctctggtaacaacaaagcaattcgacgcctgctacatgttgctgtaagtgatgttaatgatgatgtcaggagggcagcagtagaatcacttgggttcattctattcagaacccctgaacagtgcccaagtgttgtctctttgttgtcagagagttacaaccctcatgtgcgctacggagctgcaatggccttggggatatgctgtgctggtacaggaaacaaggaagccattaatttgctagaaccaatgacaaacgaccccgtgaactacgtgaggcaaggggcactcatagcttcagctctcatcatgatccagcagactgaaatcacttgtccaaaggtgaatcagttcagacagctgtattccaaagtcatcaatgataagcatgatgatgtcatggccaagtttggcgctattctggcccagggcatactggatgcaggtggtcataatgtcacaatctccttgcagtccaggactgggcatactcatatgccttctgtggttggcgtccttgtatttacccagttttggttctggtttcctctttcacacttcctgtcattggcttatacccctacctgtgtcattggccttaacaaggacttaaagatgccgaaagttcagtataaatcgaactgtaaaccatccacatttgcatatcctgcccctctggaagtaccaaaagaaaaagaaaaggaaaaggtttctactgctgtattatctataactgccaaggctaaaaagaaggaaaaagaaaaggaaaaaaaggaggaggagaaaatggaagtggatgaggcagagaaaaaggaggaaaaagagaagaaaaaagaacctgagccaaacttccagttattggataacccagcccgagttatgcctgcccagcttaaggtcctaaccatgccggagacctgtagataccagcctttcaaaccactctctattggaggcatcatcattctgaaggataccagtgaagacattgaggagctggtggaacctgtggcagcacatggcccaaaaatcgaggaggaggaacaagagccagaacccccagaaccatttgagtatattgatgattaagggccagaggatctcacttgcttatctgaagaagattgtccaggctcatattgggaatgcttatgaggaaattcatgccgagacctgctattcaatgcatgtatcgttgcctctgcactgacctgaagaaccctgtctccaagtctttggttgaagagaagatatatgactgttgagtgtgctctttcacagaacttggttttcaaataaatataagatctccagatggacaagacatttgtttttcagcctgggtttttaataaatgtatctaatcctccccacaccatgaaatgcctaaatcccaagagccagagtcttgatttgctaggatgagtatgcacgactttcatattgatgaaaaagtcaaactattcttaaattatagaccatgaaaataatggaagggaaaaaaatcaaaccttgctcatcacccccaagaattctctacagttttgttgtggttgtgggttgttgtttaatatggggtctaatcagccagggcaacatggtgagacccccatctctacaaaaaaattgaaaaattagctgggtaggccaggcagggtggctcacgcctataatcccagcactttggaaggccaaggtgggcagattgcttgagccaaggagtttgagaccagcctgggcaacatggcaaaaactcacctctacaaa

SEQ ID NO: 365904 - DNA, 3320 bp, Homo sapiens
  misc_feature (3294)..(3294): n is a, c, g, or t
  misc_feature (3314)..(3314): n is a, c, g, or t
tcctggcgagaagcgagccggcggcctgaggaggcgactgactgagcagcgcacccggggagcaaggaggcgcggtgaactgagcggcccctgagctgacagatacactgcgcagctggaacggcgagcgagccgacgggcgagtgaggggcgcagccatgatcacctcggccgctggaattatttctcttctggatgaagatgaaccacagcttaaggaatttgcactacacaaattgaatgcagttgttaatgacttctgggcagaaatttccgagtccgtagacaaaatagaggttttatacgaagatgaaggtttccggagtcggcagtttgcagccttagtggcatctaaagtattttatcacctgggggcttttgaggagtctctgaattatgctcttggagcaggggacctcttcaatgtcaatgataactctgaatatgtggaaactattatagcaaaatgcattgatcactacaccaaacaatgtgtggaaaatgcagatttgcctgaaggagaaaaaaaaccaattgaccagagattggaaggcatcgtaaataaaatgttccagcgatgtctagatgatcacaagtataaacaggctattggcattgctctggagacacgaagactggacgtctttgaaaagaccatactggagtcgaatgatgtcccaggaatgttagcttatagccttaagctctgcatgtctttaatgcagaataaacagtttcggaataaagtactaagagttctagttaaaatctacatgaacttggagaaacctgatttcatcaatgtttgtcagtgcttaattttcttagatgatcctcaggctgtgagtgatatcttagagaaactggtaaaggaagacaacctcctgatggcatatcagatttgttttgatttgtatgaaagtgctagccagcagtttttgtcatctgtaatccagaatcttcgaactgttggcacccctattgcttctgtgcctggatccactaatacgggtactgttccgggatcagagaaagacagtgactcgatggaaacagaagaaaagacaagcagtgcatttgtaggaaagacaccagaagccagtccagagcctaaggaccagactttgaaaatgattaaaattttaagtggtgaaatggctattgagttacatctgcagttcttaatacgaaacaataatacagacctcatgattctaaaaaacacaaaggatgcagtacggaattctgtatgtcatactgcaaccgttatagcaaactcttttatgcactgtgggacaaccagtgaccagtttcttagagataatttggaatggttagccagagccactaactgggcaaaatttactgctacagccagtttgggtgtaattcataagggtcatgaaaaagaagcattacagttaatggcaacataccttcccaaggatacttctccaggatcagcctatcaggaaggtggaggtctctatgcactaggtcttattcatgccaatcatggtggtgatataattgactatctgcttaatcagcttaagaacgccagcaatgatatcgttagacacggtggcagtctgggccttggtttggcagccatgggaactgcacgtcaagatgtttatgatttgctaaaaacaaacctttatcaggatgatgcagtaacaggggaagcagctggcctggccctaggtttggttatgttgggctctaaaaatgctcaggctattgaggacatggttggttatgcacaagaaactcaacatgagaagattctgcgtggtcttgcagttggcatagctttagtaatgtatgggaggatggaagaggctgatgctctcattgaatctctctgtcgtgacaaggacccaattcttcgaaggtctggaatgtatactgtagccatggcttattgtggctctggtaacaacaaagcaattcgacgcctgctacatgttgctgtaagtgatgttaatgatgatgtcaggagggcagcagtagaatcacttgggttcattctattcagaacccctgaacagtgcccaagtgttgtctctttgttgtcagagagttacaaccctcatgtgcgctacggagctgcaatggccttggggatatgctgtgctggtacaggaaacaaggaagccattaatttgctagaaccaatgacaaacgaccccgtgaactacgtgaggcaaggggcactcatagcttcagctctcatcatgatccagcagactgaaatcacttgtccaaaggtgaatcagttcagacagctgtattccaaagtcatcaatgataagcatgatgatgtcatggccaagtttggcgctattctggcccagggcatactggatgcaggtggtcataatgtcacaatctccttgcagtccaggactgggcatactcatatgccttctgtggttggcgtccttgtatttacccagttttggttctggtttcctctttcacacttcctgtcattggcttatacccctacctgtgtcattggccttaacaaggacttaaagatgccgaaagttcagtataaatcgaactgtaaaccatccacatttgcatatcctgcccctctggaagtaccaaaagaaaaagaaaaggaaaaggtttctactgctgtattatctataactgccaaggctaaaaagaaggaaaaagaaaaggaaaaaaaggaggaggagaaaatggaagtggatgaggcagagaaaaaggaggaaaaagagaagaaaaaagaacctgagccaaacttccagttattggataacccagcccgagttatgcctgcccagcttaaggtcctaaccatgccggagacctgtagataccagcctttcaaaccactctctattggaggcatcatcattctgaaggataccagtgaagacattgaggagctggtggaacctgtggcagcacatggcccaaaaatcgaggaggaggaacaagagccagaacccccagaaccatttgagtatattgatgattaagggccagaggatctcacttgcttatctgaagaagattgtccaggctcatattgggaatgcttatgaggaaattcatgccgagacctgctattcaatgcatgtatcgttgcctctgcactgacctgaagaaccctgtctccaagtctttggttgaagagaagatatatgactgttgagtgtgctctttcacagaacttggttttcaaataaatataagatctccagataaaaaaaaaaaaaaaaaaaaaaaaaaaaaaaaaaaaaaaaaaaaaanaaaaaaaaagaggggggggngcaaaa

SEQ ID NO: 365905 - DNA, 3195 bp, Homo sapiens
  misc_feature (3182)..(3182): n is a, c, g, or t
tcctggcgagaagcgagccggcggcctgaggaggcgactgactgagcagcgcacccggggagcaaggaggcgcggtgaactgagcggcccctgagctgacagatacactgcgcagctggaacggcgagcgagccgacgggcgagtgaggggcgcagccatgatcacctcggccgctggaattatttctcttctggatgaagatgaaccacagcttaaggaatttgcactacacaaattgaatgcagttgttaatgacttctgggcagaaatttccgagtccgtagacaaaatagaggttttatacgaagatgaaggtttccggagtcggcagtttgcagccttagtggcatctaaagtattttatcacctgggggcttttgaggagtctctgaattatgctcttggagcaggggacctcttcaatgtcaatgataactctgaatatgtggaaactattatagcaaaatgcattgatcactacaccaaacaatgtgtggaaaatgcagatttgcctgaaggagaaaaaaaaccaattgaccagagattggaaggcatcgtaaataaaatgttccagcgatgtctagatgatcacaagtataaacaggctattggcattgctctggagacacgaagactggacgtctttgaaaagaccatactggagtcgaatgatgtcccaggaatgttagcttatagccttaagctctgcatgtctttaatgcagaataaacagtttcggaataaagtactaagagttctagttaaaatctacatgaacttggagaaacctgatttcatcaatgtttgtcagtgcttaattttcttagatgatcctcaggctgtgagtgatatcttagagaaactggtaaaggaagacaacctcctgatggcatatcagatttgttttgatttgtatgaaagtgctagccagcagtttttgtcatctgtaatccagaatcttcgaactgttggcacccctattgcttctgtgcctggatccactaatacgggtactgttccgggatcagagaaagacagtgactcgatggaaacagaagaaaagacaagcagtgcatttgtaggaaagacaccagaagccagtccagagcctaaggaccagactttgaaaatgattaaaattttaagtggtgaaatggctattgagttacatctgcagttcttaatacgaaacaataatacagacctcatgattctaaaaaacacaaaggatgcagtacggaattctgtatgtcatactgcaaccgttatagcaaactcttttatgcactgtgggacaaccagtgaccagtttcttagagataatttggaatggttagccagagccactaactgggcaaaatttactgctacagccagtttgggtgtaattcataagggtcatgaaaaagaagcattacagttaatggcaacataccttcccaaggatacttctccaggatcagcctatcaggaaggtggaggtctctatgcactaggtcttattcatgccaatcatggtggtgatataattgactatctgcttaatcagcttaagaacgccagcaatgatatcgttagacacggtggcagtctgggccttggtttggcagccatgggaactgcacgtcaagatgtttatgatttgctaaaaacaaacctttatcaggatgatgcagtaacaggggaagcagctggcctggccctaggtttggttatgttgggctctaaaaatgctcaggctattgaggacatggttggttatgcacaagaaactcaacatgagaagattctgcgtggtcttgcagttggcatagctttagtaatgtatgggaggatggaagaggctgatgctctcattgaatctctctgtcgtgacaaggacccaattcttcgaaggtctggaatgtatactgtagccatggcttattgtggctctggtaacaacaaagcaattcgacgcctgctacatgttgctgtaagtgatgttaatgatgatgtcaggagggcagcagtagaatcacttgggttcattctattcagaacccctgaacagtgcccaagtgttgtctctttgttgtcagagagttacaaccctcatgtgcgctacggagctgcaatggccttggggatatgctgtgctggtacaggaaacaaggaagccattaatttgctagaaccaatgacaaacgaccccgtgaactacgtgaggcaaggggcactcatagcttcagctctcatcatgatccagcagactgaaatcacttgtccaaaggtgaatcagttcagacagctgtattccaaagtcatcaatgataagcatgatgatgtcatggccaagtttggcgctattctggcccagggcatactggatgcaggtggtcataatgtcacaatctccttgcagtccaggactgggcatactcatatgccttctgtggttggcgtccttgtatttacccagttttggttctggtttcctctttcacacttcctgtcattggcttatacccctacctgtgtcattggccttaacaaggacttaaagatgccgaaagttcagtataaatcgaactgtaaaccatccacatttgcatatcctgcccctctggaagtaccaaaagaaaaagaaaaggaaaaggtttctactgctgtattatctataactgccaaggctaaaaagaaggaaaaagaaaaggaaaaaaaggaggaggagaaaatggaagtggatgaggcagagaaaaaggaggaaaaagagaagaaaaaagaacctgagccaaacttccagttattggataacccagcccgagttatgcctgcccagcttaaggtcctaaccatgccggagacctgtagataccagcctttcaaaccactctctattggaggcatcatcattctgaaggataccagtgaagacattgaggagctggtggaacctgtggcagcacatggcccaaaaatcgaggaggaggaacaagagccagaacccccagaaccatttgagtatattgatgattaagggccagaggatctcacttgcttatctgaagaagattgtccaggctcatattgggaatgcttatgaggaaattcatgccgagacctgctattcaatgcatgtatcgttgcctctgcactgacctgaagaaccctgtctccaagtctttgtatcagagatccncatggtccgagcc

SEQ ID NO: 365906 - DNA, 3651 bp, Homo sapiens
ggcgcggaggggcagcggagggggcgcgacccagaggggcagggcgcggcaggcagttgcaacatccgggagcgcagcggacagggcgagtgaggggcgcagccatgactcaccgtcggccgcgtggaacttatattcgtcttctggatgaacgatgaaccacagctcaaggaatttgcactacacaaattgaatgcagttgttaatgacttctgggcagaaatttccgagtccgtagacaaaatagaggttttatacgaagatgaaggtttccggagtcggcagtttgcagccttagtggcatctaaagtattttatcacctgggggcttttgaggagtctctgaattatgctcttggagcaggggacctcttcaatgtcaatgataactctgaatatgtggaaactattatagcaaaatgcattgatcactacaccaaacaatgtgtggaaaatgcagatttgcctgaaggagaaaaaaaaccaattgaccagagattggaaggcatcgtaaataaaatgttccagcgatgtctagatgatcacaagtataaacaggctattggcattgctctggagacacgaagactggacgtctttgaaaagaccatactggagtcgaatgatgtcccaggaatgttagcttatagccttaagctctgcatgtctttaatgcagaataaacagtttcggaataaagtactaagagttctagttaaaatctacatgaacttggagaaacctgatttcatcaatgtttgtcagtgcttaattttcttagatgatcctcaggctgtgagtgatatcttagagaaactggtaaaggaagacaacctcctgatggcatatcagatttgttttgatttgtatgaaagtgctagccagcagtttttgtcatctgtaatccagaatcttcgaactgttggcacccctattgcttctgtgcctggatccactaatacgggtactgttccgggatcagagaaagacagtgactcgatggaaacagaagaaaagacaagcagtgcatttgtaggaaagacaccagaagccagtccagagcctaaggaccagactttgaaaatgattaaaattttaagtggtgaaatggctattgagttacatctgcagttcttaatacgaaacaataatacagacctcatgattctaaaaaacacaaaggatgcagtacggaattctgtatgtcatactgcaaccgttatagcaaactcttttatgcactgtgggacaaccagtgaccagtttcttagagataatttggaatggttagccagagccactaactgggcaaaatttactgctacagccagtttgggtgtaattcataagggtcatgaaaaagaagcattacagttaatggcaacataccttcccaaggatacttctccaggatcagcctatcaggaaggtggaggtctctatgcactaggtcttattcatgccaatcatggtggtgatataattgactatctgcttaatcagcttaagaacgccagcaatgatatcgttagacacggtggcagtctgggccttggtttggcagccatgggaactgcacgtcaagatgtttatgatttgctaaaaacaaacctttatcaggatgatgcagtaacaggggaagcagctggcctggccctaggtttggttatgttgggctctaaaaatgctcaggctattgaggacatggttggttatgcacaagaaactcaacatgagaagattctgcgtggtcttgcagttggcatagctttagtaatgtatgggaggatggaagaggctgatgctctcattgaatctctctgtcgtgacaaggacccaattcttcgaaggtctggaatgtatactgtagccatggcttattgtggctctggtaacaacaaagcaattcgacgcctgctacatgttgctgtaagtgatgttaatgatgatgtcaggagggcagcagtagaatcacttgggttcattctattcagaacccctgaacagtgcccaagtgttgtctctttgttgtcagagagttacaaccctcatgtgcgctacggagctgcaatggccttggggatatgctgtgctggtacaggaaacaaggaagccattaatttgctagaaccaatgacaaacgaccccgtgaactacgtgaggcaaggggcactcatagcttcagctctcatcatgatccagcagactgaaatcacttgtccaaaggtgaatcagttcagacagctgtattccaaagtcatcaatgataagcatgatgatgtcatggccaagtttggcgctattctggcccagggcatactggatgcaggtggtcataatgtcacaatctccttgcagtccaggactgggcatactcatatgccttctgtggttggcgtccttgtatttacccagttttggttctggtttcctctttcacacttcctgtcattggcttatacccctacctgtgtcattggccttaacaaggacttaaagatgccgaaagttcagtataaatcgaactgtaaaccatccacatttgcatatcctgcccctctggaagtaccaaaagaaaaagaaaaggaaaaggtttctactgctgtattatctataactgccaaggctaaaaagaaggaaaaagaaaaggaaaaaaaggaggaggagaaaatggaagtggatgaggcagagaaaaaggaggaaaaagagaagaaaaaagaacctgagccaaacttccagttattggataacccagcccgagttatgcctgcccagcttaaggtcctaaccatgccggagacctgtagataccagcctttcaaaccactctctattggaggcatcatcattctgaaggataccagtgaagacattgaggagctggtggaacctgtggcagcacatggcccaaaaatcgaggaggaggaacaagagccagaacccccagaaccatttgagtatattgatgattaagggccagaggatctcacttgcttatctgaagaagattgtccaggctcatattgggaatgcttatgaggaaattcatgccgagacctgctattcaatgcatgtatcgttgcctctgcactgacctgaagaaccctgtctccaagtctttggttgaagagaagatatatgactgttgagtgtgctctttcacagaacttggttttcaaataaatataagatctccagatggacaagacatttgtttttcagcctgggtttttaataaatgtatctaatcctccccacaccatgaaatgcctaaatcccaagagccagagtcttgatttgctaggatgagtatgcacgactttcatattgatgaaaaagtcaaactattcttaaattatagaccatgaaaataatggaagggaaaaaaatcaaaccttgctcatcacccccaagaattctctacagttttgttgtggttgtgggttgttgtttaatatggggtctaatcagccagggcaacatggtgagacccccatctctacaaaaaaattgaaaaattagctgggtaggccaggcagggtggctcacgcctataatcccagcactttggaaggccaaggtgggcagattgcttgagccaaggagtttgagaccagcctgggcaacatggcaaaaactcacctctacaaa

SEQ ID NO: 365907 - DNA, 3583 bp, Homo sapiens
tcctggcgagaagcgagccggcggcctgaggaggcgactgactgagcagcgcacccggggagcaaggaggcgcggtgaactgagcggcccctgagctgacagatacactgcgcagctggaacggcgagcgagccgacgggcgagtgaggggcgcagccatgatcacctcggccgctggaattatttctcttctggatgaagatgaaccacagcttaaggaatttgcactacacaaattgaatgcagttgttaatgacttctgggcagaaatttccgagtccgtagacaaaatagaggttttatacgaagatgaaggtttccggagtcggcagtttgcagccttagtggcatctaaagtattttatcacctgggggcttttgaggagtctctgaattatgctcttggagcaggggacctcttcaatgtcaatgataactctgaatatgtggaaactattatagcaaaatgcattgatcactacaccaaacaatgtgtggaaaatgcagatttgcctgaaggagaaaaaaaaccaattgaccagagattggaaggcatcgtaaataaaatgttccagcgatgtctagatgatcacaagtataaacaggctattggcattgctctggagacacgaagactggacgtctttgaaaagaccatactggagtcgaatgatgtcccaggaatgttagcttatagccttaagctctgcatgtctttaatgcagaataaacagtttcggaataaagtactaagagttctagttaaaatctacatgaacttggagaaacctgatttcatcaatgtttgtcagtgcttaattttcttagatgatcctcaggctgtgagtgatatcttagagaaactggtaaaggaagacaacctcctgatggcatatcagatttgttttgatttgtatgaaagtgctagccagcagtttttgtcatctgtaatccagaatcttcgaactgttggcacccctattgcttctgtgcctggatccactaatacgggtactgttccgggatcagagaaagacagtgactcgatggaaacagaagaaaagacaagcagtgcatttgtaggaaagacaccagaagccagtccagagcctaaggaccagactttgaaaatgattaaaattttaagtggtgaaatggctattgagttacatctgcagttcttaatacgaaacaataatacagacctcatgattctaaaaaacacaaaggatgcagtacggaattctgtatgtcatactgcaaccgttatagcaaactcttttatgcactgtgggacaaccagtgaccagtttcttagagataatttggaatggttagccagagccactaactgggcaaaatttactgctacagccagtttgggtgtaattcataagggtcatgaaaaagaagcattacagttaatggcaacataccttcccaaggatacttctccaggatcagcctatcaggaaggtggaggtctctatgcactaggtcttattcatgccaatcatggtggtgatataattgactatctgcttaatcagcttaagaacgccagcaatgatatcgttagacacggtggcagtctgggccttggtttggcagccatgggaactgcacgtcaagatgtttatgatttgctaaaaacaaacctttatcaggatgatgcagtaacaggggaagcagctggcctggccctaggtttggttatgttgggctctaaaaatgctcaggctattgaggacatggttggttatgcacaagaaactcaacatgagaagattctgcgtggtcttgcagttggcatagctttagtaatgtatgggaggatggaagaggctgatgctctcattgaatctctctgtcgtgacaaggacccaattcttcgaaggtctggaatgtatactgtagccatggcttattgtggctctggtaacaacaaagcaattcgacgcctgctacatgttgctgtaagtgatgttaatgatgatgtcaggagggcagcagtagaatcacttgggttcattctattcaggaagccattaatttgctagaaccaatgacaaacgaccccgtgaactacgtgaggcaaggggcactcatagcttcagctctcatcatgatccagcagactgaaatcacttgtccaaaggtgaatcagttcagacagctgtattccaaagtcatcaatgataagcatgatgatgtcatggccaagtttggcgctattctggcccagggcatactggatgcaggtggtcataatgtcacaatctccttgcagtccaggactgggcatactcatatgccttctgtggttggcgtccttgtatttacccagttttggttctggtttcctctttcacacttcctgtcattggcttatacccctacctgtgtcattggccttaacaaggacttaaagatgccgaaagttcagtataaatcgaactgtaaaccatccacatttgcatatcctgcccctctggaagtaccaaaagaaaaagaaaaggaaaaggtttctactgctgtattatctataactgccaaggctaaaaagaaggaaaaagaaaaggaaaaaaaggaggaggagaaaatggaagtggatgaggcagagaaaaaggaggaaaaagagaagaaaaaagaacctgagccaaacttccagttattggataacccagcccgagttatgcctgcccagcttaaggtcctaaccatgccggagacctgtagataccagcctttcaaaccactctctattggaggcatcatcattctgaaggataccagtgaagacattgaggagctggtggaacctgtggcagcacatggcccaaaaatcgaggaggaggaacaagagccagaacccccagaaccatttgagtatattgatgattaagggccagaggatctcacttgcttatctgaagaagattgtccaggctcatattgggaatgcttatgaggaaattcatgccgagacctgctattcaatgcatgtatcgttgcctctgcactgacctgaagaaccctgtctccaagtctttggttgaagagaagatatatgactgttgagtgtgctctttcacagaacttggttttcaaataaatataagatctccagatggacaagacatttgtttttcagcctgggtttttaataaatgtatctaatcctccccacaccatgaaatgcctaaatcccaagagccagagtcttgatttgctaggatgagtatgcacgactttcatattgatgaaaaagtcaaactattcttaaattatagaccatgaaaataatggaagggaaaaaaatcaaaccttgctcatcacccccaagaattctctacagttttgttgtggttgtgggttgttgtttaatatggggtctaatcagccagggcaacatggtgagacccccatctctacaaaaaaattgaaaaattagctgggtaggccaggcagggtggctcacgcctataatcccagcactttggaaggccaaggtgggcagattgcttgagccaaggagtttgagaccagcctgggcaacatggcaaaaactcacctctacaaa

SEQ ID NO: 365908 - DNA, 2973 bp, Homo sapiens
tcctggcgagaagcgagccggcggcctgaggaggcgactgactgagcagcgcacccggggagcaaggaggcgcggtgaactgagcggcccctgagctgacagatacactgcgcagctggaacggcgagcgagccgacgggcgagtgaggggcgcagccatgatcacctcggccgctggaattatttctcttctggatgaagatgaaccacagcttaaggaatttgcactacacaaattgaatgcagttgttaatgacttctgggcagaaatttccgagtccgtagacaaaatagaggttttatacgaagatgaaggtttccggagtcggcagtttgcagccttagtggcatctaaagtattttatcacctgggggcttttgaggagtctctgaattatgctcttggagcaggggacctcttcaatgtcaatgataactctgaatatgtggaaactattatagcaaaatgcattgatcactacaccaaacaatgtgtggaaaatgcagatttgcctgaaggagaaaaaaaaccaattgaccagagattggaaggcatcgtaaataaaatgttccagcgatgtctagatgatcacaagtataaacaggctattggcattgctctggagacacgaagactggacgtctttgaaaagaccatactggagtcgaatgatgtcccaggaatgttagcttatagccttaagctctgcatgtctttaatgcagaataaacagtttcggaataaagtactaagagttctagttaaaatctacatgaacttggagaaacctgatttcatcaatgtttgtcagtgcttaattttcttagatgatcctcaggctgtgagtgatatcttagagaaactggtaaaggaagacaacctcctgatggcatatcagatttgttttgatttgtatgaaagtgctagccagcagtttttgtcatctgtaatccagaatcttcgaactgttggcacccctattgcttctgtgcctggatccactaatacgggtactgttccgggatcagagaaagacagtgactcgatggaaacagaagaaaagacaagcagtgcatttgtaggaaagacaccagaagccagtccagagcctaaggaccagactttgaaaatgattaaaattttaagtggtgaaatggctattgagttacatctgcagttcttaatacgaaacaataatacagacctcatgattctaaaaaacacaaaggatgcagtacggaattctgtatgtcatactgcaaccgttatagcaaactcttttatgcactgtgggacaaccagtgaccagtttcttagagataatttggaatggttagccagagccactaactgggcaaaatttactgctacagccagtttgggtgtaattcataagggtcatgaaaaagaagcattacagttaatggcaacataccttcccaaggatacttctccaggatcagcctatcaggaaggtggaggtctctatgcactaggtcttattcatgccaatcatggtggtgatataattgactatctgcttaatcagcttaagaacgccagcaatgatatcgttagacacggtggcagtctgggccttggtttggcagccatgggaactgcacgtcaagatgtttatgatttgctaaaaacaaacctttatcaggatgatgcagtaacaggggaagcagctggcctggccctaggtttggttatgttgggctctaaaaatgctcaggctattgaggacatggttggttatgcacaagaaactcaacatgagaagattctgcgtggtcttgcagttggcatagctttagtaatgtatgggaggatggaagaggctgatgctctcattgaatctctctgtcgtgacaaggacccaattcttcgaaggtctggaatgtatactgtagccatggcttattgtggctctggtaacaacaaagcaattcgacgcctgctacatgttgctgtaagtgatgttaatgatgatgtcaggagggcagcagtagaatcacttgggttcattctattcagaacccctgaacagtgcccaagtgttgtctctttgttgtcagagagttacaaccctcatgtgcgctacggagctgcaatggccttggggatatgctgtgctggtacaggaaacaaggaagccattaatttgctagaaccaatgacaaacgaccccgtgaactacgtgaggcaaggggcactcatagcttcagctctcatcatgatccagcagactgaaatcacttgtccaaaggtgaatcagttcagacagctgtattccaaagtcatcaatgataagcatgatgatgtcatggccaagtttggcgctattctggcccagggcatactggatgcaggtggtcataatgtcacaatctccttgcagtccaggactgggcatactcatatgccttctgtggttggcgtccttgtatttacccagttttggttctggtttcctctttcacacttcctgtcattggcttatacccctacctgtgtcattggccttaacaaggacttaaagatgccgaaagttcagtataaatcgaactgtaaaccatccacatttgcatatcctgcccctctggaagtaccaaaagaaaaagaaaaggaaaagaggtaggttctttgttccttttagcagcatttgtacttaaatataggagccactgagtattttactttttctttaactatcttttatgttttaaaagtaacacttcttatgctaacatttgacattacacaagaatatgaagtgaaagtcctttttgtctcttggtcatccaagtctcatgtcacaggagtcacaacttctgaatccctctgaaggttttctctgcacatgtcagtactttttataccacgaataaaattattctctacatacttttctgcatcttgttttcacattaactatatttttttttatttttaaaactttcaatgta

SEQ ID NO: 365909 - DNA, 2037 bp, Homo sapiens
cattttactcgttacttgccaggggaagcagctggcctggccctaggtttggttatgttgggctctaaaaatgctcaggctattgaggacatggttggttatgcacaagaaactcaacatgagaagattctgcgtggtcttgcagttggcatagctttagtaatgtatgggaggatggaagaggctgatgctctcattgaatctctctgtcgtgacaaggacccaattcttcgaaggtctggaatgtatactgtagccatggcttattgtggctctggtaacaacaaagcaattcgacgcctgctacatgttgctgtaagtgatgttaatgatgatgtcaggagggcagcagtagaatcacttgggttcattctattcagaacccctgaacagtgcccaagtgttgtctctttgttgtcagagagttacaaccctcatgtgcgctacggagctgcaatggccttggggatatgctgtgctggtacaggaaacaaggaagccattaatttgctagaaccaatgacaaacgaccccgtgaactacgtgaggcaaggggcactcatagcttcagctctcatcatgatccagcagactgaaatcacttgtccaaaggtgaatcagttcagacagctgtattccaaagtcatcaatgataagcatgatgatgtcatggccaagtttggcgctattctggcccagggcatactggatgcaggtggtcataatgtcacaatctccttgcagtccaggactgggcatactcatatgccttctgtggttggcgtccttgtatttacccagttttggttctggtttcctctttcacacttcctgtcattggcttatacccctacctgtgtcattggccttaacaaggacttaaagatgccgaaagttcagtataaatcgaactgtaaaccatccacatttgcatatcctgcccctctggaagtaccaaaagaaaaagaaaaggaaaaggtttctactgctgtattatctataactgccaaggctaaaaagaaggaaaaagaaaaggaaaaaaaggaggaggagaaaatggaagtggatgaggcagagaaaaaggaggaaaaagagaagaaaaaagaacctgagccaaacttccagttattggataacccagcccgagttatgcctgcccagcttaaggtcctaaccatgccggagacctgtagataccagcctttcaaaccactctctattggaggcatcatcattctgaaggataccagtgaagacattgaggagctggtggaacctgtggcagcacatggcccaaaaatcgaggaggaggaacaagagccagaacccccagaaccatttgagtatattgatgattaagggccagaggatctcacttgcttatctgaagaagattgtccaggctcatattgggaatgcttatgaggaaattcatgccgagacctgctattcaatgcatgtatcgttgcctctgcactgacctgaagaaccctgtctccaagtctttggttgaagagaagatatatgactgttgagtgtgctctttcacagaacttggttttcaaataaatataagatctccagatggacaagacatttgtttttcagcctgggtttttaataaatgtatctaatcctccccacaccatgaaatgcctaaatcccaagagccagagtcttgatttgctaggatgagtatgcacgactttcatattgatgaaaaagtcaaactattcttaaattatagaccatgaaaataatggaagggaaaaaaatcaaaccttgctcatcacccccaagaattctctacagttttgttgtggttgtgggttgttgtttaatatggggtctaatcagccagggcaacatggtgagacccccatctctacaaaaaaattgaaaaattagctgggtaggccaggcagggtggctcacgcctataatcccagcactttggaaggccaaggtgggcagattgcttgagccaaggagtttgagaccagcctgggcaacatggcaaaaactcacctctacaaa

SEQ ID NO: 365910 - DNA, 1982 bp, Homo sapiens
gtttgacatggcttggtattgcccaacatactccccatcaaacgattctcgcgtggttctatagcagtatggcatcctctagattctgtctggaagcatacaagctgctgattcgtctctttgttttatctctttcttgactgggaacccccctttgcgggaaggacccaattcttcgaaggtctggaatgtatactgtagccatggcttattgtggctctggtaacaacaaagcaattcgacgcctgctacatgttgctgtaagtgatgttaatgatgatgtcaggagggcagcagtagaatcacttgggttcattctattcagaacccctgaacagtgcccaagtgttgtctctttgttgtcagagagttacaaccctcatgtgcgctacggagctgcaatggccttggggatatgctgtgctggtacaggaaacaaggaagccattaatttgctagaaccaatgacaaacgaccccgtgaactacgtgaggcaaggggcactcatagcttcagctctcatcatgatccagcagactgaaatcacttgtccaaaggtgaatcagttcagacagctgtattccaaagtcatcaatgataagcatgatgatgtcatggccaagtttggcgctattctggcccagggcatactggatgcaggtggtcataatgtcacaatctccttgcagtccaggactgggcatactcatatgccttctgtggttggcgtccttgtatttacccagttttggttctggtttcctctttcacacttcctgtcattggcttatacccctacctgtgtcattggccttaacaaggacttaaagatgccgaaagttcagtataaatcgaactgtaaaccatccacatttgcatatcctgcccctctggaagtaccaaaagaaaaagaaaaggaaaaggtttctactgctgtattatctataactgccaaggctaaaaagaaggaaaaagaaaaggaaaaaaaggaggaggagaaaatggaagtggatgaggcagagaaaaaggaggaaaaagagaagaaaaaagaacctgagccaaacttccagttattggataacccagcccgagttatgcctgcccagcttaaggtcctaaccatgccggagacctgtagataccagcctttcaaaccactctctattggaggcatcatcattctgaaggataccagtgaagacattgaggagctggtggaacctgtggcagcacatggcccaaaaatcgaggaggaggaacaagagccagaacccccagaaccatttgagtatattgatgattaagggccagaggatctcacttgcttatctgaagaagattgtccaggctcatattgggaatgcttatgaggaaattcatgccgagacctgctattcaatgcatgtatcgttgcctctgcactgacctgaagaaccctgtctccaagtctttggttgaagagaagatatatgactgttgagtgtgctctttcacagaacttggttttcaaataaatataagatctccagatggacaagacatttgtttttcagcctgggtttttaataaatgtatctaatcctccccacaccatgaaatgcctaaatcccaagagccagagtcttgatttgctaggatgagtatgcacgactttcatattgatgaaaaagtcaaactattcttaaattatagaccatgaaaataatggaagggaaaaaaatcaaaccttgctcatcacccccaagaattctctacagttttgttgtggttgtgggttgttgtttaatatggggtctaatcagccagggcaacatggtgagacccccatctctacaaaaaaattgaaaaattagctgggtaggccaggcagggtggctcacgcctataatcccagcactttggaaggccaaggtgggcagattgcttgagccaaggagtttgagaccagcctgggcaacatggcaaaaactcacctctacaaa

SEQ ID NO: 365911 - DNA, 2417 bp, Homo sapiens
tcctggcgagaagcgagccggcggcctgaggaggcgactgactgagcagcgcacccggggagcaaggaggcgcggtgaactgagcggcccctgagctgacagatacactgcgcagctggaacggcgagcgagccgacgggcgagtgaggggcgcagccatgatcacctcggccgctggaattatttctcttctggatgaagatgaaccacagcttaaggaatttgcactacacaaattgaatgcagttgttaatgacttctgggcagaaatttccgagtccgtagacaaaatagaggttttatacgaagatgaaggtttccggagtcggcagtttgcagccttagtggcatctaaagtattttatcacctgggggcttttgaggagtctctgaattatgctcttggagcaggggacctcttcaatgtcaatgataactctgaatatgtggaaactattatagcaaaatgcattgatcactacaccaaacaatgtgtggaaaatgcagatttgcctgaaggagaaaaaaaaccaattgaccagagattggaaggcatcgtaaataaaatgttccagcgatgtctagatgatcacaagtataaacaggctattggcattgctctggagacacgaagactggacgtctttgaaaagaccatactggagtcgaatgatgtcccaggaatgttagcttatagccttaagctctgcatgtctttaatgcagaataaacagtttcggaataaagtactaagagttctagttaaaatctacatgaacttggagaaacctgatttcatcaatgtttgtcagtgcttaattttcttagatgatcctcaggctgtgagtgatatcttagagaaactggtaaaggaagacaacctcctgatggcatatcagatttgttttgatttgtatgaaagtgctagccagcagtttttgtcatctgtaatccagaatcttcgaactgttggcacccctattgcttctgtgcctggatccactaatacgggtactgttccgggatcagagaaagacagtgactcgatggaaacagaagaaaagacaagcagtgcatttgtaggaaagacaccagaagccagtccagagcctaaggaccagactttgaaaatgattaaaattttaagtggtgaaatggctattgagttacatctgcagttcttaatacgaaacaataatacagacctcatgattctaaaaaacacaaaggatgcagtacggaattctgtatgtcatactgcaaccgttatagcaaactcttttatgcactgtgggacaaccagtgaccagtttcttagagataatttggaatggttagccagagccactaactgggcaaaatttactgctacagccagtttgggtgtaattcataagggtcatgaaaaagaagcattacagttaatggcaacataccttcccaaggatacttctccaggatcagcctatcaggaaggtggaggtctctatgcactaggtcttattcatgccaatcatggtggtgatataattgactatctgcttaatcagcttaagaacgccagcaatgatatcgttagacacggtggcagtctgggccttggtttggcagccatgggaactgcacgtcaagatgtttatgatttgctaaaaacaaacctttatcaggatgatgcagtaacaggggaagcagctggcctggccctaggtttggttatgttgggctctaaaaatgctcaggctattgaggacatggttggttatgcacaagaaactcaacatgagaagattctgcgtggtcttgcagttggcatagctttagtaatgtatgggaggatggaagaggctgatgctctcattgaatctctctgtcgtgacaaggacccaattcttcgaaggtctggaatgtatactgtagccatggcttattgtggctctggtaacaacaaagcaattcgacgcctgctacatgttgctgtaagtgatgttaatgatgatgtcaggagggcagcagtagaatcacttgggttcattctattcagaacccctgaacagtgcccaagtgttgtctctttgttgtcagagagttacaaccctcatgtgcgctacggagctgcaatggccttggggatatgctgtgctggtacaggaaacaaggaagccattaatttgctagaaccaatgacaaacgaccccgtgaactacgtgaggcaaggggcactcatagcttcagctctcatcatgatccagcagactgaaatcacttgtccaaaggtgaatcagttcagacagctgtattccaaagtcatcaatgataagcatgatgatgtcatggccaagtttggcgctattctggcccagggcatactggatgcagtcctggactgcaaggagattgtgacattatgaccgtcgagc

SEQ ID NO: 365912 - DNA, 2551 bp, Homo sapiens
tcctggcgagaagcgagccggcggcctgaggaggcgactgactgagcagcgcacccggggagcaaggaggcgcggtgaactgagcggcccctgagctgacagatacactgcgcagctggaacggcgagcgagccgacgggcgagtgaggggcgcagccatgatcacctcggccgctggaattatttctcttctggatgaagatgaaccacagcttaaggaatttgcactacacaaattgaatgcagttgttaatgacttctgggcagaaatttccgagtccgtagacaaaatagaggttttatacgaagatgaaggtttccggagtcggcagtttgcagccttagtggcatctaaagtattttatcacctgggggcttttgaggagtctctgaattatgctcttggagcaggggacctcttcaatgtcaatgataactctgaatatgtggaaactattatagcaaaatgcattgatcactacaccaaacaatgtgtggaaaatgcagatttgcctgaaggagaaaaaaaaccaattgaccagagattggaaggcatcgtaaataaaatgttccagcgatgtctagatgatcacaagtataaacaggctattggcattgctctggagacacgaagactggacgtctttgaaaagaccatactggagtcgaatgatgtcccaggaatgttagcttatagccttaagctctgcatgtctttaatgcagaataaacagtttcggaataaagtactaagagttctagttaaaatctacatgaacttggagaaacctgatttcatcaatgtttgtcagtgcttaattttcttagatgatcctcaggctgtgagtgatatcttagagaaactggtaaaggaagacaacctcctgatggcatatcagatttgttttgatttgtatgaaagtgctagccagcagtttttgtcatctgtaatccagaatcttcgaactgttggcacccctattgcttctgtgcctggatccactaatacgggtactgttccgggatcagagaaagacagtgactcgatggaaacagaagaaaagacaagcagtgcatttgtaggaaagacaccagaagccagtccagagcctaaggaccagactttgaaaatgattaaaattttaagtggtgaaatggctattgagttacatctgcagttcttaatacgaaacaataatacagacctcatgattctaaaaaacacaaaggatgcagtacggaattctgtatgtcatactgcaaccgttatagcaaactcttttatgcactgtgggacaaccagtgaccagtttcttagagataatttggaatggttagccagagccactaactgggcaaaatttactgctacagccagtttgggtgtaattcataagggtcatgaaaaagaagcattacagttaatggcaacataccttcccaaggatacttctccaggatcagcctatcaggaaggtggaggtctctatgcactaggtcttattcatgccaatcatggtggtgatataattgactatctgcttaatcagcttaagaacgccagcaatgatatcgttagacacggtggcagtctgggccttggtttggcagccatgggaactgcacgtcaagatgtttatgatttgctaaaaacaaacctttatcaggatgatgcagtaacaggggaagcagctggcctggccctaggtttggttatgttgggctctaaaaatgctcaggctattgaggacatggttggttatgcacaagaaactcaacatgagaagattctgcgtggtcttgcagttggcatagctttagtaatgtatgggaggatggaagaggctgatgctctcattgaatctctctgtcgtgacaaggacccaattcttcgaaggtctggaatgtatactgtagccatggcttattgtggctctggtaacaacaaagcaattcgacgcctgctacatgttgctgtaagtgatgttaatgatgatgtcaggagggcagcagtagaatcacttgggttcattctattcagaacccctgaacagtgcccaagtgttgtctctttgttgtcagagagttacaaccctcatgtgcgctacggagctgcaatggccttggggatatgctgtgctggtacaggaaacaaggaagccattaatttgctagaaccaatgacaaacgaccccgtgaactacgtgaggcaaggggcactcatagcttcagctctcatcatgatccagcagactgaaatcacttgtccaaaggtgaatcagttcagacagctgtattccaaagtcatcaatgataagcatgatgatgtcatggccaagtttggcgctattctggcccagggcatactggatgcaggatgattatagctcgattttagagcattccaggactgggcatagtcataggcattcagtccggcgcatactgagacacaggagtgagagatcaaggttaagggagaactgtatctgatgatcgcacacacccggtctcatgtcgggtgacggggagatgcacatcagcgacaatc

SEQ ID NO: 365913 - DNA, 2603 bp, Homo sapiens
tcctggcgagaagcgagccggcggcctgaggaggcgactgactgagcagcgcacccggggagcaaggaggcgcggtgaactgagcggcccctgagctgacagatacactgcgcagctggaacggcgagcgagccgacgggcgagtgaggggcgcagccatgatcacctcggccgctggaattatttctcttctggatgaagatgaaccacagcttaaggaatttgcactacacaaattgaatgcagttgttaatgacttctgggcagaaatttccgagtccgtagacaaaatagaggttttatacgaagatgaaggtttccggagtcggcagtttgcagccttagtggcatctaaagtattttatcacctgggggcttttgaggagtctctgaattatgctcttggagcaggggacctcttcaatgtcaatgataactctgaatatgtggaaactattatagcaaaatgcattgatcactacaccaaacaatgtgtggaaaatgcagatttgcctgaaggagaaaaaaaaccaattgaccagagattggaaggcatcgtaaataaaatgttccagcgatgtctagatgatcacaagtataaacaggctattggcattgctctggagacacgaagactggacgtctttgaaaagaccatactggagtcgaatgatgtcccaggaatgttagcttatagccttaagctctgcatgtctttaatgcagaataaacagtttcggaataaagtactaagagttctagttaaaatctacatgaacttggagaaacctgatttcatcaatgtttgtcagtgcttaattttcttagatgatcctcaggctgtgagtgatatcttagagaaactggtaaaggaagacaacctcctgatggcatatcagatttgttttgatttgtatgaaagtgctagccagcagtttttgtcatctgtaatccagaatcttcgaactgttggcacccctattgcttctgtgcctggatccactaatacgggtactgttccgggatcagagaaagacagtgactcgatggaaacagaagaaaagacaagcagtgcatttgtaggaaagacaccagaagccagtccagagcctaaggaccagactttgaaaatgattaaaattttaagtggtgaaatggctattgagttacatctgcagttcttaatacgaaacaataatacagacctcatgattctaaaaaacacaaaggatgcagtacggaattctgtatgtcatactgcaaccgttatagcaaactcttttatgcactgtgggacaaccagtgaccagtttcttagagataatttggaatggttagccagagccactaactgggcaaaatttactgctacagccagtttgggtgtaattcataagggtcatgaaaaagaagcattacagttaatggcaacataccttcccaaggatacttctccaggatcagcctatcaggaaggtggaggtctctatgcactaggtcttattcatgccaatcatggtggtgatataattgactatctgcttaatcagcttaagaacgccagcaatgatatcgttagacacggtggcagtctgggccttggtttggcagccatgggaactgcacgtcaagatgtttatgatttgctaaaaacaaacctttatcaggatgatgcagtaacaggggaagcagctggcctggccctaggtttggttatgttgggctctaaaaatgctcaggctattgaggacatggttggttatgcacaagaaactcaacatgagaagattctgcgtggtcttgcagttggcatagctttagtaatgtatgggaggatggaagaggctgatgctctcattgaatctctctgtcgtgacaaggacccaattcttcgaaggtctggaatgtatactgtagccatggcttattgtggctctggtaacaacaaagcaattcgacgcctgctacatgttgctgtaagtgatgttaatgatgatgtcaggagggcagcagtagaatcacttgggttcattctattcagtgaggagaagcgtatctagtagaatgattgatgaagactgaatggttgaacttcggagcctcattggactctggtacatggcagggttaatcccatttcgaattccatgtttcttgaaaaacttagagttctctgccattggattccggaagtagatcttactggagcgttttctgagagtttttactgactttgtggcccggtaattgcaggtgatatatcggccaaatgcatcccgaaatgtcttattgaagagggtgtagaccaaaggattcactcctgaggaaacatagcctatccacacaaatatctccaggagcatttggagagtagtttggttacaggaatcacataaaactaaagttatatttgtaataaagaagggacaccacataagcaaaaagaggaaaaacacaatccctaggacctttgaggctctctgttcgttggaaatggtctgcactgactttttcccaattgtggatgttcttcgcataagtgtttcatcacctgagttgggcagagccttgtcctttcgagaaccatccagcattgccacctt

SEQ ID NO: 365914 - DNA, 1163 bp, Homo sapiens
actttaaatgatggtgtctaatatctcagttttcagaagtaatctagataaactgttaaaaatgaaagacttaagtacatgtaaatgggatgaatgattaggtaaattttgtgtaatttaaaatcttaaaagtatttttgatgcccattggatatctcagtcatttccaattaagaaagggttatgatagggaggaatatgtttccaaaaattgtggaattattctcatctataaaatgctaatatctgatagtttaggattttttgcttcctaaggtttcactaaaatttaaggttactaagatgatatggtttggctttgcatccccacccaaatctcttcttataactcccataattaccgtgtgttgtggggagggatccagtgggtgagagatgattgaattatgctgttctcatgatagcgaatgggtctcatgagatctgatggttttgaaaatgggagttgccctgcacaagctctccttttgcctgctgccatccgcataagatgtgatttgctcttccttgccttccaccatgattgtgaggccttcccagcatgtggaaatgtaagtccaataaacctctttcttttgtaaatgacccagtcttgggtatttctttatagcagtgtgaaaatggactaacacagatatttggcaggcatccagtagtcttcgataaacacaaccaccatctagtggccagaacagccttatcggaccccactgtctgcaatgaaaagctgttcctttcctcatcctttacagggccaagcacccagcatcctgggacagtggccccgtgtgcccagctttgaggatgagctcatgcctggttgctctgggtggagagagggaagagttgaatcaacatccatatgtataaatctccttttgtgcatttagaatcacgtccttagaataaattgcgatcagtggcattactgaagcaaattgtatcaaaaatgcaaaaaagacccatttttccaaattgttttctaacaaggaagtcatattgtttgctttttgatactgttctttagaaaacgatgcatgagagttttacatttcatatagtgtgttctatttattttatactttgcaatttctgtaatttttaagcactgttcttcccatactagaggctctgctctaact

SEQ ID NO: 365915 - DNA, 1395 bp, Homo sapiens
  misc_feature (9)..(9): n is a, c, g, or t
  misc_feature (1001)..(1001): n is a, c, g, or t
  misc_feature (1395)..(1395): n is a, c, g, or t
gagggcccntgccagaacctgaccatgctggcactctgattttggatttctagtctctagaactgtgaataagtacgtttctattgcgtaagccacccagtctatggtattttattatggcagcctgagctgactaatataggcttctagattggaaggggaaggaagtaaagagagagaattgatagggataaagaagaggcatgaagagacttggggtatctgctactgaagacatcagctctctatgacaaaacagcacagcatgtttggagtaagagaaagctgaagtctcaacaaacaaatagattcttaatgttctataccaccggacaaactgcagcccttttatacatatggagtactttctgggccagtcctgtggcccctttcaaatgtatggtgttgaaacgtagtaagtttatgtctttaaggtctgcccctcccttcttgcattatatcataaactcttctcttttttttttttttggagacggagtcccgctctgtcacgcaggctgccaggctggcgtacagtggcgcaatctcagctcgctgcaacctccacctcctgggttcaagcgattttcttgcctctgcctcctgagtagctgggattactggcacacaccaccatgcacagggagatatgagacatcaatcaatatatgtaagatgtacatcagtttcgtctggaaagatgggacaacatgaagcagggagggggctccctggtgacagttccttgttcaaaatgccaagaacctggatgactcatagtcaagaccctccaccagtaacatatattggcgagccagccaggagaccactacaggaaacactccatttattccacctgacttcccacttggctgcatcctcaaccattgaaatgaatttgaccctgataatctaaggaggaaacatttgatattcttttgcaataatacttggccccagtattgtttggaatctggagtttgctgttgaatgggaaagcnggatgacgttgcatgtatccaggctttggtgctgctgtcctaagaagggtcaggcctggtcagcatatggtgctctcctttggtgctatttggctccagtgtctttggagtctgaggaggtttggcctttaaaaatcaaactgccaccggaactgctttaaaaatgtttggttcacagccttcactggattacctattggagcaaacaaagtgtaaccatgtaaaacctgtgagcttgtattgatatctcatggctagagttccaaggtaaaagctattggatcttcgtttgtgtgtgtgtatacatgtctagatgtgtttatttgtatgtacacttattgttatatgttgtgtcaaccaaatcagcttataaataaaaaagcactcataaatn

SEQ ID NO: 365916 - DNA, 1053 bp, Homo sapiens
  misc_feature (9)..(9): n is a, c, g, or t
gagggcccntgccagaacctgaccatgctggcactctgattttggatttctagtctctagaactgtgaataagtacgtttctattgcgtaagccacccagtctatggtattttattatggcagcctgagctgactaatataggcttctagattggaaggggaaggaagtaaagagagagaattgatagggataaagaagaggcatgaagagacttggggtatctgctactgaagacatcagctctctatgacaaaacagcacagcatgtttggagtaagagaaagctgaagtctcaacaaacaaatagattcttaatgttctataccaccggacaaactgcagcccttttatacatatggagtactttctgggccagtcctgtggcccctttcaaatgtatggtgttgaaacgtagtaagtttatgtctttaaggtctgcccctcccttcttgcattatatcataaactcttctcttttttttttttttggagacggagtcccgctctgtcacgcaggctgccaggctggcgtacagtggcgcaatctcagctcgctgcaacctccacctcctgggttcaagcgattttcttgcctctgcctcctgagtagctgggattactggcacacaccaccatgcacaggtaatttttttatattttttaatagagacagggtgttggccaggctggtcttgaaatcctgacttcagtgatctgcccgtcttggcttcccgaagtgctgtgattacagccatgagccaccgtgcccggccaactcttctcagttctaagtgtcctaacacccttcatctcctgctgactgcaaggcagttctcagggaggagcctggattgtgtccatgtataaagaaagactctgctgctgatgtgcaaaggaatgtggatgtgatagtttccagcctgaaagtccccctcttttcatctccgcagtatagttcttagaaacaacaagccttgcttttacagtgagtccatatctaaaactttatctgaacccaaaatacctgagataggtctcagtcaatttagaga

SEQ ID NO: 365917 - DNA, 757 bp, Homo sapiens
aggggtttctcacgagatctgatggttttataaggggctctttcccctttgtgcaccctctctctttcctgcttccttgtgaagaaggtacttgcttctctttctcctgccaaagcatgaccttataattgtaagtttccggaggcctccccagccatgcggaactgtgagtcaatgaaacctctttcttttataaatgacccagtcttgggtatttctttatagcagtgtgaaaatggactaacacagatatttggcaggcatccagtagtcttcgataaacacaaccaccatctagtggccagaacagccttatcggaccccactgtctgcaatgaaaagctgttcctttcctcatcctttacagggccaagcacccagcatcctgggacagtggccccgtgtgcccagctttgaggatgagctcatgcctggttgctctgggtggagagagggaagagttgaatcaacatccatatgtataaatctccttttgtgcatttagaatcacgtccttagaataaattgcgatcagtggcattactgaagcaaattgtatcaaaaatgcaaaaaagacccatttttccaaattgttttctaacaaggaagtcatattgtttgctttttgatactgttctttagaaaacgatgcatgagagttttacatttcatatagtgtgttctatttattttatactttgcaatttctgtaatttttaagcactgttcttcccatactagaggctctgctctaact

SEQ ID NO: 365918 - DNA, 3686 bp, Homo sapiens
  misc_feature (9)..(9): n is a, c, g, or t
  misc_feature (1155)..(1155): n is a, c, g, or t
gagggcccntgccagaacctgaccatgctggcactctgattttggatttctagtctctagaactgtgaataagtacgtttctattgcgtaagccacccagtctatggtattttattatggcagcctgagctgactaatataggcttctagattggaaggggaaggaagtaaagagagagaattgatagggataaagaagaggcatgaagagacttggggtatctgctactgaagacatcagctctctatgacaaaacagcacagcatgtttggagtaagagaaagctgaagtctcaacaaacaaatagattcttaatgttctataccaccggacaaactgcagcccttttatacatatggagtactttctgggccagtcctgtggcccctttcaaatgtatggtgttgaaacgtagtaagtttatgtctttaaggtctgcccctcccttcttgcattatatcataaactcttctcttttttttttttttggagacggagtcccgctctgtcacgcaggctgccaggctggcgtacagtggcgcaatctcagctcgctgcaacctccacctcctgggttcaagcgattttcttgcctctgcctcctgagtagctgggattactggcacacaccaccatgcacagggagatatgagacatcaatcaatatatgtaagatgtacatcagtttcgtctggaaagatgggacaacatgaagcagggagggggctccctggtgacagggaattttcttgtgggcaaattgtgagggagttccttgttcaaaatgccaagaacctggatgactcatagtcaagaccctccaccagtaacatatattggcgagccagccaggagcttggaaccctcggtggacagtgcctaagcacagaggcaaccacaggtttctaacagggccactctctggtgaaactgaaaggtttctgtgtgaaagtgcctgaccaccactgcccagttcagaccactacaggaaacactccatttattccacctgacttcccacttggctgcatcctcaaccattgaaatgaatttgaccctgataatctaaggaggaaacatttgatattcttttgcaataatacttggccccagtattgtttggaatctggagtttgctgttgaatgggaaagcnggatgacgttgcatgtatccaggctttggtgctgctgtcctaagaagggtcaggcctggtcagcatatggtgctctcctttggtgctatttggctccagtgtctttggagtctgaggaggtttggcctttaaaaatcaaactgccaccggaactgctttaaaaatgtttggttcacagccttcactggattacctattggagcaaacaaagtgtaaccatgtaaaacctgtgagcttgtattgatatctcatggctagagttccaagcgaatgggtctcatgagatctgatggttttgaaaatgggagttgccctgcacaagctctccttttgcctgctgccatccgcataagatgtgatttgctcttccttgccttccaccatgattgtgaggccttcccagcatgtggaaatggtccagcctgcaataactgaagcccccagacctggaacctgaagatcccatcagccactaaacctgtgaacctgtagaagacctgaagtacctgtttaaaaggcagccaaaagataagtaaattcctatcaactttccttggtgtccttcttgtatatttactgtaagctggatataatagtagccatttttatatttttacaatttaattgctttcttccaaatggattgaatcacttcttttaaagtgttttaattaatttttatctatagaacaaaataacaaataagtattttttttttataccataatggtcacccacagcctgtgtatactaagaccatgcatactgataatcagctttattttacaaaagagtttcgctttacccctctggtaattaatggattctgggtatttattaaaaactttaacacaaagactgttaaataccaccagtccagctttggcaaggcactgttggctttgtttatctccatcatcatccaaacagactaccaatcctgatcccagcccaatcttgggcccttgaaaaaataacttaacatcctaactacaagggagaaactcctttcaaattaatgaacctggctgacttatatagccttaaaattatggaaatgacaagggttacaatgtcagaatgagcagtaaaccttccccagtcctatcagagcaaactttctggggttgcatcccctcagaaacccatttggggcccaatctcaatgcacatatcagtgcgcaaagcactaaaattccaggcaacactttgtattgagagaagccaaaattttggtcaggccctgggacatctaaagtcaccaatgtaactacaccatacagattaaaccctcacatgatcatgtaagctatgcagttacccaagctgcatcatttagaaaacctgtacagtttttatggaaaccatccctagtcaaggacactttaaatatatagtctaaataccgttaaggtaggcccactagctgtgttcacattttcccttggccaccttaccagggactttaataacttgggaaagtgaaaacaacaagctaacccacatgttcaccatagaaaacaattttgtcttgaaaaacaaggactctttttcccgtgtgggaccagttcctacttatgttttaccagccaattggactggaacctatacagttgtttatttagcccccgaaattaatatagctcccaacaaccaatccttcattatacttttaactgcaaccaccagacacaaatgagccatccaactgataccactttcggtagagctaggaataacagcaggagtaggaatgagagttagcagccttgcagtttccctatcctattaccaatgcttgtccaaggattttatggaaagcttaggtgacattgcccaaaagtatcatcaccttacaaaatcagatagagtctttggcagtggtggctttgtaaaatagaaggggactggatctcctaaatgctgaagaaggtggcttatgtctttttcctagaggaagaatgctgtttttatgtcaaccaaacaggattagtaagggatgccacccaaaaactagccgattggtaccataagatatgacaacagctgtctgagtcatggggcgcctagtcaaaatgctaatttggggctcacatctccttcctctggccagtccactattaattattatacttgccttggcttttggatcatgtttgttaaatcttttaaccagatttatttcttcttgcctagagaccattttgcaggaatttagccaattcagaggtcttgttctccataatttggaattttccttcggatttgatcaagttggatagagttggtcaaacccaatgggaaaaagatgaaaacaacaagaaacagaaacaaacagcaacaacaacaacaacaaaaacaaagcaggaaaaaactgaaactcatcttccctgctggaaacgagctcaaactccagaaaggagttacctgccttccatcatcatggacgcaggaaaatttgccttccttgttggaagcaagtaaaactccaaaaaaggagttgcacagcaaaataaacttcagatctcaac

SEQ ID NO: 365919 - DNA, 3434 bp, Homo sapiens
  misc_feature (9)..(9): n is a, c, g, or t
  misc_feature (903)..(903): n is a, c, g, or t
gagggcccntgccagaacctgaccatgctggcactctgattttggatttctagtctctagaactgtgaataagtacgtttctattgcgtaagccacccagtctatggtattttattatggcagcctgagctgactaatataggcttctagattggaaggggaaggaagtaaagagagagaattgatagggataaagaagaggcatgaagagacttggggtatctgctactgaagacatcagctctctatgacaaaacagcacagcatgtttggagtaagagaaagctgaagtctcaacaaacaaatagattcttaatgttctataccaccggacaaactgcagcccttttatacatatggagtactttctgggccagtcctgtggcccctttcaaatgtatggtgttgaaacgtagtaagtttatgtctttaaggtctgcccctcccttcttgcattatatcataaactcttctcttttttttttttttggagacggagtcccgctctgtcacgcaggctgccaggctggcgtacagtggcgcaatctcagctcgctgcaacctccacctcctgggttcaagcgattttcttgcctctgcctcctgagtagctgggattactggcacacaccaccatgcacagttccttgttcaaaatgccaagaacctggatgactcatagtcaagaccctccaccagtaacatatattggcgagccagccaggagaccactacaggaaacactccatttattccacctgacttcccacttggctgcatcctcaaccattgaaatgaatttgaccctgataatctaaggaggaaacatttgatattcttttgcaataatacttggccccagtattgtttggaatctggagtttgctgttgaatgggaaagcnggatgacgttgcatgtatccaggctttggtgctgctgtcctaagaagggtcaggcctggtcagcatatggtgctctcctttggtgctatttggctccagtgtctttggagtctgaggaggtttggcctttaaaaatcaaactgccaccggaactgctttaaaaatgtttggttcacagccttcactggattacctattggagcaaacaaagtgtaaccatgtaaaacctgtgagcttgtattgatatctcatggctagagttccaagcgaatgggtctcatgagatctgatggttttgaaaatgggagttgccctgcacaagctctccttttgcctgctgccatccgcataagatgtgatttgctcttccttgccttccaccatgattgtgaggccttcccagcatgtggaaatggtccagcctgcaataactgaagcccccagacctggaacctgaagatcccatcagccactaaacctgtgaacctgtagaagacctgaagtacctgtttaaaaggcagccaaaagataagtaaattcctatcaactttccttggtgtccttcttgtatatttactgtaagctggatataatagtagccatttttatatttttacaatttaattgctttcttccaaatggattgaatcacttcttttaaagtgttttaattaatttttatctatagaacaaaataacaaataagtattttttttttataccataatggtcacccacagcctgtgtatactaagaccatgcatactgataatcagctttattttacaaaagagtttcgctttacccctctggtaattaatggattctgggtatttattaaaaactttaacacaaagactgttaaataccaccagtccagctttggcaaggcactgttggctttgtttatctccatcatcatccaaacagactaccaatcctgatcccagcccaatcttgggcccttgaaaaaataacttaacatcctaactacaagggagaaactcctttcaaattaatgaacctggctgacttatatagccttaaaattatggaaatgacaagggttacaatgtcagaatgagcagtaaaccttccccagtcctatcagagcaaactttctggggttgcatcccctcagaaacccatttggggcccaatctcaatgcacatatcagtgcgcaaagcactaaaattccaggcaacactttgtattgagagaagccaaaattttggtcaggccctgggacatctaaagtcaccaatgtaactacaccatacagattaaaccctcacatgatcatgtaagctatgcagttacccaagctgcatcatttagaaaacctgtacagtttttatggaaaccatccctagtcaaggacactttaaatatatagtctaaataccgttaaggtaggcccactagctgtgttcacattttcccttggccaccttaccagggactttaataacttgggaaagtgaaaacaacaagctaacccacatgttcaccatagaaaacaattttgtcttgaaaaacaaggactctttttcccgtgtgggaccagttcctacttatgttttaccagccaattggactggaacctatacagttgtttatttagcccccgaaattaatatagctcccaacaaccaatccttcattatacttttaactgcaaccaccagacacaaatgagccatccaactgataccactttcggtagagctaggaataacagcaggagtaggaatgagagttagcagccttgcagtttccctatcctattaccaatgcttgtccaaggattttatggaaagcttaggtgacattgcccaaaagtatcatcaccttacaaaatcagatagagtctttggcagtggtggctttgtaaaatagaaggggactggatctcctaaatgctgaagaaggtggcttatgtctttttcctagaggaagaatgctgtttttatgtcaaccaaacaggattagtaagggatgccacccaaaaactagccgattggtaccataagatatgacaacagctgtctgagtcatggggcgcctagtcaaaatgctaatttggggctcacatctccttcctctggccagtccactattaattattatacttgccttggcttttggatcatgtttgttaaatcttttaaccagatttatttcttcttgcctagagaccattttgcaggaatttagccaattcagaggtcttgttctccataatttggaattttccttcggatttgatcaagttggatagagttggtcaaacccaatgggaaaaagatgaaaacaacaagaaacagaaacaaacagcaacaacaacaacaacaaaaacaaagcaggaaaaaactgaaactcatcttccctgctggaaacgagctcaaactccagaaaggagttacctgccttccatcatcatggacgcaggaaaatttgccttccttgttggaagcaagtaaaactccaaaaaaggagttgcacagcaaaataaacttcagatctcaac

SEQ ID NO: 365920 - DNA, 3557 bp, Homo sapiens
  misc_feature (9)..(9): n is a, c, g, or t
  misc_feature (1026)..(1026): n is a, c, g, or t
gagggcccntgccagaacctgaccatgctggcactctgattttggatttctagtctctagaactgtgaataagtacgtttctattgcgtaagccacccagtctatggtattttattatggcagcctgagctgactaatataggcttctagattggaaggggaaggaagtaaagagagagaattgatagggataaagaagaggcatgaagagacttggggtatctgctactgaagacatcagctctctatgacaaaacagcacagcatgtttggagtaagagaaagctgaagtctcaacaaacaaatagattcttaatgttctataccaccggacaaactgcagcccttttatacatatggagtactttctgggccagtcctgtggcccctttcaaatgtatggtgttgaaacgtagtaagtttatgtctttaaggtctgcccctcccttcttgcattatatcataaactcttctcttttttttttttttggagacggagtcccgctctgtcacgcaggctgccaggctggcgtacagtggcgcaatctcagctcgctgcaacctccacctcctgggttcaagcgattttcttgcctctgcctcctgagtagctgggattactggcacacaccaccatgcacagttccttgttcaaaatgccaagaacctggatgactcatagtcaagaccctccaccagtaacatatattggcgagccagccaggagcttggaaccctcggtggacagtgcctaagcacagaggcaaccacaggtttctaacagggccactctctggtgaaactgaaaggtttctgtgtgaaagtgcctgaccaccactgcccagttcagaccactacaggaaacactccatttattccacctgacttcccacttggctgcatcctcaaccattgaaatgaatttgaccctgataatctaaggaggaaacatttgatattcttttgcaataatacttggccccagtattgtttggaatctggagtttgctgttgaatgggaaagcnggatgacgttgcatgtatccaggctttggtgctgctgtcctaagaagggtcaggcctggtcagcatatggtgctctcctttggtgctatttggctccagtgtctttggagtctgaggaggtttggcctttaaaaatcaaactgccaccggaactgctttaaaaatgtttggttcacagccttcactggattacctattggagcaaacaaagtgtaaccatgtaaaacctgtgagcttgtattgatatctcatggctagagttccaagcgaatgggtctcatgagatctgatggttttgaaaatgggagttgccctgcacaagctctccttttgcctgctgccatccgcataagatgtgatttgctcttccttgccttccaccatgattgtgaggccttcccagcatgtggaaatggtccagcctgcaataactgaagcccccagacctggaacctgaagatcccatcagccactaaacctgtgaacctgtagaagacctgaagtacctgtttaaaaggcagccaaaagataagtaaattcctatcaactttccttggtgtccttcttgtatatttactgtaagctggatataatagtagccatttttatatttttacaatttaattgctttcttccaaatggattgaatcacttcttttaaagtgttttaattaatttttatctatagaacaaaataacaaataagtattttttttttataccataatggtcacccacagcctgtgtatactaagaccatgcatactgataatcagctttattttacaaaagagtttcgctttacccctctggtaattaatggattctgggtatttattaaaaactttaacacaaagactgttaaataccaccagtccagctttggcaaggcactgttggctttgtttatctccatcatcatccaaacagactaccaatcctgatcccagcccaatcttgggcccttgaaaaaataacttaacatcctaactacaagggagaaactcctttcaaattaatgaacctggctgacttatatagccttaaaattatggaaatgacaagggttacaatgtcagaatgagcagtaaaccttccccagtcctatcagagcaaactttctggggttgcatcccctcagaaacccatttggggcccaatctcaatgcacatatcagtgcgcaaagcactaaaattccaggcaacactttgtattgagagaagccaaaattttggtcaggccctgggacatctaaagtcaccaatgtaactacaccatacagattaaaccctcacatgatcatgtaagctatgcagttacccaagctgcatcatttagaaaacctgtacagtttttatggaaaccatccctagtcaaggacactttaaatatatagtctaaataccgttaaggtaggcccactagctgtgttcacattttcccttggccaccttaccagggactttaataacttgggaaagtgaaaacaacaagctaacccacatgttcaccatagaaaacaattttgtcttgaaaaacaaggactctttttcccgtgtgggaccagttcctacttatgttttaccagccaattggactggaacctatacagttgtttatttagcccccgaaattaatatagctcccaacaaccaatccttcattatacttttaactgcaaccaccagacacaaatgagccatccaactgataccactttcggtagagctaggaataacagcaggagtaggaatgagagttagcagccttgcagtttccctatcctattaccaatgcttgtccaaggattttatggaaagcttaggtgacattgcccaaaagtatcatcaccttacaaaatcagatagagtctttggcagtggtggctttgtaaaatagaaggggactggatctcctaaatgctgaagaaggtggcttatgtctttttcctagaggaagaatgctgtttttatgtcaaccaaacaggattagtaagggatgccacccaaaaactagccgattggtaccataagatatgacaacagctgtctgagtcatggggcgcctagtcaaaatgctaatttggggctcacatctccttcctctggccagtccactattaattattatacttgccttggcttttggatcatgtttgttaaatcttttaaccagatttatttcttcttgcctagagaccattttgcaggaatttagccaattcagaggtcttgttctccataatttggaattttccttcggatttgatcaagttggatagagttggtcaaacccaatgggaaaaagatgaaaacaacaagaaacagaaacaaacagcaacaacaacaacaacaaaaacaaagcaggaaaaaactgaaactcatcttccctgctggaaacgagctcaaactccagaaaggagttacctgccttccatcatcatggacgcaggaaaatttgccttccttgttggaagcaagtaaaactccaaaaaaggagttgcacagcaaaataaacttcagatctcaac

SEQ ID NO: 365921 - DNA, 3260 bp, Homo sapiens
  misc_feature (729)..(729): n is a, c, g, or t
cattcaccaccgcgtgacgcggcgccgggtcgccgccgcagattcgacacaaaacccggaaggaccccgccgaaggttttctccggttcgggagagagacggagtcccgctctgtcacgcaggctgccaggctggcgtacagtggcgcaatctcagctcgctgcaacctccacctcctgggttcaagcgattttcttgcctctgcctcctgagtagctgggattactggcacacaccaccatgcacagggagatatgagacatcaatcaatatatgtaagatgtacatcagtttcgtctggaaagatgggacaacatgaagcagggagggggctccctggtgacagttccttgttcaaaatgccaagaacctggatgactcatagtcaagaccctccaccagtaacatatattggcgagccagccaggagcttggaaccctcggtggacagtgcctaagcacagaggcaaccacaggtttctaacagggccactctctggtgaaactgaaaggtttctgtgtgaaagtgcctgaccaccactgcccagttcagaccactacaggaaacactccatttattccacctgacttcccacttggctgcatcctcaaccattgaaatgaatttgaccctgataatctaaggaggaaacatttgatattcttttgcaataatacttggccccagtattgtttggaatctggagtttgctgttgaatgggaaagcnggatgacgttgcatgtatccaggctttggtgctgctgtcctaagaagggtcaggcctggtcagcatatggtgctctcctttggtgctatttggctccagtgtctttggagtctgaggaggtttggcctttaaaaatcaaactgccaccggaactgctttaaaaatgtttggttcacagccttcactggattacctattggagcaaacaaagtgtaaccatgtaaaacctgtgagcttgtattgatatctcatggctagagttccaagcgaatgggtctcatgagatctgatggttttgaaaatgggagttgccctgcacaagctctccttttgcctgctgccatccgcataagatgtgatttgctcttccttgccttccaccatgattgtgaggccttcccagcatgtggaaatggtccagcctgcaataactgaagcccccagacctggaacctgaagatcccatcagccactaaacctgtgaacctgtagaagacctgaagtacctgtttaaaaggcagccaaaagataagtaaattcctatcaactttccttggtgtccttcttgtatatttactgtaagctggatataatagtagccatttttatatttttacaatttaattgctttcttccaaatggattgaatcacttcttttaaagtgttttaattaatttttatctatagaacaaaataacaaataagtattttttttttataccataatggtcacccacagcctgtgtatactaagaccatgcatactgataatcagctttattttacaaaagagtttcgctttacccctctggtaattaatggattctgggtatttattaaaaactttaacacaaagactgttaaataccaccagtccagctttggcaaggcactgttggctttgtttatctccatcatcatccaaacagactaccaatcctgatcccagcccaatcttgggcccttgaaaaaataacttaacatcctaactacaagggagaaactcctttcaaattaatgaacctggctgacttatatagccttaaaattatggaaatgacaagggttacaatgtcagaatgagcagtaaaccttccccagtcctatcagagcaaactttctggggttgcatcccctcagaaacccatttggggcccaatctcaatgcacatatcagtgcgcaaagcactaaaattccaggcaacactttgtattgagagaagccaaaattttggtcaggccctgggacatctaaagtcaccaatgtaactacaccatacagattaaaccctcacatgatcatgtaagctatgcagttacccaagctgcatcatttagaaaacctgtacagtttttatggaaaccatccctagtcaaggacactttaaatatatagtctaaataccgttaaggtaggcccactagctgtgttcacattttcccttggccaccttaccagggactttaataacttgggaaagtgaaaacaacaagctaacccacatgttcaccatagaaaacaattttgtcttgaaaaacaaggactctttttcccgtgtgggaccagttcctacttatgttttaccagccaattggactggaacctatacagttgtttatttagcccccgaaattaatatagctcccaacaaccaatccttcattatacttttaactgcaaccaccagacacaaatgagccatccaactgataccactttcggtagagctaggaataacagcaggagtaggaatgagagttagcagccttgcagtttccctatcctattaccaatgcttgtccaaggattttatggaaagcttaggtgacattgcccaaaagtatcatcaccttacaaaatcagatagagtctttggcagtggtggctttgtaaaatagaaggggactggatctcctaaatgctgaagaaggtggcttatgtctttttcctagaggaagaatgctgtttttatgtcaaccaaacaggattagtaagggatgccacccaaaaactagccgattggtaccataagatatgacaacagctgtctgagtcatggggcgcctagtcaaaatgctaatttggggctcacatctccttcctctggccagtccactattaattattatacttgccttggcttttggatcatgtttgttaaatcttttaaccagatttatttcttcttgcctagagaccattttgcaggaatttagccaattcagaggtcttgttctccataatttggaattttccttcggatttgatcaagttggatagagttggtcaaacccaatgggaaaaagatgaaaacaacaagaaacagaaacaaacagcaacaacaacaacaacaaaaacaaagcaggaaaaaactgaaactcatcttccctgctggaaacgagctcaaactccagaaaggagttacctgccttccatcatcatggacgcaggaaaatttgccttccttgttggaagcaagtaaaactccaaaaaaggagttgcacagcaaaataaacttcagatctcaac

SEQ ID NO: 365922 - DNA, 3212 bp, Homo sapiens
  misc_feature (9)..(9): n is a, c, g, or t
gagggcccntgccagaacctgaccatgctggcactctgattttggatttctagtctctagaactgtgaataagtacgtttctattgcgtaagccacccagtctatggtattttattatggcagcctgagctgactaatataggcttctagattggaaggggaaggaagtaaagagagagaattgatagggataaagaagaggcatgaagagacttggggtatctgctactgaagacatcagctctctatgacaaaacagcacagcatgtttggagtaagagaaagctgaagtctcaacaaacaaatagattcttaatgttctataccaccggacaaactgcagcccttttatacatatggagtactttctgggccagtcctgtggcccctttcaaatgtatggtgttgaaacgtagtaagtttatgtctttaaggtctgcccctcccttcttgcattatatcataaactcttctcttttttttttttttggagacggagtcccgctctgtcacgcaggctgccaggctggcgtacagtggcgcaatctcagctcgctgcaacctccacctcctgggttcaagcgattttcttgcctctgcctcctgagtagctgggattactggcacacaccaccatgcacagggagatatgagacatcaatcaatatatgtaagatgtacatcagtttcgtctggaaagatgggacaacatgaagcagggagggggctccctggtgacagttccttgttcaaaatgccaagaacctggatgactcatagtcaagaccctccaccagtaacatatattggcgagccagccaggagcttggaaccctcggtggacagtgcctaagcacagaggcaaccacaggtttctaacagggccactctctggtgaaactgaaaggtttctgtgtgaaagtgcctgaccaccactgcccagttcagcgaatgggtctcatgagatctgatggttttgaaaatgggagttgccctgcacaagctctccttttgcctgctgccatccgcataagatgtgatttgctcttccttgccttccaccatgattgtgaggccttcccagcatgtggaaatggtccagcctgcaataactgaagcccccagacctggaacctgaagatcccatcagccactaaacctgtgaacctgtagaagacctgaagtacctgtttaaaaggcagccaaaagataagtaaattcctatcaactttccttggtgtccttcttgtatatttactgtaagctggatataatagtagccatttttatatttttacaatttaattgctttcttccaaatggattgaatcacttcttttaaagtgttttaattaatttttatctatagaacaaaataacaaataagtattttttttttataccataatggtcacccacagcctgtgtatactaagaccatgcatactgataatcagctttattttacaaaagagtttcgctttacccctctggtaattaatggattctgggtatttattaaaaactttaacacaaagactgttaaataccaccagtccagctttggcaaggcactgttggctttgtttatctccatcatcatccaaacagactaccaatcctgatcccagcccaatcttgggcccttgaaaaaataacttaacatcctaactacaagggagaaactcctttcaaattaatgaacctggctgacttatatagccttaaaattatggaaatgacaagggttacaatgtcagaatgagcagtaaaccttccccagtcctatcagagcaaactttctggggttgcatcccctcagaaacccatttggggcccaatctcaatgcacatatcagtgcgcaaagcactaaaattccaggcaacactttgtattgagagaagccaaaattttggtcaggccctgggacatctaaagtcaccaatgtaactacaccatacagattaaaccctcacatgatcatgtaagctatgcagttacccaagctgcatcatttagaaaacctgtacagtttttatggaaaccatccctagtcaaggacactttaaatatatagtctaaataccgttaaggtaggcccactagctgtgttcacattttcccttggccaccttaccagggactttaataacttgggaaagtgaaaacaacaagctaacccacatgttcaccatagaaaacaattttgtcttgaaaaacaaggactctttttcccgtgtgggaccagttcctacttatgttttaccagccaattggactggaacctatacagttgtttatttagcccccgaaattaatatagctcccaacaaccaatccttcattatacttttaactgcaaccaccagacacaaatgagccatccaactgataccactttcggtagagctaggaataacagcaggagtaggaatgagagttagcagccttgcagtttccctatcctattaccaatgcttgtccaaggattttatggaaagcttaggtgacattgcccaaaagtatcatcaccttacaaaatcagatagagtctttggcagtggtggctttgtaaaatagaaggggactggatctcctaaatgctgaagaaggtggcttatgtctttttcctagaggaagaatgctgtttttatgtcaaccaaacaggattagtaagggatgccacccaaaaactagccgattggtaccataagatatgacaacagctgtctgagtcatggggcgcctagtcaaaatgctaatttggggctcacatctccttcctctggccagtccactattaattattatacttgccttggcttttggatcatgtttgttaaatcttttaaccagatttatttcttcttgcctagagaccattttgcaggaatttagccaattcagaggtcttgttctccataatttggaattttccttcggatttgatcaagttggatagagttggtcaaacccaatgggaaaaagatgaaaacaacaagaaacagaaacaaacagcaacaacaacaacaacaaaaacaaagcaggaaaaaactgaaactcatcttccctgctggaaacgagctcaaactccagaaaggagttacctgccttccatcatcatggacgcaggaaaatttgccttccttgttggaagcaagtaaaactccaaaaaaggagttgcacagcaaaataaacttcagatctcaac

SEQ ID NO: 365923 - DNA, 2449 bp, Homo sapiens
cattcaccaccgcgtgacgcggcgccgggtcgccgccgcagattcgacacaaaacccggaaggaccccgccgaaggttttctccggttcgggagagagacggagtcccgctctgtcacgcaggctgccaggctggcgtacagtggcgcaatctcagctcgctgcaacctccacctcctgggttcaagcgattttcttgcctctgcctcctgagtagctgggattactggcacacaccaccatgcacagttccttgttcaaaatgccaagaacctggatgactcatagtcaagaccctccaccagtaacatatattggcgagccagccaggagggtccagcctgcaataactgaagcccccagacctggaacctgaagatcccatcagccactaaacctgtgaacctgtagaagacctgaagtacctgtttaaaaggcagccaaaagataagtaaattcctatcaactttccttggtgtccttcttgtatatttactgtaagctggatataatagtagccatttttatatttttacaatttaattgctttcttccaaatggattgaatcacttcttttaaagtgttttaattaatttttatctatagaacaaaataacaaataagtattttttttttataccataatggtcacccacagcctgtgtatactaagaccatgcatactgataatcagctttattttacaaaagagtttcgctttacccctctggtaattaatggattctgggtatttattaaaaactttaacacaaagactgttaaataccaccagtccagctttggcaaggcactgttggctttgtttatctccatcatcatccaaacagactaccaatcctgatcccagcccaatcttgggcccttgaaaaaataacttaacatcctaactacaagggagaaactcctttcaaattaatgaacctggctgacttatatagccttaaaattatggaaatgacaagggttacaatgtcagaatgagcagtaaaccttccccagtcctatcagagcaaactttctggggttgcatcccctcagaaacccatttggggcccaatctcaatgcacatatcagtgcgcaaagcactaaaattccaggcaacactttgtattgagagaagccaaaattttggtcaggccctgggacatctaaagtcaccaatgtaactacaccatacagattaaaccctcacatgatcatgtaagctatgcagttacccaagctgcatcatttagaaaacctgtacagtttttatggaaaccatccctagtcaaggacactttaaatatatagtctaaataccgttaaggtaggcccactagctgtgttcacattttcccttggccaccttaccagggactttaataacttgggaaagtgaaaacaacaagctaacccacatgttcaccatagaaaacaattttgtcttgaaaaacaaggactctttttcccgtgtgggaccagttcctacttatgttttaccagccaattggactggaacctatacagttgtttatttagcccccgaaattaatatagctcccaacaaccaatccttcattatacttttaactgcaaccaccagacacaaatgagccatccaactgataccactttcggtagagctaggaataacagcaggagtaggaatgagagttagcagccttgcagtttccctatcctattaccaatgcttgtccaaggattttatggaaagcttaggtgacattgcccaaaagtatcatcaccttacaaaatcagatagagtctttggcagtggtggctttgtaaaatagaaggggactggatctcctaaatgctgaagaaggtggcttatgtctttttcctagaggaagaatgctgtttttatgtcaaccaaacaggattagtaagggatgccacccaaaaactagccgattggtaccataagatatgacaacagctgtctgagtcatggggcgcctagtcaaaatgctaatttggggctcacatctccttcctctggccagtccactattaattattatacttgccttggcttttggatcatgtttgttaaatcttttaaccagatttatttcttcttgcctagagaccattttgcaggaatttagccaattcagaggtcttgttctccataatttggaattttccttcggatttgatcaagttggatagagttggtcaaacccaatgggaaaaagatgaaaacaacaagaaacagaaacaaacagcaacaacaacaacaacaaaaacaaagcaggaaaaaactgaaactcatcttccctgctggaaacgagctcaaactccagaaaggagttacctgccttccatcatcatggacgcaggaaaatttgccttccttgttggaagcaagtaaaactccaaaaaaggagttgcacagcaaaataaacttcagatctcaac

SEQ ID NO: 365924 - DNA, 2689 bp, Homo sapiens
actttaaatgatggtgtctaatatctcagttttcagaagtaatctagataaactgttaaaaatgaaagacttaagtacatgtaaatgggatgaatgattaggtaaattttgtgtaatttaaaatcttaaaagtatttttgatgcccattggatatctcagtcatttccaattaagaaagggttatgatagggaggaatatgtttccaaaaattgtggaattattctcatctataaaatgctaatatctgatagtttaggattttttgcttcctaaggtttcactaaaatttaaggttactaagatgatatggtttggctttgcatccccacccaaatctcttcttataactcccataattaccgtgtgttgtggggagggatccagtgggtgagagatgattgaattatgctgttctcatgatagcgaatgggtctcatgagatctgatggttttgaaaatgggagttgccctgcacaagctctccttttgcctgctgccatccgcataagatgtgatttgctcttccttgccttccaccatgattgtgaggccttcccagcatgtggaaatggtccagcctgcaataactgaagcccccagacctggaacctgaagatcccatcagccactaaacctgtgaacctgtagaagacctgaagtacctgtttaaaaggcagccaaaagataagtaaattcctatcaactttccttggtgtccttcttgtatatttactgtaagctggatataatagtagccatttttatatttttacaatttaattgctttcttccaaatggattgaatcacttcttttaaagtgttttaattaatttttatctatagaacaaaataacaaataagtattttttttttataccataatggtcacccacagcctgtgtatactaagaccatgcatactgataatcagctttattttacaaaagagtttcgctttacccctctggtaattaatggattctgggtatttattaaaaactttaacacaaagactgttaaataccaccagtccagctttggcaaggcactgttggctttgtttatctccatcatcatccaaacagactaccaatcctgatcccagcccaatcttgggcccttgaaaaaataacttaacatcctaactacaagggagaaactcctttcaaattaatgaacctggctgacttatatagccttaaaattatggaaatgacaagggttacaatgtcagaatgagcagtaaaccttccccagtcctatcagagcaaactttctggggttgcatcccctcagaaacccatttggggcccaatctcaatgcacatatcagtgcgcaaagcactaaaattccaggcaacactttgtattgagagaagccaaaattttggtcaggccctgggacatctaaagtcaccaatgtaactacaccatacagattaaaccctcacatgatcatgtaagctatgcagttacccaagctgcatcatttagaaaacctgtacagtttttatggaaaccatccctagtcaaggacactttaaatatatagtctaaataccgttaaggtaggcccactagctgtgttcacattttcccttggccaccttaccagggactttaataacttgggaaagtgaaaacaacaagctaacccacatgttcaccatagaaaacaattttgtcttgaaaaacaaggactctttttcccgtgtgggaccagttcctacttatgttttaccagccaattggactggaacctatacagttgtttatttagcccccgaaattaatatagctcccaacaaccaatccttcattatacttttaactgcaaccaccagacacaaatgagccatccaactgataccactttcggtagagctaggaataacagcaggagtaggaatgagagttagcagccttgcagtttccctatcctattaccaatgcttgtccaaggattttatggaaagcttaggtgacattgcccaaaagtatcatcaccttacaaaatcagatagagtctttggcagtggtggctttgtaaaatagaaggggactggatctcctaaatgctgaagaaggtggcttatgtctttttcctagaggaagaatgctgtttttatgtcaaccaaacaggattagtaagggatgccacccaaaaactagccgattggtaccataagatatgacaacagctgtctgagtcatggggcgcctagtcaaaatgctaatttggggctcacatctccttcctctggccagtccactattaattattatacttgccttggcttttggatcatgtttgttaaatcttttaaccagatttatttcttcttgcctagagaccattttgcaggaatttagccaattcagaggtcttgttctccataatttggaattttccttcggatttgatcaagttggatagagttggtcaaacccaatgggaaaaagatgaaaacaacaagaaacagaaacaaacagcaacaacaacaacaacaaaaacaaagcaggaaaaaactgaaactcatcttccctgctggaaacgagctcaaactccagaaaggagttacctgccttccatcatcatggacgcaggaaaatttgccttccttgttggaagcaagtaaaactccaaaaaaggagttgcacagcaaaataaacttcagatctcaac

SEQ ID NO: 365925 - DNA, 5243 bp, Homo sapiens
  misc_feature (9)..(9): n is a, c, g, or t
  misc_feature (1155)..(1155): n is a, c, g, or t
gagggcccntgccagaacctgaccatgctggcactctgattttggatttctagtctctagaactgtgaataagtacgtttctattgcgtaagccacccagtctatggtattttattatggcagcctgagctgactaatataggcttctagattggaaggggaaggaagtaaagagagagaattgatagggataaagaagaggcatgaagagacttggggtatctgctactgaagacatcagctctctatgacaaaacagcacagcatgtttggagtaagagaaagctgaagtctcaacaaacaaatagattcttaatgttctataccaccggacaaactgcagcccttttatacatatggagtactttctgggccagtcctgtggcccctttcaaatgtatggtgttgaaacgtagtaagtttatgtctttaaggtctgcccctcccttcttgcattatatcataaactcttctcttttttttttttttggagacggagtcccgctctgtcacgcaggctgccaggctggcgtacagtggcgcaatctcagctcgctgcaacctccacctcctgggttcaagcgattttcttgcctctgcctcctgagtagctgggattactggcacacaccaccatgcacagggagatatgagacatcaatcaatatatgtaagatgtacatcagtttcgtctggaaagatgggacaacatgaagcagggagggggctccctggtgacagggaattttcttgtgggcaaattgtgagggagttccttgttcaaaatgccaagaacctggatgactcatagtcaagaccctccaccagtaacatatattggcgagccagccaggagcttggaaccctcggtggacagtgcctaagcacagaggcaaccacaggtttctaacagggccactctctggtgaaactgaaaggtttctgtgtgaaagtgcctgaccaccactgcccagttcagaccactacaggaaacactccatttattccacctgacttcccacttggctgcatcctcaaccattgaaatgaatttgaccctgataatctaaggaggaaacatttgatattcttttgcaataatacttggccccagtattgtttggaatctggagtttgctgttgaatgggaaagcnggatgacgttgcatgtatccaggctttggtgctgctgtcctaagaagggtcaggcctggtcagcatatggtgctctcctttggtgctatttggctccagtgtctttggagtctgaggaggtttggcctttaaaaatcaaactgccaccggaactgctttaaaaatgtttggttcacagccttcactggattacctattggagcaaacaaagtgtaaccatgtaaaacctgtgagcttgtattgatatctcatggctagagttccaagcgaatgggtctcatgagatctgatggttttgaaaatgggagttgccctgcacaagctctccttttgcctgctgccatccgcataagatgtgatttgctcttccttgccttccaccatgattgtgaggccttcccagcatgtggaaatggtccagcctgcaataactgaagcccccagacctggaacctgaagatcccatcagccactaaacctgtgaacctgtagaagacctgaagtacctgtttaaaaggcagccaaaagataagtaaattcctatcaactttccttggtgtccttcttgtatatttactgtaagctggatataatagtagccatttttatatttttacaatttaattgctttcttccaaatggattgaatcacttcttttaaagtgttttaattaatttttatctatagaacaaaataacaaataagtattttttttttataccataatggtcacccacagcctgtgtatactaagaccatgcatactgataatcagctttattttacaaaagagtttcgctttacccctctggtaattaatggattctgggtatttattaaaaactttaacacaaagactgttaaataccaccagtccagctttggcaaggcactgttggctttgtttatctccatcatcatccaaacagactaccaatcctgatcccagcccaatcttgggcccttgaaaaaataacttaacatcctaactacaagggagaaactcctttcaaattaatgaacctggctgacttatatagccttaaaattatggaaatgacaagggttacaatgtcagaatgagcagtaaaccttccccagtcctatcagagcaaactttctggggttgcatcccctcagaaacccatttggggcccaatctcaatgcacatatcagtgcgcaaagcactaaaattccaggcaacactttgtattgagagaagccaaaattttggtcaggccctgggacatctaaagtcaccaatgtaactacaccatacagattaaaccctcacatgatcatgtaagctatgcagttacccaagctgcatcatttagaaaacctgtacagtttttatggaaaccatccctagtcaaggacactttaaatatatagtctaaataccgttaaggtaggcccactagctgtgttcacattttcccttggccaccttaccagggactttaataacttgggaaagtgaaaacaacaagctaacccacatgttcaccatagaaaacaattttgtcttgaaaaacaaggactctttttcccgtgtgggaccagttcctacttatgttttaccagccaattggactggaacctatacagttgtttatttagcccccgaaattaatatagctcccaacaaccaatccttcattatacttttaactgcaaccaccagacacaaatgagccatccaactgataccactttcggtagagctaggaataacagcaggagtaggaatgagagttagcagccttgcagtttccctatcctattaccaatgcttgtccaaggattttatggaaagcttaggtgacattgcccaaaagtatcatcaccttacaaaatcagatagagtctttggcagtggtggctttgtaaaatagaaggggactggatctcctaaatgctgaagaaggtggcttatgtctttttcctagaggaagaatgctgtttttatgtcaaccaaacaggattagtaagggatgccacccaaaaactagccgattggtaccataagatatgacaacagctgtctgagtcatggggcgcctagtcaaaatgctaatttggggctcacatctccttcctctggccagtccactattaattattatacttgccttggcttttggatcatgtttgttaaatcttttaaccagatttatttcttcttgcctagagaccattatgataatgcagcagggccaccagtcagtttcagataatgatgtcaaccccggccaccaagaagtaaccttgtctccactagacagagcaggttgcaggaatttagccaattcagaggtcttgttctccataatttggaattttccttcggatttgatcaagttggatagagttggtcaaacccaatgggaaaaagatgaaaacaacaagaaacagaaacaaacagcaacaacaacaacaacaaaaacaatgcatttaattaaatgaagatgagctcatgctggagtagggtggactctgaacccagtgggacaagcgtccttattaagaagagggaaatctggacacacacagagcagagaccgccgtgtgaagatggaggcagagatcggagagatgctgccacacgccacaaatgcctggggctcccagaaactacacggagcctcccccagcggcttcagcaggagcatggctcggccaacactttgatcttggtcttccagcctccagaacgttttcctaaaattcccttttccactggtgtgtggtgcaagatgaggcacattttccatggatggtgaacagagggaggagccttttgatcacaaccaggtcaccccacttctaagccactgtgcctccagccccacaagactaaggagagagagcgcagcgtggtggagagtgagctgtgctgggaccattgtttccgtaacctcgttttctgtgtccagctgacacaccttcaaagtggcatcaggtcctaaactgtagcttgcaatgtgcctgtttccagaaaccaaggtgaaagtgcttttagacagtgttcccatgcaagagtcccttcccagcttttttctggaaatgcatgtttctctgaactctgagtcccaagaaaaatcacttgagacaccaagaaaatgggggaagtgctaaaattgtgtgggaattcaagcttaacaataaacatcaagacatttttgataaaaatgaatccactgacatcggggaggagcaagagaacagcacgctgacactgggtcagaggctaagaccgacatttctgggaaccactcccggaagggcacagaggagacgctttcagcctctcatcagccagcctggcctgtagctgctgcacgttatgagtgtgttcctggcatgactgcttctaacagcgaccatttcattaagtttttaagtgcctggtaattgcttggttatgaccggtgtctgctccatggcagcctcttcctgtttttgcccgaatgatgaaggaggaagtttacatcttgctccctggggacaggcagagacagtgtgtgcacttccatcctacagggaccagatctgaacagtctggagagaggagctgtggtggcagcagacagatctctgcttcaggggccaggtgtctagaagaaatgctgaggcagtgtcacgctggtgtctgtcctccttacagaatgcctgaacagttccattgactcaaagtgaagatcaaaagaaccaaatgacagcaatagccaagtgtaatcatcagtaaccctgtgttctatccacaggtaaaaaacaatcatcctcttcattatgggtttcaattttaaatgtaatacatttttagaaatgcctatttccttttataatctctttatataatctaggttattctggctcttaggtcttcatttagctactgaaaagatttgatctcaaatcaatgatctaaccacccatgaccatctcccacctctctccccgtacaccccccagcatgaattctgggaactcaggtaaaatgctttctggaaacctgcctgtattagtctgttgtcaagctgctaataaacacatacccgaaactgggtagtttataaagga

SEQ ID NO: 365926 - DNA, 5081 bp, Homo sapiens
  misc_feature (9)..(9): n is a, c, g, or t
  misc_feature (1155)..(1155): n is a, c, g, or t
gagggcccntgccagaacctgaccatgctggcactctgattttggatttctagtctctagaactgtgaataagtacgtttctattgcgtaagccacccagtctatggtattttattatggcagcctgagctgactaatataggcttctagattggaaggggaaggaagtaaagagagagaattgatagggataaagaagaggcatgaagagacttggggtatctgctactgaagacatcagctctctatgacaaaacagcacagcatgtttggagtaagagaaagctgaagtctcaacaaacaaatagattcttaatgttctataccaccggacaaactgcagcccttttatacatatggagtactttctgggccagtcctgtggcccctttcaaatgtatggtgttgaaacgtagtaagtttatgtctttaaggtctgcccctcccttcttgcattatatcataaactcttctcttttttttttttttggagacggagtcccgctctgtcacgcaggctgccaggctggcgtacagtggcgcaatctcagctcgctgcaacctccacctcctgggttcaagcgattttcttgcctctgcctcctgagtagctgggattactggcacacaccaccatgcacagggagatatgagacatcaatcaatatatgtaagatgtacatcagtttcgtctggaaagatgggacaacatgaagcagggagggggctccctggtgacagggaattttcttgtgggcaaattgtgagggagttccttgttcaaaatgccaagaacctggatgactcatagtcaagaccctccaccagtaacatatattggcgagccagccaggagcttggaaccctcggtggacagtgcctaagcacagaggcaaccacaggtttctaacagggccactctctggtgaaactgaaaggtttctgtgtgaaagtgcctgaccaccactgcccagttcagaccactacaggaaacactccatttattccacctgacttcccacttggctgcatcctcaaccattgaaatgaatttgaccctgataatctaaggaggaaacatttgatattcttttgcaataatacttggccccagtattgtttggaatctggagtttgctgttgaatgggaaagcnggatgacgttgcatgtatccaggctttggtgctgctgtcctaagaagggtcaggcctggtcagcatatggtgctctcctttggtgctatttggctccagtgtctttggagtctgaggaggtttggcctttaaaaatcaaactgccaccggaactgctttaaaaatgtttggttcacagccttcactggattacctattggagcaaacaaagtgtaaccatgtaaaacctgtgagcttgtattgatatctcatggctagagttccaagcgaatgggtctcatgagatctgatggttttgaaaatgggagttgccctgcacaagctctccttttgcctgctgccatccgcataagatgtgatttgctcttccttgccttccaccatgattgtgaggccttcccagcatgtggaaatggtccagcctgcaataactgaagcccccagacctggaacctgaagatcccatcagccactaaacctgtgaacctgtagaagacctgaagtacctgtttaaaaggcagccaaaagataagtaaattcctatcaactttccttggtgtccttcttgtatatttactgtaagctggatataatagtagccatttttatatttttacaatttaattgctttcttccaaatggattgaatcacttcttttaaagtgttttaattaatttttatctatagaacaaaataacaaataagtattttttttttataccataatggtcacccacagcctgtgtatactaagaccatgcatactgataatcagctttattttacaaaagagtttcgctttacccctctggtaattaatggattctgggtatttattaaaaactttaacacaaagactgttaaataccaccagtccagctttggcaaggcactgttggctttgtttatctccatcatcatccaaacagactaccaatcctgatcccagcccaatcttgggcccttgaaaaaataacttaacatcctaactacaagggagaaactcctttcaaattaatgaacctggctgacttatatagccttaaaattatggaaatgacaagggttacaatgtcagaatgagcagtaaaccttccccagtcctatcagagcaaactttctggggttgcatcccctcagaaacccatttggggcccaatctcaatgcacatatcagtgcgcaaagcactaaaattccaggcaacactttgtattgagagaagccaaaattttggtcaggccctgggacatctaaagtcaccaatgtaactacaccatacagattaaaccctcacatgatcatgtaagctatgcagttacccaagctgcatcatttagaaaacctgtacagtttttatggaaaccatccctagtcaaggacactttaaatatatagtctaaataccgttaaggtaggcccactagctgtgttcacattttcccttggccaccttaccagggactttaataacttgggaaagtgaaaacaacaagctaacccacatgttcaccatagaaaacaattttgtcttgaaaaacaaggactctttttcccgtgtgggaccagttcctacttatgttttaccagccaattggactggaacctatacagttgtttatttagcccccgaaattaatatagctcccaacaaccaatccttcattatacttttaactgcaaccaccagacacaaatgagccatccaactgataccactttcggtagagctaggaataacagcaggagtaggaatgagagttagcagccttgcagtttccctatcctattaccaatgcttgtccaaggattttatggaaagcttaggtgacattgcccaaaagtatcatcaccttacaaaatcagatagagtctttggcagtggtggctttgtaaaatagaaggggactggatctcctaaatgctgaagaaggtggcttatgtctttttcctagaggaagaatgctgtttttatgtcaaccaaacaggattagtaagggatgccacccaaaaactagccgattggtaccataagatatgacaacagctgtctgagtcatggggcgcctagtcaaaatgctaatttggggctcacatctccttcctctggccagtccactattaattattatacttgccttggcttttggatcatgtttgttaaatcttttaaccagatttatttcttcttgcctagagaccattatgataatgcagcagggccaccagtcagtttcagataatgatgtcaaccccggccaccaagaagtaaccttgtctccactagacagagcaggttgcaggaatttagccaattcagaggtcttgttctccataatttggaattttccttcggatttgatcaagttggatagagttggtcaaacccaatgggaaaaagatgaaaacaacaagaaacagaaacaaacagcaacaacaacaacaacaaaaacaatgcatttaattaaatgaagatgagctcatgctggagtagggtggactctgaacccagtgggacaagcgtccttattaagaagagggaaatctggacacacacagagcagagaccgccgtgtgaagatggaggcagagatcggagagatgctgccacacgccacaaatgcctggggctcccagaaactacacggagcctcccccagcggcttcagcaggagcatggctcggccaacactttgatcttggtcttccagcctccagaacgttttcctaaaattcccttttccactggtgtgtggtgcaagatgaggcacattttccatggatggtgaacagagggaggagccttttgatcacaaccaggtcaccccacttctaagccactgtgcctccagccccacaagactaaggagagagagcgcagcgtggtggagagtgagctgtgctgggaccattgtttccgtaacctcgttttctgtgtccagctgacacaccttcaaagtggcatcaggtcctaaactgtagcttgcaatgtgcctgtttccagaaaccaaggtgaaagtgcttttagacagtgttcccatgcaagagtcccttcccagcttttttctggaaatgcatgtttctctgaactctgagtcccaagaaaaatcacttgagacaccaagaaaatgggggaagtgctaaaattgtgtgggaattcaagcttaacaataaacatcaagacatttttgataaaaatgaatccactgacatcggggaggagcaagagaacagcacgctgacactgggtcagaggctaagaccgacatttctgggaaccactcccggaagggcacagaggagacgctttcagcctctcatcagccagcctggcctgtagctgctgcacgttatgagtgtgttcctggcatgactgcttctaacagcgaccatttcattaagtttttaagtgcctggtaattgcttggttatgaccggtgtctgctccatggcagcctcttcctgaagaaatgctgaggcagtgtcacgctggtgtctgtcctccttacagaatgcctgaacagttccattgactcaaagtgaagatcaaaagaaccaaatgacagcaatagccaagtgtaatcatcagtaaccctgtgttctatccacaggtaaaaaacaatcatcctcttcattatgggtttcaattttaaatgtaatacatttttagaaatgcctatttccttttataatctctttatataatctaggttattctggctcttaggtcttcatttagctactgaaaagatttgatctcaaatcaatgatctaaccacccatgaccatctcccacctctctccccgtacaccccccagcatgaattctgggaactcaggtaaaatgctttctggaaacctgcctgtattagtctgttgtcaagctgctaataaacacatacccgaaactgggtagtttataaagga

SEQ ID NO: 365927 - DNA, 5225 bp, Homo sapiens
  misc_feature (9)..(9): n is a, c, g, or t
  misc_feature (1155)..(1155): n is a, c, g, or t
gagggcccntgccagaacctgaccatgctggcactctgattttggatttctagtctctagaactgtgaataagtacgtttctattgcgtaagccacccagtctatggtattttattatggcagcctgagctgactaatataggcttctagattggaaggggaaggaagtaaagagagagaattgatagggataaagaagaggcatgaagagacttggggtatctgctactgaagacatcagctctctatgacaaaacagcacagcatgtttggagtaagagaaagctgaagtctcaacaaacaaatagattcttaatgttctataccaccggacaaactgcagcccttttatacatatggagtactttctgggccagtcctgtggcccctttcaaatgtatggtgttgaaacgtagtaagtttatgtctttaaggtctgcccctcccttcttgcattatatcataaactcttctcttttttttttttttggagacggagtcccgctctgtcacgcaggctgccaggctggcgtacagtggcgcaatctcagctcgctgcaacctccacctcctgggttcaagcgattttcttgcctctgcctcctgagtagctgggattactggcacacaccaccatgcacagggagatatgagacatcaatcaatatatgtaagatgtacatcagtttcgtctggaaagatgggacaacatgaagcagggagggggctccctggtgacagggaattttcttgtgggcaaattgtgagggagttccttgttcaaaatgccaagaacctggatgactcatagtcaagaccctccaccagtaacatatattggcgagccagccaggagcttggaaccctcggtggacagtgcctaagcacagaggcaaccacaggtttctaacagggccactctctggtgaaactgaaaggtttctgtgtgaaagtgcctgaccaccactgcccagttcagaccactacaggaaacactccatttattccacctgacttcccacttggctgcatcctcaaccattgaaatgaatttgaccctgataatctaaggaggaaacatttgatattcttttgcaataatacttggccccagtattgtttggaatctggagtttgctgttgaatgggaaagcnggatgacgttgcatgtatccaggctttggtgctgctgtcctaagaagggtcaggcctggtcagcatatggtgctctcctttggtgctatttggctccagtgtctttggagtctgaggaggtttggcctttaaaaatcaaactgccaccggaactgctttaaaaatgtttggttcacagccttcactggattacctattggagcaaacaaagtgtaaccatgtaaaacctgtgagcttgtattgatatctcatggctagagttccaagcgaatgggtctcatgagatctgatggttttgaaaatgggagttgccctgcacaagctctccttttgcctgctgccatccgcataagatgtgatttgctcttccttgccttccaccatgattgtgaggccttcccagcatgtggaaatggtccagcctgcaataactgaagcccccagacctggaacctgaagatcccatcagccactaaacctgtgaacctgtagaagacctgaagtacctgtttaaaaggcagccaaaagataagtaaattcctatcaactttccttggtgtccttcttgtatatttactgtaagctggatataatagtagccatttttatatttttacaatttaattgctttcttccaaatggattgaatcacttcttttaaagtgttttaattaatttttatctatagaacaaaataacaaataagtattttttttttataccataatggtcacccacagcctgtgtatactaagaccatgcatactgataatcagctttattttacaaaagagtttcgctttacccctctggtaattaatggattctgggtatttattaaaaactttaacacaaagactgttaaataccaccagtccagctttggcaaggcactgttggctttgtttatctccatcatcatccaaacagactaccaatcctgatcccagcccaatcttgggcccttgaaaaaataacttaacatcctaactacaagggagaaactcctttcaaattaatgaacctggctgacttatatagccttaaaattatggaaatgacaagggttacaatgtcagaatgagcagtaaaccttccccagtcctatcagagcaaactttctggggttgcatcccctcagaaacccatttggggcccaatctcaatgcacatatcagtgcgcaaagcactaaaattccaggcaacactttgtattgagagaagccaaaattttggtcaggccctgggacatctaaagtcaccaatgtaactacaccatacagattaaaccctcacatgatcatgtaagctatgcagttacccaagctgcatcatttagaaaacctgtacagtttttatggaaaccatccctagtcaaggacactttaaatatatagtctaaataccgttaaggtaggcccactagctgtgttcacattttcccttggccaccttaccagggactttaataacttgggaaagtgaaaacaacaagctaacccacatgttcaccatagaaaacaattttgtcttgaaaaacaaggactctttttcccgtgtgggaccagttcctacttatgttttaccagccaattggactggaacctatacagttgtttatttagcccccgaaattaatatagctcccaacaaccaatccttcattatacttttaactgcaaccaccagacacaaatgagccatccaactgataccactttcggtagagctaggaataacagcaggagtaggaatgagagttagcagccttgcagtttccctatcctattaccaatgcttgtccaaggattttatggaaagcttaggtgacattgcccaaaagtatcatcaccttacaaaatcagatagagtctttggcagtggtggctttgtaaaatagaaggggactggatctcctaaatgctgaagaaggtggcttatgtctttttcctagaggaagaatgctgtttttatgtcaaccaaacaggattagtaagggatgccacccaaaaactagccgattggtaccataagatatgacaacagctgtctgagtcatggggcgcctagtcaaaatgctaatttggggctcacatctccttcctctggccagtccactattaattattatacttgccttggcttttggatcatgtttgttaaatcttttaaccagatttatttcttcttgcctagagaccattatgataatgcagcagggccaccagtcagtttcagataatgatgtcaaccccggccaccaagaagtaaccttgtctccactagacagagcaggttgcaggaatttagccaattcagaggtcttgttctccataatttggaattttccttcggatttgatcaagttggatagagttggtcaaacccaatgggaaaaagatgaaaacaacaagaaacagaaacaaacagcaacaacaacaacaacaaaaacaatgcatttaattaaatgaagatgagctcatgctggagtagggtggactctgaacccagtgggacaagcgtccttattaagaagagggaaatctggacacacacagagcagagaccgccgtgtgaagatggaggcagagatcggagagatgctgccacacgccacaaatgcctggggctcccagaaactacacggagcctcccccagcggcttcagcaggagcatggctcggccaacactttgatcttggtcttccagcctccagaacgttttcctaaaattcccttttccactggtgtgtggtgcaagatgaggcacattttccatggatggtgaacagagggaggagccttttgatcacaaccaggtcaccccacttctaagccactgtgcctccagccccacaagactaaggagagagagcgcagcgtggtggagagtgagctgtgctgggaccattgtttccgtaacctcgttttctgtgtccagctgacacaccttcaaagtggcatcaggtcctaaactgtagcttgcaatgtgcctgtttccagaaaccaaggtgaaagtgcttttagagtcccttcccagcttttttctggaaatgcatgtttctctgaactctgagtcccaagaaaaatcacttgagacaccaagaaaatgggggaagtgctaaaattgtgtgggaattcaagcttaacaataaacatcaagacatttttgataaaaatgaatccactgacatcggggaggagcaagagaacagcacgctgacactgggtcagaggctaagaccgacatttctgggaaccactcccggaagggcacagaggagacgctttcagcctctcatcagccagcctggcctgtagctgctgcacgttatgagtgtgttcctggcatgactgcttctaacagcgaccatttcattaagtttttaagtgcctggtaattgcttggttatgaccggtgtctgctccatggcagcctcttcctgtttttgcccgaatgatgaaggaggaagtttacatcttgctccctggggacaggcagagacagtgtgtgcacttccatcctacagggaccagatctgaacagtctggagagaggagctgtggtggcagcagacagatctctgcttcaggggccaggtgtctagaagaaatgctgaggcagtgtcacgctggtgtctgtcctccttacagaatgcctgaacagttccattgactcaaagtgaagatcaaaagaaccaaatgacagcaatagccaagtgtaatcatcagtaaccctgtgttctatccacaggtaaaaaacaatcatcctcttcattatgggtttcaattttaaatgtaatacatttttagaaatgcctatttccttttataatctctttatataatctaggttattctggctcttaggtcttcatttagctactgaaaagatttgatctcaaatcaatgatctaaccacccatgaccatctcccacctctctccccgtacaccccccagcatgaattctgggaactcaggtaaaatgctttctggaaacctgcctgtattagtctgttgtcaagctgctaataaacacatacccgaaactgggtagtttataaagga

SEQ ID NO: 365928 - DNA, 4597 bp, Homo sapiens
  misc_feature (9)..(9): n is a, c, g, or t
  misc_feature (1155)..(1155): n is a, c, g, or t
gagggcccntgccagaacctgaccatgctggcactctgattttggatttctagtctctagaactgtgaataagtacgtttctattgcgtaagccacccagtctatggtattttattatggcagcctgagctgactaatataggcttctagattggaaggggaaggaagtaaagagagagaattgatagggataaagaagaggcatgaagagacttggggtatctgctactgaagacatcagctctctatgacaaaacagcacagcatgtttggagtaagagaaagctgaagtctcaacaaacaaatagattcttaatgttctataccaccggacaaactgcagcccttttatacatatggagtactttctgggccagtcctgtggcccctttcaaatgtatggtgttgaaacgtagtaagtttatgtctttaaggtctgcccctcccttcttgcattatatcataaactcttctcttttttttttttttggagacggagtcccgctctgtcacgcaggctgccaggctggcgtacagtggcgcaatctcagctcgctgcaacctccacctcctgggttcaagcgattttcttgcctctgcctcctgagtagctgggattactggcacacaccaccatgcacagggagatatgagacatcaatcaatatatgtaagatgtacatcagtttcgtctggaaagatgggacaacatgaagcagggagggggctccctggtgacagggaattttcttgtgggcaaattgtgagggagttccttgttcaaaatgccaagaacctggatgactcatagtcaagaccctccaccagtaacatatattggcgagccagccaggagcttggaaccctcggtggacagtgcctaagcacagaggcaaccacaggtttctaacagggccactctctggtgaaactgaaaggtttctgtgtgaaagtgcctgaccaccactgcccagttcagaccactacaggaaacactccatttattccacctgacttcccacttggctgcatcctcaaccattgaaatgaatttgaccctgataatctaaggaggaaacatttgatattcttttgcaataatacttggccccagtattgtttggaatctggagtttgctgttgaatgggaaagcnggatgacgttgcatgtatccaggctttggtgctgctgtcctaagaagggtcaggcctggtcagcatatggtgctctcctttggtgctatttggctccagtgtctttggagtctgaggaggtttggcctttaaaaatcaaactgccaccggaactgctttaaaaatgtttggttcacagccttcactggattacctattggagcaaacaaagtgtaaccatgtaaaacctgtgagcttgtattgatatctcatggctagagttccaagcgaatgggtctcatgagatctgatggttttgaaaatgggagttgccctgcacaagctctccttttgcctgctgccatccgcataagatgtgatttgctcttccttgccttccaccatgattgtgaggccttcccagcatgtggaaatggtccagcctgcaataactgaagcccccagacctggaacctgaagatcccatcagccactaaacctgtgaacctgtagaagacctgaagtacctgtttaaaaggcagccaaaagataagtaaattcctatcaactttccttggtgtccttcttgtatatttactgtaagctggatataatagtagccatttttatatttttacaatttaattgctttcttccaaatggattgaatcacttcttttaaagtgttttaattaatttttatctatagaacaaaataacaaataagtattttttttttataccataatggtcacccacagcctgtgtatactaagaccatgcatactgataatcagctttattttacaaaagagtttcgctttacccctctggtaattaatggattctgggtatttattaaaaactttaacacaaagactgttaaataccaccagtccagctttggcaaggcactgttggctttgtttatctccatcatcatccaaacagactaccaatcctgatcccagcccaatcttgggcccttgaaaaaataacttaacatcctaactacaagggagaaactcctttcaaattaatgaacctggctgacttatatagccttaaaattatggaaatgacaagggttacaatgtcagaatgagcagtaaaccttccccagtcctatcagagcaaactttctggggttgcatcccctcagaaacccatttggggcccaatctcaatgcacatatcagtgcgcaaagcactaaaattccaggcaacactttgtattgagagaagccaaaattttggtcaggccctgggacatctaaagtcaccaatgtaactacaccatacagattaaaccctcacatgatcatgtaagctatgcagttacccaagctgcatcatttagaaaacctgtacagtttttatggaaaccatccctagtcaaggacactttaaatatatagtctaaataccgttaaggtaggcccactagctgtgttcacattttcccttggccaccttaccagggactttaataacttgggaaagtgaaaacaacaagctaacccacatgttcaccatagaaaacaattttgtcttgaaaaacaaggactctttttcccgtgtgggaccagttcctacttatgttttaccagccaattggactggaacctatacagttgtttatttagcccccgaaattaatatagctcccaacaaccaatccttcattatacttttaactgcaaccaccagacacaaatgagccatccaactgataccactttcggtagagctaggaataacagcaggagtaggaatgagagttagcagccttgcagtttccctatcctattaccaatgcttgtccaaggattttatggaaagcttaggtgacattgcccaaaagtatcatcaccttacaaaatcagatagagtctttggcagtggtggctttgtaaaatagaaggggactggatctcctaaatgctgaagaaggtggcttatgtctttttcctagaggaagaatgctgtttttatgtcaaccaaacaggattagtaagggatgccacccaaaaactagccgattggtaccataagatatgacaacagctgtctgagtcatggggcgcctagtcaaaatgctaatttggggctcacatctccttcctctggccagtccactattaattattatacttgccttggcttttggatcatgtttgttaaatcttttaaccagatttatttcttcttgcctagagaccattatgataatgcagcagggccaccagtcagtttcagataatgatgtcaaccccggccaccaagaagtaaccttgtctccactagacagagcaggttgcaggaatttagccaattcagaggtcttgttctccataatttggaattttccttcggatttgatcaagttggatagagttggtcaaacccaatgggaaaaagatgaaaacaacaagaaacagaaacaaacagcaacaacaacaacaacaaaaacaatgcatttaattaaatgaagatgagctcatgctggagtagggtggactctgaacccagtgggacaagcgtccttattaagaagagggaaatctggacacacacagagcagagaccgccgtgtgaagatggaggcagagatcggagagatgctgccacacgccacaaatgcctggggctcccagaaactacacggagcctcccccagcggcttcagcaggagcatggctcggccaacactttgatcttggtcttccagcctccagaacgttttcctaaaattcccttttccactggtgtgtggtgcaagatgaggcacattttccatggatggtgaacagagggaggagccttttgatcacaaccaggtcaccccacttctaagccactgtgcctccagccccacaagactaaggagagagagcgcagcgtggtggagagtgagctgtgctgggaccattgtttccgtaacctcgttttctgtgtccagctgacacaccttcaaagtggcatcaggtcctaaactgtagcttgcaatgtgcctgtttccagaaaccaaggtgaaagtgcttttagacagtgttcccatgcaagagtcccttcccagcttttttctggaaatgcatgtttctctgaactctgagtcccaagaaaaatcacttgagacaccaagaaaatgggggaagtgctaaaattgtgtgggaattcaagcttaacaataaacatcaagacatttttgataaaaatgaatccactgacatcggggaggagcaagagaacagcacgctgacactgggtcagaggctaagaccgacatttctgggaaccactcccggaagggcacagaggagacgctttcagcctctcatcagccagcctggcctgtagctgctgcacgttatgagtgtgttcctggcatgactgcttctaacaacagtgagttttctggcaaatcaaataaatactaataagtctgtatgcacattatact

SEQ ID NO: 365929 - DNA, 4885 bp, Homo sapiens
  misc_feature (9)..(9): n is a, c, g, or t
  misc_feature (1155)..(1155): n is a, c, g, or t
gagggcccntgccagaacctgaccatgctggcactctgattttggatttctagtctctagaactgtgaataagtacgtttctattgcgtaagccacccagtctatggtattttattatggcagcctgagctgactaatataggcttctagattggaaggggaaggaagtaaagagagagaattgatagggataaagaagaggcatgaagagacttggggtatctgctactgaagacatcagctctctatgacaaaacagcacagcatgtttggagtaagagaaagctgaagtctcaacaaacaaatagattcttaatgttctataccaccggacaaactgcagcccttttatacatatggagtactttctgggccagtcctgtggcccctttcaaatgtatggtgttgaaacgtagtaagtttatgtctttaaggtctgcccctcccttcttgcattatatcataaactcttctcttttttttttttttggagacggagtcccgctctgtcacgcaggctgccaggctggcgtacagtggcgcaatctcagctcgctgcaacctccacctcctgggttcaagcgattttcttgcctctgcctcctgagtagctgggattactggcacacaccaccatgcacagggagatatgagacatcaatcaatatatgtaagatgtacatcagtttcgtctggaaagatgggacaacatgaagcagggagggggctccctggtgacagggaattttcttgtgggcaaattgtgagggagttccttgttcaaaatgccaagaacctggatgactcatagtcaagaccctccaccagtaacatatattggcgagccagccaggagcttggaaccctcggtggacagtgcctaagcacagaggcaaccacaggtttctaacagggccactctctggtgaaactgaaaggtttctgtgtgaaagtgcctgaccaccactgcccagttcagaccactacaggaaacactccatttattccacctgacttcccacttggctgcatcctcaaccattgaaatgaatttgaccctgataatctaaggaggaaacatttgatattcttttgcaataatacttggccccagtattgtttggaatctggagtttgctgttgaatgggaaagcnggatgacgttgcatgtatccaggctttggtgctgctgtcctaagaagggtcaggcctggtcagcatatggtgctctcctttggtgctatttggctccagtgtctttggagtctgaggaggtttggcctttaaaaatcaaactgccaccggaactgctttaaaaatgtttggttcacagccttcactggattacctattggagcaaacaaagtgtaaccatgtaaaacctgtgagcttgtattgatatctcatggctagagttccaagcgaatgggtctcatgagatctgatggttttgaaaatgggagttgccctgcacaagctctccttttgcctgctgccatccgcataagatgtgatttgctcttccttgccttccaccatgattgtgaggccttcccagcatgtggaaatggtccagcctgcaataactgaagcccccagacctggaacctgaagatcccatcagccactaaacctgtgaacctgtagaagacctgaagtacctgtttaaaaggcagccaaaagataagtaaattcctatcaactttccttggtgtccttcttgtatatttactgtaagctggatataatagtagccatttttatatttttacaatttaattgctttcttccaaatggattgaatcacttcttttaaagtgttttaattaatttttatctatagaacaaaataacaaataagtattttttttttataccataatggtcacccacagcctgtgtatactaagaccatgcatactgataatcagctttattttacaaaagagtttcgctttacccctctggtaattaatggattctgggtatttattaaaaactttaacacaaagactgttaaataccaccagtccagctttggcaaggcactgttggctttgtttatctccatcatcatccaaacagactaccaatcctgatcccagcccaatcttgggcccttgaaaaaataacttaacatcctaactacaagggagaaactcctttcaaattaatgaacctggctgacttatatagccttaaaattatggaaatgacaagggttacaatgtcagaatgagcagtaaaccttccccagtcctatcagagcaaactttctggggttgcatcccctcagaaacccatttggggcccaatctcaatgcacatatcagtgcgcaaagcactaaaattccaggcaacactttgtattgagagaagccaaaattttggtcaggccctgggacatctaaagtcaccaatgtaactacaccatacagattaaaccctcacatgatcatgtaagctatgcagttacccaagctgcatcatttagaaaacctgtacagtttttatggaaaccatccctagtcaaggacactttaaatatatagtctaaataccgttaaggtaggcccactagctgtgttcacattttcccttggccaccttaccagggactttaataacttgggaaagtgaaaacaacaagctaacccacatgttcaccatagaaaacaattttgtcttgaaaaacaaggactctttttcccgtgtgggaccagttcctacttatgttttaccagccaattggactggaacctatacagttgtttatttagcccccgaaattaatatagctcccaacaaccaatccttcattatacttttaactgcaaccaccagacacaaatgagccatccaactgataccactttcggtagagctaggaataacagcaggagtaggaatgagagttagcagccttgcagtttccctatcctattaccaatgcttgtccaaggattttatggaaagcttaggtgacattgcccaaaagtatcatcaccttacaaaatcagatagagtctttggcagtggtggctttgtaaaatagaaggggactggatctcctaaatgctgaagaaggtggcttatgtctttttcctagaggaagaatgctgtttttatgtcaaccaaacaggattagtaagggatgccacccaaaaactagccgattggtaccataagatatgacaacagctgtctgagtcatggggcgcctagtcaaaatgctaatttggggctcacatctccttcctctggccagtccactattaattattatacttgccttggcttttggatcatgtttgttaaatcttttaaccagatttatttcttcttgcctagagaccattatgataatgcagcagggccaccagtcagtttcagataatgatgtcaaccccggccaccaagaagtaaccttgtctccactagacagagcaggttgcaggaatttagccaattcagaggtcttgttctccataatttggaattttccttcggatttgatcaagttggatagagttggtcaaacccaatgggaaaaagatgaaaacaacaagaaacagaaacaaacagcaacaacaacaacaacaaaaacaatgcatttaattaaatgaagatgagctcatgctggagtagggtggactctgaacccagtgggacaagcgtccttattaagaagagggaaatctggacacacacagagcagagaccgccgtgtgaagatggaggcagagatcggagagatgctgccacacgccacaaatgcctggggctcccagaaactacacggagcctcccccagcggcttcagcaggagcatggctcggccaacactttgatcttggtcttccagcctccagaacgttttcctaaaattcccttttccactggtgtgtggtgcaagatgaggcacattttccatggatggtgaacagagggaggagccttttgatcacaaccaggtcaccccacttctaagccactgtgcctccagccccacaagactaaggagagagagcgcagcgtggtggagagtgagctgtgctgggaccattgtttccgtaacctcgttttctgtgtccagctgacacaccttcaaagtggcatcaggtcctaaactgtagcttgcaatgtgcctgtttccagaaaccaaggtgaaagtgcttttagacagtgttcccatgcaagagtcccttcccagcttttttctggaaatgcatgtttctctgaactctgagtcccaagaaaaatcacttgagacaccaagaaaatgggggaagtgctaaaattgtgtgggaattcaagcttaacaataaacatcaagacatttttgataaaaatgaatccactgacatcggggaggagcaagagaacagcacgctgacactgggtcagaggctaagaccgacatttctgggaaccactcccggaagggcacagaggagacgctttcagcctctcatcagccagcctggcctgtagctgctgcacgttatgagtgtgttcctggcatgactgcttctaacaaagaaatgctgaggcagtgtcacgctggtgtctgtcctccttacagaatgcctgaacagttccattgactcaaagtgaagatcaaaagaaccaaatgacagcaatagccaagtgtaatcatcagtaaccctgtgttctatccacaggtcttcatttagctactgaaaagatttgatctcaaatcaatgatctaaccacccatgaccatctcccacctctctccccgtacaccccccagcatgaattctgggaactcaggtaaaatgctttctggaaacctgcctgtattagtctgttgtcaagctgctaataaacacatacccgaaactgggtagtttataaagga

SEQ ID NO: 365930 - DNA, 5001 bp, Homo sapiens
  misc_feature (9)..(9): n is a, c, g, or t
  misc_feature (1155)..(1155): n is a, c, g, or t
gagggcccntgccagaacctgaccatgctggcactctgattttggatttctagtctctagaactgtgaataagtacgtttctattgcgtaagccacccagtctatggtattttattatggcagcctgagctgactaatataggcttctagattggaaggggaaggaagtaaagagagagaattgatagggataaagaagaggcatgaagagacttggggtatctgctactgaagacatcagctctctatgacaaaacagcacagcatgtttggagtaagagaaagctgaagtctcaacaaacaaatagattcttaatgttctataccaccggacaaactgcagcccttttatacatatggagtactttctgggccagtcctgtggcccctttcaaatgtatggtgttgaaacgtagtaagtttatgtctttaaggtctgcccctcccttcttgcattatatcataaactcttctcttttttttttttttggagacggagtcccgctctgtcacgcaggctgccaggctggcgtacagtggcgcaatctcagctcgctgcaacctccacctcctgggttcaagcgattttcttgcctctgcctcctgagtagctgggattactggcacacaccaccatgcacagggagatatgagacatcaatcaatatatgtaagatgtacatcagtttcgtctggaaagatgggacaacatgaagcagggagggggctccctggtgacagggaattttcttgtgggcaaattgtgagggagttccttgttcaaaatgccaagaacctggatgactcatagtcaagaccctccaccagtaacatatattggcgagccagccaggagcttggaaccctcggtggacagtgcctaagcacagaggcaaccacaggtttctaacagggccactctctggtgaaactgaaaggtttctgtgtgaaagtgcctgaccaccactgcccagttcagaccactacaggaaacactccatttattccacctgacttcccacttggctgcatcctcaaccattgaaatgaatttgaccctgataatctaaggaggaaacatttgatattcttttgcaataatacttggccccagtattgtttggaatctggagtttgctgttgaatgggaaagcnggatgacgttgcatgtatccaggctttggtgctgctgtcctaagaagggtcaggcctggtcagcatatggtgctctcctttggtgctatttggctccagtgtctttggagtctgaggaggtttggcctttaaaaatcaaactgccaccggaactgctttaaaaatgtttggttcacagccttcactggattacctattggagcaaacaaagtgtaaccatgtaaaacctgtgagcttgtattgatatctcatggctagagttccaagcgaatgggtctcatgagatctgatggttttgaaaatgggagttgccctgcacaagctctccttttgcctgctgccatccgcataagatgtgatttgctcttccttgccttccaccatgattgtgaggccttcccagcatgtggaaatggtccagcctgcaataactgaagcccccagacctggaacctgaagatcccatcagccactaaacctgtgaacctgtagaagacctgaagtacctgtttaaaaggcagccaaaagataagtaaattcctatcaactttccttggtgtccttcttgtatatttactgtaagctggatataatagtagccatttttatatttttacaatttaattgctttcttccaaatggattgaatcacttcttttaaagtgttttaattaatttttatctatagaacaaaataacaaataagtattttttttttataccataatggtcacccacagcctgtgtatactaagaccatgcatactgataatcagctttattttacaaaagagtttcgctttacccctctggtaattaatggattctgggtatttattaaaaactttaacacaaagactgttaaataccaccagtccagctttggcaaggcactgttggctttgtttatctccatcatcatccaaacagactaccaatcctgatcccagcccaatcttgggcccttgaaaaaataacttaacatcctaactacaagggagaaactcctttcaaattaatgaacctggctgacttatatagccttaaaattatggaaatgacaagggttacaatgtcagaatgagcagtaaaccttccccagtcctatcagagcaaactttctggggttgcatcccctcagaaacccatttggggcccaatctcaatgcacatatcagtgcgcaaagcactaaaattccaggcaacactttgtattgagagaagccaaaattttggtcaggccctgggacatctaaagtcaccaatgtaactacaccatacagattaaaccctcacatgatcatgtaagctatgcagttacccaagctgcatcatttagaaaacctgtacagtttttatggaaaccatccctagtcaaggacactttaaatatatagtctaaataccgttaaggtaggcccactagctgtgttcacattttcccttggccaccttaccagggactttaataacttgggaaagtgaaaacaacaagctaacccacatgttcaccatagaaaacaattttgtcttgaaaaacaaggactctttttcccgtgtgggaccagttcctacttatgttttaccagccaattggactggaacctatacagttgtttatttagcccccgaaattaatatagctcccaacaaccaatccttcattatacttttaactgcaaccaccagacacaaatgagccatccaactgataccactttcggtagagctaggaataacagcaggagtaggaatgagagttagcagccttgcagtttccctatcctattaccaatgcttgtccaaggattttatggaaagcttaggtgacattgcccaaaagtatcatcaccttacaaaatcagatagagtctttggcagtggtggctttgtaaaatagaaggggactggatctcctaaatgctgaagaaggtggcttatgtctttttcctagaggaagaatgctgtttttatgtcaaccaaacaggattagtaagggatgccacccaaaaactagccgattggtaccataagatatgacaacagctgtctgagtcatggggcgcctagtcaaaatgctaatttggggctcacatctccttcctctggccagtccactattaattattatacttgccttggcttttggatcatgtttgttaaatcttttaaccagatttatttcttcttgcctagagaccattatgataatgcagcagggccaccagtcagtttcagataatgatgtcaaccccggccaccaagaagtaaccttgtctccactagacagagcaggttgcaggaatttagccaattcagaggtcttgttctccataatttggaattttccttcggatttgatcaagttggatagagttggtcaaacccaatgggaaaaagatgaaaacaacaagaaacagaaacaaacagcaacaacaacaacaacaaaaacaatgcatttaattaaatgaagatgagctcatgctggagtagggtggactctgaacccagtgggacaagcgtccttattaagaagagggaaatctggacacacacagagcagagaccgccgtgtgaagatggaggcagagatcggagagatgctgccacacgccacaaatgcctggggctcccagaaactacacggagcctcccccagcggcttcagcaggagcatggctcggccaacactttgatcttggtcttccagcctccagaacgttttcctaaaattcccttttccactggtgtgtggtgcaagatgaggcacattttccatggatggtgaacagagggaggagccttttgatcacaaccaggtcaccccacttctaagccactgtgcctccagccccacaagactaaggagagagagcgcagcgtggtggagagtgagctgtgctgggaccattgtttccgtaacctcgttttctgtgtccagctgacacaccttcaaagtggcatcaggtcctaaactgtagcttgcaatgtgcctgtttccagaaaccaaggtgaaagtgcttttagacagtgttcccatgcaagagtcccttcccagcttttttctggaaatgcatgtttctctgaactctgagtcccaagaaaaatcacttgagacaccaagaaaatgggggaagtgctaaaattgtgtgggaattcaagcttaacaataaacatcaagacatttttgataaaaatgaatccactgacatcggggaggagcaagagaacagcacgctgacactgggtcagaggctaagaccgacatttctgggaaccactcccggaagggcacagaggagacgctttcagcctctcatcagccagcctggcctgtagctgctgcacgttatgagtgtgttcctggcatgactgcttctaacagcgaccatttcattaagtttttaagtgcctggtaattgcttggttatgaccggtgtctgctccatggcagcctcttcctgggaccagatctgaacagtctggagagaggagctgtggtggcagcagacagatctctgcttcaggggccaggtgtctagaagaaatgctgaggcagtgtcacgctggtgtctgtcctccttacagaatgcctgaacagttccattgactcaaagtgaagatcaaaagaaccaaatgacagcaatagccaagtgtaatcatcagtaaccctgtgttctatccacagttaaaagaatattggcagagaaacagccttggtgttccagcaggagtgaagaggaacaggaaaacgagtggcagtagccctgaaacagccacttctggtggttgccactcacctgaggatgtgagtctgggtgacaagagtgaaactccgtctcaaaa

SEQ ID NO: 365931 - DNA, 4579 bp, Homo sapiens
  misc_feature (9)..(9): n is a, c, g, or t
  misc_feature (1155)..(1155): n is a, c, g, or t
gagggcccntgccagaacctgaccatgctggcactctgattttggatttctagtctctagaactgtgaataagtacgtttctattgcgtaagccacccagtctatggtattttattatggcagcctgagctgactaatataggcttctagattggaaggggaaggaagtaaagagagagaattgatagggataaagaagaggcatgaagagacttggggtatctgctactgaagacatcagctctctatgacaaaacagcacagcatgtttggagtaagagaaagctgaagtctcaacaaacaaatagattcttaatgttctataccaccggacaaactgcagcccttttatacatatggagtactttctgggccagtcctgtggcccctttcaaatgtatggtgttgaaacgtagtaagtttatgtctttaaggtctgcccctcccttcttgcattatatcataaactcttctcttttttttttttttggagacggagtcccgctctgtcacgcaggctgccaggctggcgtacagtggcgcaatctcagctcgctgcaacctccacctcctgggttcaagcgattttcttgcctctgcctcctgagtagctgggattactggcacacaccaccatgcacagggagatatgagacatcaatcaatatatgtaagatgtacatcagtttcgtctggaaagatgggacaacatgaagcagggagggggctccctggtgacagggaattttcttgtgggcaaattgtgagggagttccttgttcaaaatgccaagaacctggatgactcatagtcaagaccctccaccagtaacatatattggcgagccagccaggagcttggaaccctcggtggacagtgcctaagcacagaggcaaccacaggtttctaacagggccactctctggtgaaactgaaaggtttctgtgtgaaagtgcctgaccaccactgcccagttcagaccactacaggaaacactccatttattccacctgacttcccacttggctgcatcctcaaccattgaaatgaatttgaccctgataatctaaggaggaaacatttgatattcttttgcaataatacttggccccagtattgtttggaatctggagtttgctgttgaatgggaaagcnggatgacgttgcatgtatccaggctttggtgctgctgtcctaagaagggtcaggcctggtcagcatatggtgctctcctttggtgctatttggctccagtgtctttggagtctgaggaggtttggcctttaaaaatcaaactgccaccggaactgctttaaaaatgtttggttcacagccttcactggattacctattggagcaaacaaagtgtaaccatgtaaaacctgtgagcttgtattgatatctcatggctagagttccaagcgaatgggtctcatgagatctgatggttttgaaaatgggagttgccctgcacaagctctccttttgcctgctgccatccgcataagatgtgatttgctcttccttgccttccaccatgattgtgaggccttcccagcatgtggaaatggtccagcctgcaataactgaagcccccagacctggaacctgaagatcccatcagccactaaacctgtgaacctgtagaagacctgaagtacctgtttaaaaggcagccaaaagataagtaaattcctatcaactttccttggtgtccttcttgtatatttactgtaagctggatataatagtagccatttttatatttttacaatttaattgctttcttccaaatggattgaatcacttcttttaaagtgttttaattaatttttatctatagaacaaaataacaaataagtattttttttttataccataatggtcacccacagcctgtgtatactaagaccatgcatactgataatcagctttattttacaaaagagtttcgctttacccctctggtaattaatggattctgggtatttattaaaaactttaacacaaagactgttaaataccaccagtccagctttggcaaggcactgttggctttgtttatctccatcatcatccaaacagactaccaatcctgatcccagcccaatcttgggcccttgaaaaaataacttaacatcctaactacaagggagaaactcctttcaaattaatgaacctggctgacttatatagccttaaaattatggaaatgacaagggttacaatgtcagaatgagcagtaaaccttccccagtcctatcagagcaaactttctggggttgcatcccctcagaaacccatttggggcccaatctcaatgcacatatcagtgcgcaaagcactaaaattccaggcaacactttgtattgagagaagccaaaattttggtcaggccctgggacatctaaagtcaccaatgtaactacaccatacagattaaaccctcacatgatcatgtaagctatgcagttacccaagctgcatcatttagaaaacctgtacagtttttatggaaaccatccctagtcaaggacactttaaatatatagtctaaataccgttaaggtaggcccactagctgtgttcacattttcccttggccaccttaccagggactttaataacttgggaaagtgaaaacaacaagctaacccacatgttcaccatagaaaacaattttgtcttgaaaaacaaggactctttttcccgtgtgggaccagttcctacttatgttttaccagccaattggactggaacctatacagttgtttatttagcccccgaaattaatatagctcccaacaaccaatccttcattatacttttaactgcaaccaccagacacaaatgagccatccaactgataccactttcggtagagctaggaataacagcaggagtaggaatgagagttagcagccttgcagtttccctatcctattaccaatgcttgtccaaggattttatggaaagcttaggtgacattgcccaaaagtatcatcaccttacaaaatcagatagagtctttggcagtggtggctttgtaaaatagaaggggactggatctcctaaatgctgaagaaggtggcttatgtctttttcctagaggaagaatgctgtttttatgtcaaccaaacaggattagtaagggatgccacccaaaaactagccgattggtaccataagatatgacaacagctgtctgagtcatggggcgcctagtcaaaatgctaatttggggctcacatctccttcctctggccagtccactattaattattatacttgccttggcttttggatcatgtttgttaaatcttttaaccagatttatttcttcttgcctagagaccattatgataatgcagcagggccaccagtcagtttcagataatgatgtcaaccccggccaccaagaagtaaccttgtctccactagacagagcaggttgcaggaatttagccaattcagaggtcttgttctccataatttggaattttccttcggatttgatcaagttggatagagttggtcaaacccaatgggaaaaagatgaaaacaacaagaaacagaaacaaacagcaacaacaacaacaacaaaaacaatgcatttaattaaatgaagatgagctcatgctggagtagggtggactctgaacccagtgggacaagcgtccttattaagaagagggaaatctggacacacacagagcagagaccgccgtgtgaagatggaggcagagatcggagagatgctgccacacgccacaaatgcctggggctcccagaaactacacggagcctcccccagcggcttcagcaggagcatggctcggccaacactttgatcttggtcttccagcctccagaacgttttcctaaaattcccttttccactggtgtgtggtgcaagatgaggcacattttccatggatggtgaacagagggaggagccttttgatcacaaccaggtcaccccacttctaagccactgtgcctccagccccacaagactaaggagagagagcgcagcgtggtggagagtgagctgtgctgggaccattgtttccgtaacctcgttttctgtgtccagctgacacaccttcaaagtggcatcaggtcctaaactgtagcttgcaatgtgcctgtttccagaaaccaaggtgaaagtgcttttagagtcccttcccagcttttttctggaaatgcatgtttctctgaactctgagtcccaagaaaaatcacttgagacaccaagaaaatgggggaagtgctaaaattgtgtgggaattcaagcttaacaataaacatcaagacatttttgataaaaatgaatccactgacatcggggaggagcaagagaacagcacgctgacactgggtcagaggctaagaccgacatttctgggaaccactcccggaagggcacagaggagacgctttcagcctctcatcagccagcctggcctgtagctgctgcacgttatgagtgtgttcctggcatgactgcttctaacaacagtgagttttctggcaaatcaaataaatactaataagtctgtatgcacattatact

SEQ ID NO: 365932 - DNA, 4895 bp, Homo sapiens
  misc_feature (9)..(9): n is a, c, g, or t
  misc_feature (1155)..(1155): n is a, c, g, or t
gagggcccntgccagaacctgaccatgctggcactctgattttggatttctagtctctagaactgtgaataagtacgtttctattgcgtaagccacccagtctatggtattttattatggcagcctgagctgactaatataggcttctagattggaaggggaaggaagtaaagagagagaattgatagggataaagaagaggcatgaagagacttggggtatctgctactgaagacatcagctctctatgacaaaacagcacagcatgtttggagtaagagaaagctgaagtctcaacaaacaaatagattcttaatgttctataccaccggacaaactgcagcccttttatacatatggagtactttctgggccagtcctgtggcccctttcaaatgtatggtgttgaaacgtagtaagtttatgtctttaaggtctgcccctcccttcttgcattatatcataaactcttctcttttttttttttttggagacggagtcccgctctgtcacgcaggctgccaggctggcgtacagtggcgcaatctcagctcgctgcaacctccacctcctgggttcaagcgattttcttgcctctgcctcctgagtagctgggattactggcacacaccaccatgcacagggagatatgagacatcaatcaatatatgtaagatgtacatcagtttcgtctggaaagatgggacaacatgaagcagggagggggctccctggtgacagggaattttcttgtgggcaaattgtgagggagttccttgttcaaaatgccaagaacctggatgactcatagtcaagaccctccaccagtaacatatattggcgagccagccaggagcttggaaccctcggtggacagtgcctaagcacagaggcaaccacaggtttctaacagggccactctctggtgaaactgaaaggtttctgtgtgaaagtgcctgaccaccactgcccagttcagaccactacaggaaacactccatttattccacctgacttcccacttggctgcatcctcaaccattgaaatgaatttgaccctgataatctaaggaggaaacatttgatattcttttgcaataatacttggccccagtattgtttggaatctggagtttgctgttgaatgggaaagcnggatgacgttgcatgtatccaggctttggtgctgctgtcctaagaagggtcaggcctggtcagcatatggtgctctcctttggtgctatttggctccagtgtctttggagtctgaggaggtttggcctttaaaaatcaaactgccaccggaactgctttaaaaatgtttggttcacagccttcactggattacctattggagcaaacaaagtgtaaccatgtaaaacctgtgagcttgtattgatatctcatggctagagttccaagcgaatgggtctcatgagatctgatggttttgaaaatgggagttgccctgcacaagctctccttttgcctgctgccatccgcataagatgtgatttgctcttccttgccttccaccatgattgtgaggccttcccagcatgtggaaatggtccagcctgcaataactgaagcccccagacctggaacctgaagatcccatcagccactaaacctgtgaacctgtagaagacctgaagtacctgtttaaaaggcagccaaaagataagtaaattcctatcaactttccttggtgtccttcttgtatatttactgtaagctggatataatagtagccatttttatatttttacaatttaattgctttcttccaaatggattgaatcacttcttttaaagtgttttaattaatttttatctatagaacaaaataacaaataagtattttttttttataccataatggtcacccacagcctgtgtatactaagaccatgcatactgataatcagctttattttacaaaagagtttcgctttacccctctggtaattaatggattctgggtatttattaaaaactttaacacaaagactgttaaataccaccagtccagctttggcaaggcactgttggctttgtttatctccatcatcatccaaacagactaccaatcctgatcccagcccaatcttgggcccttgaaaaaataacttaacatcctaactacaagggagaaactcctttcaaattaatgaacctggctgacttatatagccttaaaattatggaaatgacaagggttacaatgtcagaatgagcagtaaaccttccccagtcctatcagagcaaactttctggggttgcatcccctcagaaacccatttggggcccaatctcaatgcacatatcagtgcgcaaagcactaaaattccaggcaacactttgtattgagagaagccaaaattttggtcaggccctgggacatctaaagtcaccaatgtaactacaccatacagattaaaccctcacatgatcatgtaagctatgcagttacccaagctgcatcatttagaaaacctgtacagtttttatggaaaccatccctagtcaaggacactttaaatatatagtctaaataccgttaaggtaggcccactagctgtgttcacattttcccttggccaccttaccagggactttaataacttgggaaagtgaaaacaacaagctaacccacatgttcaccatagaaaacaattttgtcttgaaaaacaaggactctttttcccgtgtgggaccagttcctacttatgttttaccagccaattggactggaacctatacagttgtttatttagcccccgaaattaatatagctcccaacaaccaatccttcattatacttttaactgcaaccaccagacacaaatgagccatccaactgataccactttcggtagagctaggaataacagcaggagtaggaatgagagttagcagccttgcagtttccctatcctattaccaatgcttgtccaaggattttatggaaagcttaggtgacattgcccaaaagtatcatcaccttacaaaatcagatagagtctttggcagtggtggctttgtaaaatagaaggggactggatctcctaaatgctgaagaaggtggcttatgtctttttcctagaggaagaatgctgtttttatgtcaaccaaacaggattagtaagggatgccacccaaaaactagccgattggtaccataagatatgacaacagctgtctgagtcatggggcgcctagtcaaaatgctaatttggggctcacatctccttcctctggccagtccactattaattattatacttgccttggcttttggatcatgtttgttaaatcttttaaccagatttatttcttcttgcctagagaccattatgataatgcagcagggccaccagtcagtttcagataatgatgtcaaccccggccaccaagaagtaaccttgtctccactagacagagcaggttgcaggaatttagccaattcagaggtcttgttctccataatttggaattttccttcggatttgatcaagttggatagagttggtcaaacccaatgggaaaaagatgaaaacaacaagaaacagaaacaaacagcaacaacaacaacaacaaaaacaatgcatttaattaaatgaagatgagctcatgctggagtagggtggactctgaacccagtgggacaagcgtccttattaagaagagggaaatctggacacacacagagcagagaccgccgtgtgaagatggaggcagagatcggagagatgctgccacacgccacaaatgcctggggctcccagaaactacacggagcctcccccagcggcttcagcaggagcatggctcggccaacactttgatcttggtcttccagcctccagaacgttttcctaaaattcccttttccactggtgtgtggtgcaagatgaggcacattttccatggatggtgaacagagggaggagccttttgatcacaaccaggtcaccccacttctaagccactgtgcctccagccccacaagactaaggagagagagcgcagcgtggtggagagtgagctgtgctgggaccattgtttccgtaacctcgttttctgtgtccagctgacacaccttcaaagtggcatcaggtcctaaactgtagcttgcaatgtgcctgtttccagaaaccaaggtgaaagtgcttttagacagtgttcccatgcaagagtcccttcccagcttttttctggaaatgcatgtttctctgaactctgagtcccaagaaaaatcacttgagacaccaagaaaatgggggaagtgctaaaattgtgtgggaattcaagcttaacaataaacatcaagacatttttgataaaaatgaatccactgacatcggggaggagcaagagaacagcacgctgacactgggtcagaggctaagaccgacatttctgggaaccactcccggaagggcacagaggagacgctttcagcctctcatcagccagcctggcctgtagctgctgcacgttatgagtgtgttcctggcatgactgcttctaacaaagaaatgctgaggcagtgtcacgctggtgtctgtcctccttacagaatgcctgaacagttccattgactcaaagtgaagatcaaaagaaccaaatgacagcaatagccaagtgtaatcatcagtaaccctgtgttctatccacagctttaaactccctcctaagtttctgaagatcctcttgggccacttcatggatctgatttaaatctaaagtcctaggggtttcaaggagcacagtttggaatctaccatcccgggacattcattatattagtctgttttcatgctgctgataaagacatacccaagactgggcaatttacaaaagaaagagatttaattggacttacagtc

SEQ ID NO: 365933 - DNA, 4599 bp, Homo sapiens
  misc_feature (9)..(9): n is a, c, g, or t
  misc_feature (1155)..(1155): n is a, c, g, or t
gagggcccntgccagaacctgaccatgctggcactctgattttggatttctagtctctagaactgtgaataagtacgtttctattgcgtaagccacccagtctatggtattttattatggcagcctgagctgactaatataggcttctagattggaaggggaaggaagtaaagagagagaattgatagggataaagaagaggcatgaagagacttggggtatctgctactgaagacatcagctctctatgacaaaacagcacagcatgtttggagtaagagaaagctgaagtctcaacaaacaaatagattcttaatgttctataccaccggacaaactgcagcccttttatacatatggagtactttctgggccagtcctgtggcccctttcaaatgtatggtgttgaaacgtagtaagtttatgtctttaaggtctgcccctcccttcttgcattatatcataaactcttctcttttttttttttttggagacggagtcccgctctgtcacgcaggctgccaggctggcgtacagtggcgcaatctcagctcgctgcaacctccacctcctgggttcaagcgattttcttgcctctgcctcctgagtagctgggattactggcacacaccaccatgcacagggagatatgagacatcaatcaatatatgtaagatgtacatcagtttcgtctggaaagatgggacaacatgaagcagggagggggctccctggtgacagggaattttcttgtgggcaaattgtgagggagttccttgttcaaaatgccaagaacctggatgactcatagtcaagaccctccaccagtaacatatattggcgagccagccaggagcttggaaccctcggtggacagtgcctaagcacagaggcaaccacaggtttctaacagggccactctctggtgaaactgaaaggtttctgtgtgaaagtgcctgaccaccactgcccagttcagaccactacaggaaacactccatttattccacctgacttcccacttggctgcatcctcaaccattgaaatgaatttgaccctgataatctaaggaggaaacatttgatattcttttgcaataatacttggccccagtattgtttggaatctggagtttgctgttgaatgggaaagcnggatgacgttgcatgtatccaggctttggtgctgctgtcctaagaagggtcaggcctggtcagcatatggtgctctcctttggtgctatttggctccagtgtctttggagtctgaggaggtttggcctttaaaaatcaaactgccaccggaactgctttaaaaatgtttggttcacagccttcactggattacctattggagcaaacaaagtgtaaccatgtaaaacctgtgagcttgtattgatatctcatggctagagttccaagcgaatgggtctcatgagatctgatggttttgaaaatgggagttgccctgcacaagctctccttttgcctgctgccatccgcataagatgtgatttgctcttccttgccttccaccatgattgtgaggccttcccagcatgtggaaatggtccagcctgcaataactgaagcccccagacctggaacctgaagatcccatcagccactaaacctgtgaacctgtagaagacctgaagtacctgtttaaaaggcagccaaaagataagtaaattcctatcaactttccttggtgtccttcttgtatatttactgtaagctggatataatagtagccatttttatatttttacaatttaattgctttcttccaaatggattgaatcacttcttttaaagtgttttaattaatttttatctatagaacaaaataacaaataagtattttttttttataccataatggtcacccacagcctgtgtatactaagaccatgcatactgataatcagctttattttacaaaagagtttcgctttacccctctggtaattaatggattctgggtatttattaaaaactttaacacaaagactgttaaataccaccagtccagctttggcaaggcactgttggctttgtttatctccatcatcatccaaacagactaccaatcctgatcccagcccaatcttgggcccttgaaaaaataacttaacatcctaactacaagggagaaactcctttcaaattaatgaacctggctgacttatatagccttaaaattatggaaatgacaagggttacaatgtcagaatgagcagtaaaccttccccagtcctatcagagcaaactttctggggttgcatcccctcagaaacccatttggggcccaatctcaatgcacatatcagtgcgcaaagcactaaaattccaggcaacactttgtattgagagaagccaaaattttggtcaggccctgggacatctaaagtcaccaatgtaactacaccatacagattaaaccctcacatgatcatgtaagctatgcagttacccaagctgcatcatttagaaaacctgtacagtttttatggaaaccatccctagtcaaggacactttaaatatatagtctaaataccgttaaggtaggcccactagctgtgttcacattttcccttggccaccttaccagggactttaataacttgggaaagtgaaaacaacaagctaacccacatgttcaccatagaaaacaattttgtcttgaaaaacaaggactctttttcccgtgtgggaccagttcctacttatgttttaccagccaattggactggaacctatacagttgtttatttagcccccgaaattaatatagctcccaacaaccaatccttcattatacttttaactgcaaccaccagacacaaatgagccatccaactgataccactttcggtagagctaggaataacagcaggagtaggaatgagagttagcagccttgcagtttccctatcctattaccaatgcttgtccaaggattttatggaaagcttaggtgacattgcccaaaagtatcatcaccttacaaaatcagatagagtctttggcagtggtggctttgtaaaatagaaggggactggatctcctaaatgctgaagaaggtggcttatgtctttttcctagaggaagaatgctgtttttatgtcaaccaaacaggattagtaagggatgccacccaaaaactagccgattggtaccataagatatgacaacagctgtctgagtcatggggcgcctagtcaaaatgctaatttggggctcacatctccttcctctggccagtccactattaattattatacttgccttggcttttggatcatgtttgttaaatcttttaaccagatttatttcttcttgcctagagaccattatgataatgcagcagggccaccagtcagtttcagataatgatgtcaaccccggccaccaagaagtaaccttgtctccactagacagagcaggttgcaggaatttagccaattcagaggtcttgttctccataatttggaattttccttcggatttgatcaagttggatagagttggtcaaacccaatgggaaaaagatgaaaacaacaagaaacagaaacaaacagcaacaacaacaacaacaaaaacaatgcatttaattaaatgaagatgagctcatgctggagtagggtggactctgaacccagtgggacaagcgtccttattaagaagagggaaatctggacacacacagagcagagaccgccgtgtgaagatggaggcagagatcggagagatgctgccacacgccacaaatgcctggggctcccagaaactacacggagcctcccccagcggcttcagcaggagcatggctcggccaacactttgatcttggtcttccagcctccagaacgttttcctaaaattcccttttccactggtgtgtggtgcaagatgaggcacattttccatggatggtgaacagagggaggagccttttgatcacaaccaggtcaccccacttctaagccactgtgcctccagccccacaagactaaggagagagagcgcagcgtggtggagagtgagctgtgctgggaccattgtttccgtaacctcgttttctgtgtccagctgacacaccttcaaagtggcatcaggtcctaaactgtagcttgcaatgtgcctgtttccagaaaccaaggtgaaagtgcttttagagtcccttcccagcttttttctggaaatgcatgtttctctgaactctgagtcccaagaaaaatcacttgagacaccaagaaaatgggggaagtgctaaaattgtgtgggaattcaagcttaacaataaacatcaagacatttttgataaaaatgaatccactgacatcggggaggagcaagagaacagcacgctgacactgggtcagaggctaagaccgacatttctgggaaccactcccggaagggcacagaggagacgctttcagcctctcatcagccagcctggcctgtagctgctgcacgttatgagtgtgttcctggcatgactgcttctaacactctgaattttctctcttggtgttttgtttttgtttttgtttttttgacagagtgagattccatctcaaaaaaaaaaa

SEQ ID NO: 365934 - DNA, 2138 bp, Homo sapiens
cattcaccaccgcgtgacgcggcgccgggtcgccgccgcagattcgacacaaaacccggaaggaccccgccgaaggttttctccggttcgggagagagacggagtcccgctctgtcacgcaggctgccaggctggcgtacagtggcgcaatctcagctcgctgcaacctccacctcctgggttcaagcgattttcttgcctctgcctcctgagtagctgggattactggcacacaccaccatgcacagggagatatgagacatcaatcaatatatgtaagatgtacatcagtttcgtctggaaagatgggacaacatgaagcagggagggggctccctggtgacagttgcaggaatttagccaattcagaggtcttgttctccataatttggaattttccttcggatttgatcaagttggatagagttggtcaaacccaatgggaaaaagatgaaaacaacaagaaacagaaacaaacagcaacaacaacaacaacaaaaacaatgcatttaattaaatgaagatgagctcatgctggagtagggtggactctgaacccagtgggacaagcgtccttattaagaagagggaaatctggacacacacagagcagagaccgccgtgtgaagatggaggcagagatcggagagatgctgccacacgccacaaatgcctggggctcccagaaactacacggagcctcccccagcggcttcagcaggagcatggctcggccaacactttgatcttggtcttccagcctccagaacgttttcctaaaattcccttttccactggtgtgtggtgcaagatgaggcacattttccatggatggtgaacagagggaggagccttttgatcacaaccaggtcaccccacttctaagccactgtgcctccagccccacaagactaaggagagagagcgcagcgtggtggagagtgagctgtgctgggaccattgtttccgtaacctcgttttctgtgtccagctgacacaccttcaaagtggcatcaggtcctaaactgtagcttgcaatgtgcctgtttccagaaaccaaggtgaaagtgcttttagacagtgttcccatgcaagagtcccttcccagcttttttctggaaatgcatgtttctctgaactctgagtcccaagaaaaatcacttgagacaccaagaaaatgggggaagtgctaaaattgtgtgggaattcaagcttaacaataaacatcaagacatttttgataaaaatgaatccactgacatcggggaggagcaagagaacagcacgctgacactgggtcagaggctaagaccgacatttctgggaaccactcccggaagggcacagaggagacgctttcagcctctcatcagccagcctggcctgtagctgctgcacgttatgagtgtgttcctggcatgactgcttctaacagcgaccatttcattaagtttttaagtgcctggtaattgcttggttatgaccggtgtctgctccatggcagcctcttcctgtttttgcccgaatgatgaaggaggaagtttacatcttgctccctggggacaggcagagacagtgtgtgcacttccatcctacagggaccagatctgaacagtctggagagaggagctgtggtggcagcagacagatctctgcttcaggggccaggtgtctagaagaaatgctgaggcagtgtcacgctggtgtctgtcctccttacagaatgcctgaacagttccattgactcaaagtgaagatcaaaagaaccaaatgacagcaatagccaagtgtaatcatcagtaaccctgtgttctatccacaggtaaaaaacaatcatcctcttcattatgggtttcaattttaaatgtaatacatttttagaaatgcctatttccttttataatctctttatataatctaggttattctggctcttaggtcttcatttagctactgaaaagatttgatctcaaatcaatgatctaaccacccatgaccatctcccacctctctccccgtacaccccccagcatgaattctgggaactcaggtaaaatgctttctggaaacctgcctgtattagtctgttgtcaagctgctaataaacacatacccgaaactgggtagtttataaagga

SEQ ID NO: 365935 - DNA, 2008 bp, Homo sapiens
gcttgatttaggaaccaaacttaggcagtcatgatgaaaataaggacagaatcttagtttccaaactgcagtgctgggggacaaccattgctctttcagtttggcctggttagcaaaagatggccttgttatgtaaataaagcccctaaggtagtcaaagtcaaaaaaattttttttttccttttgctagctgtttttttcttttttctttttcagttgcaggaatttagccaattcagaggtcttgttctccataatttggaattttccttcggatttgatcaagttggatagagttggtcaaacccaatgggaaaaagatgaaaacaacaagaaacagaaacaaacagcaacaacaacaacaacaaaaacaatgcatttaattaaatgaagatgagctcatgctggagtagggtggactctgaacccagtgggacaagcgtccttattaagaagagggaaatctggacacacacagagcagagaccgccgtgtgaagatggaggcagagatcggagagatgctgccacacgccacaaatgcctggggctcccagaaactacacggagcctcccccagcggcttcagcaggagcatggctcggccaacactttgatcttggtcttccagcctccagaacgttttcctaaaattcccttttccactggtgtgtggtgcaagatgaggcacattttccatggatggtgaacagagggaggagccttttgatcacaaccaggtcaccccacttctaagccactgtgcctccagccccacaagactaaggagagagagcgcagcgtggtggagagtgagctgtgctgggaccattgtttccgtaacctcgttttctgtgtccagctgacacaccttcaaagtggcatcaggtcctaaactgtagcttgcaatgtgcctgtttccagaaaccaaggtgaaagtgcttttagacagtgttcccatgcaagagtcccttcccagcttttttctggaaatgcatgtttctctgaactctgagtcccaagaaaaatcacttgagacaccaagaaaatgggggaagtgctaaaattgtgtgggaattcaagcttaacaataaacatcaagacatttttgataaaaatgaatccactgacatcggggaggagcaagagaacagcacgctgacactgggtcagaggctaagaccgacatttctgggaaccactcccggaagggcacagaggagacgctttcagcctctcatcagccagcctggcctgtagctgctgcacgttatgagtgtgttcctggcatgactgcttctaacagcgaccatttcattaagtttttaagtgcctggtaattgcttggttatgaccggtgtctgctccatggcagcctcttcctgtttttgcccgaatgatgaaggaggaagtttacatcttgctccctggggacaggcagagacagtgtgtgcacttccatcctacagggaccagatctgaacagtctggagagaggagctgtggtggcagcagacagatctctgcttcaggggccaggtgtctagaagaaatgctgaggcagtgtcacgctggtgtctgtcctccttacagaatgcctgaacagttccattgactcaaagtgaagatcaaaagaaccaaatgacagcaatagccaagtgtaatcatcagtaaccctgtgttctatccacaggtaaaaaacaatcatcctcttcattatgggtttcaattttaaatgtaatacatttttagaaatgcctatttccttttataatctctttatataatctaggttattctggctcttaggtcttcatttagctactgaaaagatttgatctcaaatcaatgatctaaccacccatgaccatctcccacctctctccccgtacaccccccagcatgaattctgggaactcaggtaaaatgctttctggaaacctgcctgtattagtctgttgtcaagctgctaataaacacatacccgaaactgggtagtttataaagga

SEQ ID NO: 365936 - DNA, 3917 bp, Homo sapiens
  misc_feature (9)..(9): n is a, c, g, or t
  misc_feature (1155)..(1155): n is a, c, g, or t
gagggcccntgccagaacctgaccatgctggcactctgattttggatttctagtctctagaactgtgaataagtacgtttctattgcgtaagccacccagtctatggtattttattatggcagcctgagctgactaatataggcttctagattggaaggggaaggaagtaaagagagagaattgatagggataaagaagaggcatgaagagacttggggtatctgctactgaagacatcagctctctatgacaaaacagcacagcatgtttggagtaagagaaagctgaagtctcaacaaacaaatagattcttaatgttctataccaccggacaaactgcagcccttttatacatatggagtactttctgggccagtcctgtggcccctttcaaatgtatggtgttgaaacgtagtaagtttatgtctttaaggtctgcccctcccttcttgcattatatcataaactcttctcttttttttttttttggagacggagtcccgctctgtcacgcaggctgccaggctggcgtacagtggcgcaatctcagctcgctgcaacctccacctcctgggttcaagcgattttcttgcctctgcctcctgagtagctgggattactggcacacaccaccatgcacagggagatatgagacatcaatcaatatatgtaagatgtacatcagtttcgtctggaaagatgggacaacatgaagcagggagggggctccctggtgacagggaattttcttgtgggcaaattgtgagggagttccttgttcaaaatgccaagaacctggatgactcatagtcaagaccctccaccagtaacatatattggcgagccagccaggagcttggaaccctcggtggacagtgcctaagcacagaggcaaccacaggtttctaacagggccactctctggtgaaactgaaaggtttctgtgtgaaagtgcctgaccaccactgcccagttcagaccactacaggaaacactccatttattccacctgacttcccacttggctgcatcctcaaccattgaaatgaatttgaccctgataatctaaggaggaaacatttgatattcttttgcaataatacttggccccagtattgtttggaatctggagtttgctgttgaatgggaaagcnggatgacgttgcatgtatccaggctttggtgctgctgtcctaagaagggtcaggcctggtcagcatatggtgctctcctttggtgctatttggctccagtgtctttggagtctgaggaggtttggcctttaaaaatcaaactgccaccggaactgctttaaaaatgtttggttcacagccttcactggattacctattggagcaaacaaagtgtaaccatgtaaaacctgtgagcttgtattgatatctcatggctagagttccaagcgaatgggtctcatgagatctgatggttttgaaaatgggagttgccctgcacaagctctccttttgcctgctgccatccgcataagatgtgatttgctcttccttgccttccaccatgattgtgaggccttcccagcatgtggaaatggtccagcctgcaataactgaagcccccagacctggaacctgaagatcccatcagccactaaacctgtgaacctgtagaagacctgaagtacctgtttaaaaggcagccaaaagataagtaaattcctatcaactttccttggtgtccttcttgtatatttactgtaagctggatataatagtagccatttttatatttttacaatttaattgctttcttccaaatggattgaatcacttcttttaaagtgttttaattaatttttatctatagaacaaaataacaaataagtattttttttttataccataatggtcacccacagcctgtgtatactaagaccatgcatactgataatcagctttattttacaaaagagtttcgctttacccctctggtaattaatggattctgggtatttattaaaaactttaacacaaagactgttaaataccaccagtccagctttggcaaggcactgttggctttgtttatctccatcatcatccaaacagactaccaatcctgatcccagcccaatcttgggcccttgaaaaaataacttaacatcctaactacaagggagaaactcctttcaaattaatgaacctggctgacttatatagccttaaaattatggaaatgacaagggttacaatgtcagaatgagcagtaaaccttccccagtcctatcagagcaaactttctggggttgcatcccctcagaaacccatttggggcccaatctcaatgcacatatcagtgcgcaaagcactaaaattccaggcaacactttgtattgagagaagccaaaattttggtcaggccctgggacatctaaagtcaccaatgtaactacaccatacagattaaaccctcacatgatcatgtaagctatgcagttacccaagctgcatcatttagaaaacctgtacagtttttatggaaaccatccctagtcaaggacactttaaatatatagtctaaataccgttaaggtaggcccactagctgtgttcacattttcccttggccaccttaccagggactttaataacttgggaaagtgaaaacaacaagctaacccacatgttcaccatagaaaacaattttgtcttgaaaaacaaggactctttttcccgtgtgggaccagttcctacttatgttttaccagccaattggactggaacctatacagttgtttatttagcccccgaaattaatatagctcccaacaaccaatccttcattatacttttaactgcaaccaccagacacaaatgagccatccaactgataccactttcggtagagctaggaataacagcaggagtaggaatgagagttagcagccttgcagtttccctatcctattaccaatgcttgtccaaggattttatggaaagcttaggtgacattgcccaaaagtatcatcaccttacaaaatcagatagagtctttggcagtggtggctttgtaaaatagaaggggactggatctcctaaatgctgaagaaggtggcttatgtctttttcctagaggaagaatgctgtttttatgtcaaccaaacaggattagtaagggatgccacccaaaaactagccgattggtaccataagatatgacaacagctgtctgagtcatggggcgcctagtcaaaatgctaatttggggctcacatctccttcctctggccagtccactattaattattatacttgccttggcttttggatcatgtttgttaaatcttttaaccagatttatttcttcttgcctagagaccattatgataatgcagcagggccaccagtcagtttcagataatgatgtcaaccccggccaccaagaagtaaccttgtctccactagacagagcagggtgagagttctgtaatccccagtaggtagggactgtgccccaagtcagcatgaagtagttatggaagaaagaccatgggtccctctgcctcccagaaagatttatggggatcacatctctcaggggaaaatgaggcaggagaatagggtctggagacagggaacctaaagctgatttgtgctgagtttctaggattgaatgaaaaggaaaaccccacctctccacacccaagtaacaaaaggatcagaggctactccctttgcactgcattgcagataaaaaatggaaagtacctcagattggtcccctcccacaaccaatcagactggccatgggctactccttcgtttacatagggtgtaaccaagtaaccaatgggaaacctctagcgggtatgtaaaccccagaaaattctgtaaccagtgctcttgagctgcttgctggagcctactcccactttgtgaag

SEQ ID NO: 365937 - DNA, 1515 bp, Homo sapiens
aggggtttctcacgagatctgatggttttataaggggctctttcccctttgtgcaccctctctctttcctgcttccttgtgaagaaggtacttgcttctctttctcctgccaaagcatgaccttataattgtaagtttccggaggcctccccagccatgcggaactttttcctaaaattcccttttccactggtgtgtggtgcaagatgaggcacattttccatggatggtgaacagagggaggagccttttgatcacaaccaggtcaccccacttctaagccactgtgcctccagccccacaagactaaggagagagagcgcagcgtggtggagagtgagctgtgctgggaccattgtttccgtaacctcgttttctgtgtccagctgacacaccttcaaagtggcatcaggtcctaaactgtagcttgcaatgtgcctgtttccagaaaccaaggtgaaagtgcttttagagtcccttcccagcttttttctggaaatgcatgtttctctgaactctgagtcccaagaaaaatcacttgagacaccaagaaaatgggggaagtgctaaaattgtgtgggaattcaagcttaacaataaacatcaagacatttttgataaaaatgaatccactgacatcggggaggagcaagagaacagcacgctgacactgggtcagaggctaagaccgacatttctgggaaccactcccggaagggcacagaggagacgctttcagcctctcatcagccagcctggcctgtagctgctgcacgttatgagtgtgttcctggcatgactgcttctaacagcgaccatttcattaagtttttaagtgcctggtaattgcttggttatgaccggtgtctgctccatggcagcctcttcctgtttttgcccgaatgatgaaggaggaagtttacatcttgctccctggggacaggcagagacagtgtgtgcacttccatcctacagggaccagatctgaacagtctggagagaggagctgtggtggcagcagacagatctctgcttcaggggccaggtgtctagaagaaatgctgaggcagtgtcacgctggtgtctgtcctccttacagaatgcctgaacagttccattgactcaaagtgaagatcaaaagaaccaaatgacagcaatagccaagtgtaatcatcagtaaccctgtgttctatccacaggtaaaaaacaatcatcctcttcattatgggtttcaattttaaatgtaatacatttttagaaatgcctatttccttttataatctctttatataatctaggttattctggctcttaggtcttcatttagctactgaaaagatttgatctcaaatcaatgatctaaccacccatgaccatctcccacctctctccccgtacaccccccagcatgaattctgggaactcaggtaaaatgctttctggaaacctgcctgtattagtctgttgtcaagctgctaataaacacatacccgaaactgggtagtttataaagga

SEQ ID NO: 365938 - DNA, 1154 bp, Homo sapiens
  misc_feature (760)..(760): n is a, c, g, or t
  misc_feature (1154)..(1154): n is a, c, g, or t
cattcaccaccgcgtgacgcggcgccgggtcgccgccgcagattcgacacaaaacccggaaggaccccgccgaaggttttctccggttcgggagagagacggagtcccgctctgtcacgcaggctgccaggctggcgtacagtggcgcaatctcagctcgctgcaacctccacctcctgggttcaagcgattttcttgcctctgcctcctgagtagctgggattactggcacacaccaccatgcacagggagatatgagacatcaatcaatatatgtaagatgtacatcagtttcgtctggaaagatgggacaacatgaagcagggagggggctccctggtgacagggaattttcttgtgggcaaattgtgagggagttccttgttcaaaatgccaagaacctggatgactcatagtcaagaccctccaccagtaacatatattggcgagccagccaggagcttggaaccctcggtggacagtgcctaagcacagaggcaaccacaggtttctaacagggccactctctggtgaaactgaaaggtttctgtgtgaaagtgcctgaccaccactgcccagttcagaccactacaggaaacactccatttattccacctgacttcccacttggctgcatcctcaaccattgaaatgaatttgaccctgataatctaaggaggaaacatttgatattcttttgcaataatacttggccccagtattgtttggaatctggagtttgctgttgaatgggaaagcnggatgacgttgcatgtatccaggctttggtgctgctgtcctaagaagggtcaggcctggtcagcatatggtgctctcctttggtgctatttggctccagtgtctttggagtctgaggaggtttggcctttaaaaatcaaactgccaccggaactgctttaaaaatgtttggttcacagccttcactggattacctattggagcaaacaaagtgtaaccatgtaaaacctgtgagcttgtattgatatctcatggctagagttccaaggtaaaagctattggatcttcgtttgtgtgtgtgtatacatgtctagatgtgtttatttgtatgtacacttattgttatatgttgtgtcaaccaaatcagcttataaataaaaaagcactcataaatn

SEQ ID NO: 365939 - DNA, 902 bp, Homo sapiens
  misc_feature (508)..(508): n is a, c, g, or t
  misc_feature (902)..(902): n is a, c, g, or t
cattcaccaccgcgtgacgcggcgccgggtcgccgccgcagattcgacacaaaacccggaaggaccccgccgaaggttttctccggttcgggagagagacggagtcccgctctgtcacgcaggctgccaggctggcgtacagtggcgcaatctcagctcgctgcaacctccacctcctgggttcaagcgattttcttgcctctgcctcctgagtagctgggattactggcacacaccaccatgcacagttccttgttcaaaatgccaagaacctggatgactcatagtcaagaccctccaccagtaacatatattggcgagccagccaggagaccactacaggaaacactccatttattccacctgacttcccacttggctgcatcctcaaccattgaaatgaatttgaccctgataatctaaggaggaaacatttgatattcttttgcaataatacttggccccagtattgtttggaatctggagtttgctgttgaatgggaaagcnggatgacgttgcatgtatccaggctttggtgctgctgtcctaagaagggtcaggcctggtcagcatatggtgctctcctttggtgctatttggctccagtgtctttggagtctgaggaggtttggcctttaaaaatcaaactgccaccggaactgctttaaaaatgtttggttcacagccttcactggattacctattggagcaaacaaagtgtaaccatgtaaaacctgtgagcttgtattgatatctcatggctagagttccaaggtaaaagctattggatcttcgtttgtgtgtgtgtatacatgtctagatgtgtttatttgtatgtacacttattgttatatgttgtgtcaaccaaatcagcttataaataaaaaagcactcataaatn

SEQ ID NO: 365940 - DNA, 413 bp, Homo sapiens
tgctgggattacaggcgtgagccaccacacccggccaaacaagtggaatttttcctggaccagctctttgctggtcatgtgggaggagttggggctgtgttccaagtcagctggaatttttcttataacccaggattttacatgtgagcttgatcagcctttacttctcagcttaagcaggtctgggcatgtttggcaacctggcctgcataatgaagatttccataatttggtgttcatctatttattcagtttttgcccgaatgatgaaggaggaagtttacatcttgctccctggggacaggcagagacagtgtgtgcacttccatcctacagggaccagatctgaacagtctggagagaggagctgtggtggcagcagacagatctctgcttcaggggccaggtgtcta

SEQ ID NO: 365941 - DNA, 3291 bp, Homo sapiens
  misc_feature (760)..(760): n is a, c, g, or t
cattcaccaccgcgtgacgcggcgccgggtcgccgccgcagattcgacacaaaacccggaaggaccccgccgaaggttttctccggttcgggagagagacggagtcccgctctgtcacgcaggctgccaggctggcgtacagtggcgcaatctcagctcgctgcaacctccacctcctgggttcaagcgattttcttgcctctgcctcctgagtagctgggattactggcacacaccaccatgcacagggagatatgagacatcaatcaatatatgtaagatgtacatcagtttcgtctggaaagatgggacaacatgaagcagggagggggctccctggtgacagggaattttcttgtgggcaaattgtgagggagttccttgttcaaaatgccaagaacctggatgactcatagtcaagaccctccaccagtaacatatattggcgagccagccaggagcttggaaccctcggtggacagtgcctaagcacagaggcaaccacaggtttctaacagggccactctctggtgaaactgaaaggtttctgtgtgaaagtgcctgaccaccactgcccagttcagaccactacaggaaacactccatttattccacctgacttcccacttggctgcatcctcaaccattgaaatgaatttgaccctgataatctaaggaggaaacatttgatattcttttgcaataatacttggccccagtattgtttggaatctggagtttgctgttgaatgggaaagcnggatgacgttgcatgtatccaggctttggtgctgctgtcctaagaagggtcaggcctggtcagcatatggtgctctcctttggtgctatttggctccagtgtctttggagtctgaggaggtttggcctttaaaaatcaaactgccaccggaactgctttaaaaatgtttggttcacagccttcactggattacctattggagcaaacaaagtgtaaccatgtaaaacctgtgagcttgtattgatatctcatggctagagttccaagcgaatgggtctcatgagatctgatggttttgaaaatgggagttgccctgcacaagctctccttttgcctgctgccatccgcataagatgtgatttgctcttccttgccttccaccatgattgtgaggccttcccagcatgtggaaatggtccagcctgcaataactgaagcccccagacctggaacctgaagatcccatcagccactaaacctgtgaacctgtagaagacctgaagtacctgtttaaaaggcagccaaaagataagtaaattcctatcaactttccttggtgtccttcttgtatatttactgtaagctggatataatagtagccatttttatatttttacaatttaattgctttcttccaaatggattgaatcacttcttttaaagtgttttaattaatttttatctatagaacaaaataacaaataagtattttttttttataccataatggtcacccacagcctgtgtatactaagaccatgcatactgataatcagctttattttacaaaagagtttcgctttacccctctggtaattaatggattctgggtatttattaaaaactttaacacaaagactgttaaataccaccagtccagctttggcaaggcactgttggctttgtttatctccatcatcatccaaacagactaccaatcctgatcccagcccaatcttgggcccttgaaaaaataacttaacatcctaactacaagggagaaactcctttcaaattaatgaacctggctgacttatatagccttaaaattatggaaatgacaagggttacaatgtcagaatgagcagtaaaccttccccagtcctatcagagcaaactttctggggttgcatcccctcagaaacccatttggggcccaatctcaatgcacatatcagtgcgcaaagcactaaaattccaggcaacactttgtattgagagaagccaaaattttggtcaggccctgggacatctaaagtcaccaatgtaactacaccatacagattaaaccctcacatgatcatgtaagctatgcagttacccaagctgcatcatttagaaaacctgtacagtttttatggaaaccatccctagtcaaggacactttaaatatatagtctaaataccgttaaggtaggcccactagctgtgttcacattttcccttggccaccttaccagggactttaataacttgggaaagtgaaaacaacaagctaacccacatgttcaccatagaaaacaattttgtcttgaaaaacaaggactctttttcccgtgtgggaccagttcctacttatgttttaccagccaattggactggaacctatacagttgtttatttagcccccgaaattaatatagctcccaacaaccaatccttcattatacttttaactgcaaccaccagacacaaatgagccatccaactgataccactttcggtagagctaggaataacagcaggagtaggaatgagagttagcagccttgcagtttccctatcctattaccaatgcttgtccaaggattttatggaaagcttaggtgacattgcccaaaagtatcatcaccttacaaaatcagatagagtctttggcagtggtggctttgtaaaatagaaggggactggatctcctaaatgctgaagaaggtggcttatgtctttttcctagaggaagaatgctgtttttatgtcaaccaaacaggattagtaagggatgccacccaaaaactagccgattggtaccataagatatgacaacagctgtctgagtcatggggcgcctagtcaaaatgctaatttggggctcacatctccttcctctggccagtccactattaattattatacttgccttggcttttggatcatgtttgttaaatcttttaaccagatttatttcttcttgcctagagaccattttgcaggaatttagccaattcagaggtcttgttctccataatttggaattttccttcggatttgatcaagttggatagagttggtcaaacccaatgggaaaaagatgaaaacaacaagaaacagaaacaaacagcaacaacaacaacaacaaaaacaaagcaggaaaaaactgaaactcatcttccctgctggaaacgagctcaaactccagaaaggagttacctgccttccatcatcatggacgcaggaaaatttgccttccttgttggaagcaagtaaaactccaaaaaaggagttgcacagcaaaataaacttcagatctcaac

SEQ ID NO: 365942 - DNA, 2694 bp, Homo sapiens
cattcaccaccgcgtgacgcggcgccgggtcgccgccgcagattcgacacaaaacccggaaggaccccgccgaaggttttctccggttcgggagagagacggagtcccgctctgtcacgcaggctgccaggctggcgtacagtggcgcaatctcagctcgctgcaacctccacctcctgggttcaagcgattttcttgcctctgcctcctgagtagctgggattactggcacacaccaccatgcacagggagatatgagacatcaatcaatatatgtaagatgtacatcagtttcgtctggaaagatgggacaacatgaagcagggagggggctccctggtgacagttccttgttcaaaatgccaagaacctggatgactcatagtcaagaccctccaccagtaacatatattggcgagccagccaggagcgaatgggtctcatgagatctgatggttttgaaaatgggagttgccctgcacaagctctccttttgcctgctgccatccgcataagatgtgatttgctcttccttgccttccaccatgattgtgaggccttcccagcatgtggaaatggtccagcctgcaataactgaagcccccagacctggaacctgaagatcccatcagccactaaacctgtgaacctgtagaagacctgaagtacctgtttaaaaggcagccaaaagataagtaaattcctatcaactttccttggtgtccttcttgtatatttactgtaagctggatataatagtagccatttttatatttttacaatttaattgctttcttccaaatggattgaatcacttcttttaaagtgttttaattaatttttatctatagaacaaaataacaaataagtattttttttttataccataatggtcacccacagcctgtgtatactaagaccatgcatactgataatcagctttattttacaaaagagtttcgctttacccctctggtaattaatggattctgggtatttattaaaaactttaacacaaagactgttaaataccaccagtccagctttggcaaggcactgttggctttgtttatctccatcatcatccaaacagactaccaatcctgatcccagcccaatcttgggcccttgaaaaaataacttaacatcctaactacaagggagaaactcctttcaaattaatgaacctggctgacttatatagccttaaaattatggaaatgacaagggttacaatgtcagaatgagcagtaaaccttccccagtcctatcagagcaaactttctggggttgcatcccctcagaaacccatttggggcccaatctcaatgcacatatcagtgcgcaaagcactaaaattccaggcaacactttgtattgagagaagccaaaattttggtcaggccctgggacatctaaagtcaccaatgtaactacaccatacagattaaaccctcacatgatcatgtaagctatgcagttacccaagctgcatcatttagaaaacctgtacagtttttatggaaaccatccctagtcaaggacactttaaatatatagtctaaataccgttaaggtaggcccactagctgtgttcacattttcccttggccaccttaccagggactttaataacttgggaaagtgaaaacaacaagctaacccacatgttcaccatagaaaacaattttgtcttgaaaaacaaggactctttttcccgtgtgggaccagttcctacttatgttttaccagccaattggactggaacctatacagttgtttatttagcccccgaaattaatatagctcccaacaaccaatccttcattatacttttaactgcaaccaccagacacaaatgagccatccaactgataccactttcggtagagctaggaataacagcaggagtaggaatgagagttagcagccttgcagtttccctatcctattaccaatgcttgtccaaggattttatggaaagcttaggtgacattgcccaaaagtatcatcaccttacaaaatcagatagagtctttggcagtggtggctttgtaaaatagaaggggactggatctcctaaatgctgaagaaggtggcttatgtctttttcctagaggaagaatgctgtttttatgtcaaccaaacaggattagtaagggatgccacccaaaaactagccgattggtaccataagatatgacaacagctgtctgagtcatggggcgcctagtcaaaatgctaatttggggctcacatctccttcctctggccagtccactattaattattatacttgccttggcttttggatcatgtttgttaaatcttttaaccagatttatttcttcttgcctagagaccattttgcaggaatttagccaattcagaggtcttgttctccataatttggaattttccttcggatttgatcaagttggatagagttggtcaaacccaatgggaaaaagatgaaaacaacaagaaacagaaacaaacagcaacaacaacaacaacaaaaacaaagcaggaaaaaactgaaactcatcttccctgctggaaacgagctcaaactccagaaaggagttacctgccttccatcatcatggacgcaggaaaatttgccttccttgttggaagcaagtaaaactccaaaaaaggagttgcacagcaaaataaacttcagatctcaac

SEQ ID NO: 365943 - DNA, 5159 bp, Homo sapiens
  misc_feature (9)..(9): n is a, c, g, or t
  misc_feature (1155)..(1155): n is a, c, g, or t
gagggcccntgccagaacctgaccatgctggcactctgattttggatttctagtctctagaactgtgaataagtacgtttctattgcgtaagccacccagtctatggtattttattatggcagcctgagctgactaatataggcttctagattggaaggggaaggaagtaaagagagagaattgatagggataaagaagaggcatgaagagacttggggtatctgctactgaagacatcagctctctatgacaaaacagcacagcatgtttggagtaagagaaagctgaagtctcaacaaacaaatagattcttaatgttctataccaccggacaaactgcagcccttttatacatatggagtactttctgggccagtcctgtggcccctttcaaatgtatggtgttgaaacgtagtaagtttatgtctttaaggtctgcccctcccttcttgcattatatcataaactcttctcttttttttttttttggagacggagtcccgctctgtcacgcaggctgccaggctggcgtacagtggcgcaatctcagctcgctgcaacctccacctcctgggttcaagcgattttcttgcctctgcctcctgagtagctgggattactggcacacaccaccatgcacagggagatatgagacatcaatcaatatatgtaagatgtacatcagtttcgtctggaaagatgggacaacatgaagcagggagggggctccctggtgacagggaattttcttgtgggcaaattgtgagggagttccttgttcaaaatgccaagaacctggatgactcatagtcaagaccctccaccagtaacatatattggcgagccagccaggagcttggaaccctcggtggacagtgcctaagcacagaggcaaccacaggtttctaacagggccactctctggtgaaactgaaaggtttctgtgtgaaagtgcctgaccaccactgcccagttcagaccactacaggaaacactccatttattccacctgacttcccacttggctgcatcctcaaccattgaaatgaatttgaccctgataatctaaggaggaaacatttgatattcttttgcaataatacttggccccagtattgtttggaatctggagtttgctgttgaatgggaaagcnggatgacgttgcatgtatccaggctttggtgctgctgtcctaagaagggtcaggcctggtcagcatatggtgctctcctttggtgctatttggctccagtgtctttggagtctgaggaggtttggcctttaaaaatcaaactgccaccggaactgctttaaaaatgtttggttcacagccttcactggattacctattggagcaaacaaagtgtaaccatgtaaaacctgtgagcttgtattgatatctcatggctagagttccaagcgaatgggtctcatgagatctgatggttttgaaaatgggagttgccctgcacaagctctccttttgcctgctgccatccgcataagatgtgatttgctcttccttgccttccaccatgattgtgaggccttcccagcatgtggaaatggtccagcctgcaataactgaagcccccagacctggaacctgaagatcccatcagccactaaacctgtgaacctgtagaagacctgaagtacctgtttaaaaggcagccaaaagataagtaaattcctatcaactttccttggtgtccttcttgtatatttactgtaagctggatataatagtagccatttttatatttttacaatttaattgctttcttccaaatggattgaatcacttcttttaaagtgttttaattaatttttatctatagaacaaaataacaaataagtattttttttttataccataatggtcacccacagcctgtgtatactaagaccatgcatactgataatcagctttattttacaaaagagtttcgctttacccctctggtaattaatggattctgggtatttattaaaaactttaacacaaagactgttaaataccaccagtccagctttggcaaggcactgttggctttgtttatctccatcatcatccaaacagactaccaatcctgatcccagcccaatcttgggcccttgaaaaaataacttaacatcctaactacaagggagaaactcctttcaaattaatgaacctggctgacttatatagccttaaaattatggaaatgacaagggttacaatgtcagaatgagcagtaaaccttccccagtcctatcagagcaaactttctggggttgcatcccctcagaaacccatttggggcccaatctcaatgcacatatcagtgcgcaaagcactaaaattccaggcaacactttgtattgagagaagccaaaattttggtcaggccctgggacatctaaagtcaccaatgtaactacaccatacagattaaaccctcacatgatcatgtaagctatgcagttacccaagctgcatcatttagaaaacctgtacagtttttatggaaaccatccctagtcaaggacactttaaatatatagtctaaataccgttaaggtaggcccactagctgtgttcacattttcccttggccaccttaccagggactttaataacttgggaaagtgaaaacaacaagctaacccacatgttcaccatagaaaacaattttgtcttgaaaaacaaggactctttttcccgtgtgggaccagttcctacttatgttttaccagccaattggactggaacctatacagttgtttatttagcccccgaaattaatatagctcccaacaaccaatccttcattatacttttaactgcaaccaccagacacaaatgagccatccaactgataccactttcggtagagctaggaataacagcaggagtaggaatgagagttagcagccttgcagtttccctatcctattaccaatgcttgtccaaggattttatggaaagcttaggtgacattgcccaaaagtatcatcaccttacaaaatcagatagagtctttggcagtggtggctttgtaaaatagaaggggactggatctcctaaatgctgaagaaggtggcttatgtctttttcctagaggaagaatgctgtttttatgtcaaccaaacaggattagtaagggatgccacccaaaaactagccgattggtaccataagatatgacaacagctgtctgagtcatggggcgcctagtcaaaatgctaatttggggctcacatctccttcctctggccagtccactattaattattatacttgccttggcttttggatcatgtttgttaaatcttttaaccagatttatttcttcttgcctagagaccattatgataatgcagcagggccaccagtcagtttcagataatgatgtcaaccccggccaccaagaagtaaccttgtctccactagacagagcaggttgcaggaatttagccaattcagaggtcttgttctccataatttggaattttccttcggatttgatcaagttggatagagttggtcaaacccaatgggaaaaagatgaaaacaacaagaaacagaaacaaacagcaacaacaacaacaacaaaaacaatgcatttaattaaatgaagatgagctcatgctggagtagggtggactctgaacccagtgggacaagcgtccttattaagaagagggaaatctggacacacacagagcagagaccgccgtgtgaagatggaggcagagatcggagagatgctgccacacgccacaaatgcctggggctcccagaaactacacggagcctcccccagcggcttcagcaggagcatggctcggccaacactttgatcttggtcttccagcctccagaacgttttcctaaaattcccttttccactggtgtgtggtgcaagatgaggcacattttccatggatggtgaacagagggaggagccttttgatcacaaccaggtcaccccacttctaagccactgtgcctccagccccacaagactaaggagagagagcgcagcgtggtggagagtgagctgtgctgggaccattgtttccgtaacctcgttttctgtgtccagctgacacaccttcaaagtggcatcaggtcctaaactgtagcttgcaatgtgcctgtttccagaaaccaaggtgaaagtgcttttagacagtgttcccatgcaagagtcccttcccagcttttttctggaaatgcatgtttctctgaactctgagtcccaagaaaaatcacttgagacaccaagaaaatgggggaagtgctaaaattgtgtgggaattcaagcttaacaataaacatcaagacatttttgataaaaatgaatccactgacatcggggaggagcaagagaacagcacgctgacactgggtcagaggctaagaccgacatttctgggaaccactcccggaagggcacagaggagacgctttcagcctctcatcagccagcctggcctgtagctgctgcacgttatgagtgtgttcctggcatgactgcttctaacagcgaccatttcattaagtttttaagtgcctggtaattgcttggttatgaccggtgtctgctccatggcagcctcttcctgggaccagatctgaacagtctggagagaggagctgtggtggcagcagacagatctctgcttcaggggccaggtgtctagaagaaatgctgaggcagtgtcacgctggtgtctgtcctccttacagaatgcctgaacagttccattgactcaaagtgaagatcaaaagaaccaaatgacagcaatagccaagtgtaatcatcagtaaccctgtgttctatccacaggtaaaaaacaatcatcctcttcattatgggtttcaattttaaatgtaatacatttttagaaatgcctatttccttttataatctctttatataatctaggttattctggctcttaggtcttcatttagctactgaaaagatttgatctcaaatcaatgatctaaccacccatgaccatctcccacctctctccccgtacaccccccagcatgaattctgggaactcaggtaaaatgctttctggaaacctgcctgtattagtctgttgtcaagctgctaataaacacatacccgaaactgggtagtttataaagga

SEQ ID NO: 365944 - DNA, 5117 bp, Homo sapiens
  misc_feature (9)..(9): n is a, c, g, or t
  misc_feature (1155)..(1155): n is a, c, g, or t
gagggcccntgccagaacctgaccatgctggcactctgattttggatttctagtctctagaactgtgaataagtacgtttctattgcgtaagccacccagtctatggtattttattatggcagcctgagctgactaatataggcttctagattggaaggggaaggaagtaaagagagagaattgatagggataaagaagaggcatgaagagacttggggtatctgctactgaagacatcagctctctatgacaaaacagcacagcatgtttggagtaagagaaagctgaagtctcaacaaacaaatagattcttaatgttctataccaccggacaaactgcagcccttttatacatatggagtactttctgggccagtcctgtggcccctttcaaatgtatggtgttgaaacgtagtaagtttatgtctttaaggtctgcccctcccttcttgcattatatcataaactcttctcttttttttttttttggagacggagtcccgctctgtcacgcaggctgccaggctggcgtacagtggcgcaatctcagctcgctgcaacctccacctcctgggttcaagcgattttcttgcctctgcctcctgagtagctgggattactggcacacaccaccatgcacagggagatatgagacatcaatcaatatatgtaagatgtacatcagtttcgtctggaaagatgggacaacatgaagcagggagggggctccctggtgacagggaattttcttgtgggcaaattgtgagggagttccttgttcaaaatgccaagaacctggatgactcatagtcaagaccctccaccagtaacatatattggcgagccagccaggagcttggaaccctcggtggacagtgcctaagcacagaggcaaccacaggtttctaacagggccactctctggtgaaactgaaaggtttctgtgtgaaagtgcctgaccaccactgcccagttcagaccactacaggaaacactccatttattccacctgacttcccacttggctgcatcctcaaccattgaaatgaatttgaccctgataatctaaggaggaaacatttgatattcttttgcaataatacttggccccagtattgtttggaatctggagtttgctgttgaatgggaaagcnggatgacgttgcatgtatccaggctttggtgctgctgtcctaagaagggtcaggcctggtcagcatatggtgctctcctttggtgctatttggctccagtgtctttggagtctgaggaggtttggcctttaaaaatcaaactgccaccggaactgctttaaaaatgtttggttcacagccttcactggattacctattggagcaaacaaagtgtaaccatgtaaaacctgtgagcttgtattgatatctcatggctagagttccaagcgaatgggtctcatgagatctgatggttttgaaaatgggagttgccctgcacaagctctccttttgcctgctgccatccgcataagatgtgatttgctcttccttgccttccaccatgattgtgaggccttcccagcatgtggaaatggtccagcctgcaataactgaagcccccagacctggaacctgaagatcccatcagccactaaacctgtgaacctgtagaagacctgaagtacctgtttaaaaggcagccaaaagataagtaaattcctatcaactttccttggtgtccttcttgtatatttactgtaagctggatataatagtagccatttttatatttttacaatttaattgctttcttccaaatggattgaatcacttcttttaaagtgttttaattaatttttatctatagaacaaaataacaaataagtattttttttttataccataatggtcacccacagcctgtgtatactaagaccatgcatactgataatcagctttattttacaaaagagtttcgctttacccctctggtaattaatggattctgggtatttattaaaaactttaacacaaagactgttaaataccaccagtccagctttggcaaggcactgttggctttgtttatctccatcatcatccaaacagactaccaatcctgatcccagcccaatcttgggcccttgaaaaaataacttaacatcctaactacaagggagaaactcctttcaaattaatgaacctggctgacttatatagccttaaaattatggaaatgacaagggttacaatgtcagaatgagcagtaaaccttccccagtcctatcagagcaaactttctggggttgcatcccctcagaaacccatttggggcccaatctcaatgcacatatcagtgcgcaaagcactaaaattccaggcaacactttgtattgagagaagccaaaattttggtcaggccctgggacatctaaagtcaccaatgtaactacaccatacagattaaaccctcacatgatcatgtaagctatgcagttacccaagctgcatcatttagaaaacctgtacagtttttatggaaaccatccctagtcaaggacactttaaatatatagtctaaataccgttaaggtaggcccactagctgtgttcacattttcccttggccaccttaccagggactttaataacttgggaaagtgaaaacaacaagctaacccacatgttcaccatagaaaacaattttgtcttgaaaaacaaggactctttttcccgtgtgggaccagttcctacttatgttttaccagccaattggactggaacctatacagttgtttatttagcccccgaaattaatatagctcccaacaaccaatccttcattatacttttaactgcaaccaccagacacaaatgagccatccaactgataccactttcggtagagctaggaataacagcaggagtaggaatgagagttagcagccttgcagtttccctatcctattaccaatgcttgtccaaggattttatggaaagcttaggtgacattgcccaaaagtatcatcaccttacaaaatcagatagagtctttggcagtggtggctttgtaaaatagaaggggactggatctcctaaatgctgaagaaggtggcttatgtctttttcctagaggaagaatgctgtttttatgtcaaccaaacaggattagtaagggatgccacccaaaaactagccgattggtaccataagatatgacaacagctgtctgagtcatggggcgcctagtcaaaatgctaatttggggctcacatctccttcctctggccagtccactattaattattatacttgccttggcttttggatcatgtttgttaaatcttttaaccagatttatttcttcttgcctagagaccattatgataatgcagcagggccaccagtcagtttcagataatgatgtcaaccccggccaccaagaagtaaccttgtctccactagacagagcaggttgcaggaatttagccaattcagaggtcttgttctccataatttggaattttccttcggatttgatcaagttggatagagttggtcaaacccaatgggaaaaagatgaaaacaacaagaaacagaaacaaacagcaacaacaacaacaacaaaaacaatgcatttaattaaatgaagatgagctcatgctggagtagggtggactctgaacccagtgggacaagcgtccttattaagaagagggaaatctggacacacacagagcagagaccgccgtgtgaagatggaggcagagatcggagagatgctgccacacgccacaaatgcctggggctcccagaaactacacggagcctcccccagcggcttcagcaggagcatggctcggccaacactttgatcttggtcttccagcctccagaacgttttcctaaaattcccttttccactggtgtgtggtgcaagatgaggcacattttccatggatggtgaacagagggaggagccttttgatcacaaccaggtcaccccacttctaagccactgtgcctccagccccacaagactaaggagagagagcgcagcgtggtggagagtgagctgtgctgggaccattgtttccgtaacctcgttttctgtgtccagctgacacaccttcaaagtggcatcaggtcctaaactgtagcttgcaatgtgcctgtttccagaaaccaaggtgaaagtgcttttagacagtgttcccatgcaagagtcccttcccagcttttttctggaaatgcatgtttctctgaactctgagtcccaagaaaaatcacttgagacaccaagaaaatgggggaagtgctaaaattgtgtgggaattcaagcttaacaataaacatcaagacatttttgataaaaatgaatccactgacatcggggaggagcaagagaacagcacgctgacactgggtcagaggctaagaccgacatttctgggaaccactcccggaagggcacagaggagacgctttcagcctctcatcagccagcctggcctgtagctgctgcacgttatgagtgtgttcctggcatgactgcttctaacagcgaccatttcattaagtttttaagtgcctggtaattgcttggttatgaccggtgtctgctccatggcagcctcttcctgtttttgcccgaatgatgaaggaggaagtttacatcttgctccctggggacaggcagagacagtgtgtgcacttccatcctacagggaccagatctgaacagtctggagagaggagctgtggtggcagcagacagatctctgcttcaggggccaggtgtctaggtgagacgccacagcgcggcagagagaacagaggcttctctgcatgcctgccagggaattggcaccatgtcaacagaaatcttaggttacaggaacaggaaccagccctgactgacgtgtgcaagcccggagctttcctttctccttgcacttcccacatgttccccacataaccagcaaccacagagccaccccctgccacccaacaactccctcctgagctagaaacttgtaagactcagctaggagtctgaatggttggatatctaaagcaaagaataatctagtttgtaacatgggaccaaaggaagaactgaaatggcacaatctgtgtaa

SEQ ID NO: 365945 - DNA, 5194 bp, Homo sapiens
  misc_feature (9)..(9): n is a, c, g, or t
  misc_feature (1155)..(1155): n is a, c, g, or t
gagggcccntgccagaacctgaccatgctggcactctgattttggatttctagtctctagaactgtgaataagtacgtttctattgcgtaagccacccagtctatggtattttattatggcagcctgagctgactaatataggcttctagattggaaggggaaggaagtaaagagagagaattgatagggataaagaagaggcatgaagagacttggggtatctgctactgaagacatcagctctctatgacaaaacagcacagcatgtttggagtaagagaaagctgaagtctcaacaaacaaatagattcttaatgttctataccaccggacaaactgcagcccttttatacatatggagtactttctgggccagtcctgtggcccctttcaaatgtatggtgttgaaacgtagtaagtttatgtctttaaggtctgcccctcccttcttgcattatatcataaactcttctcttttttttttttttggagacggagtcccgctctgtcacgcaggctgccaggctggcgtacagtggcgcaatctcagctcgctgcaacctccacctcctgggttcaagcgattttcttgcctctgcctcctgagtagctgggattactggcacacaccaccatgcacagggagatatgagacatcaatcaatatatgtaagatgtacatcagtttcgtctggaaagatgggacaacatgaagcagggagggggctccctggtgacagggaattttcttgtgggcaaattgtgagggagttccttgttcaaaatgccaagaacctggatgactcatagtcaagaccctccaccagtaacatatattggcgagccagccaggagcttggaaccctcggtggacagtgcctaagcacagaggcaaccacaggtttctaacagggccactctctggtgaaactgaaaggtttctgtgtgaaagtgcctgaccaccactgcccagttcagaccactacaggaaacactccatttattccacctgacttcccacttggctgcatcctcaaccattgaaatgaatttgaccctgataatctaaggaggaaacatttgatattcttttgcaataatacttggccccagtattgtttggaatctggagtttgctgttgaatgggaaagcnggatgacgttgcatgtatccaggctttggtgctgctgtcctaagaagggtcaggcctggtcagcatatggtgctctcctttggtgctatttggctccagtgtctttggagtctgaggaggtttggcctttaaaaatcaaactgccaccggaactgctttaaaaatgtttggttcacagccttcactggattacctattggagcaaacaaagtgtaaccatgtaaaacctgtgagcttgtattgatatctcatggctagagttccaagcgaatgggtctcatgagatctgatggttttgaaaatgggagttgccctgcacaagctctccttttgcctgctgccatccgcataagatgtgatttgctcttccttgccttccaccatgattgtgaggccttcccagcatgtggaaatggtccagcctgcaataactgaagcccccagacctggaacctgaagatcccatcagccactaaacctgtgaacctgtagaagacctgaagtacctgtttaaaaggcagccaaaagataagtaaattcctatcaactttccttggtgtccttcttgtatatttactgtaagctggatataatagtagccatttttatatttttacaatttaattgctttcttccaaatggattgaatcacttcttttaaagtgttttaattaatttttatctatagaacaaaataacaaataagtattttttttttataccataatggtcacccacagcctgtgtatactaagaccatgcatactgataatcagctttattttacaaaagagtttcgctttacccctctggtaattaatggattctgggtatttattaaaaactttaacacaaagactgttaaataccaccagtccagctttggcaaggcactgttggctttgtttatctccatcatcatccaaacagactaccaatcctgatcccagcccaatcttgggcccttgaaaaaataacttaacatcctaactacaagggagaaactcctttcaaattaatgaacctggctgacttatatagccttaaaattatggaaatgacaagggttacaatgtcagaatgagcagtaaaccttccccagtcctatcagagcaaactttctggggttgcatcccctcagaaacccatttggggcccaatctcaatgcacatatcagtgcgcaaagcactaaaattccaggcaacactttgtattgagagaagccaaaattttggtcaggccctgggacatctaaagtcaccaatgtaactacaccatacagattaaaccctcacatgatcatgtaagctatgcagttacccaagctgcatcatttagaaaacctgtacagtttttatggaaaccatccctagtcaaggacactttaaatatatagtctaaataccgttaaggtaggcccactagctgtgttcacattttcccttggccaccttaccagggactttaataacttgggaaagtgaaaacaacaagctaacccacatgttcaccatagaaaacaattttgtcttgaaaaacaaggactctttttcccgtgtgggaccagttcctacttatgttttaccagccaattggactggaacctatacagttgtttatttagcccccgaaattaatatagctcccaacaaccaatccttcattatacttttaactgcaaccaccagacacaaatgagccatccaactgataccactttcggtagagctaggaataacagcaggagtaggaatgagagttagcagccttgcagtttccctatcctattaccaatgcttgtccaaggattttatggaaagcttaggtgacattgcccaaaagtatcatcaccttacaaaatcagatagagtctttggcagtggtggctttgtaaaatagaaggggactggatctcctaaatgctgaagaaggtggcttatgtctttttcctagaggaagaatgctgtttttatgtcaaccaaacaggattagtaagggatgccacccaaaaactagccgattggtaccataagatatgacaacagctgtctgagtcatggggcgcctagtcaaaatgctaatttggggctcacatctccttcctctggccagtccactattaattattatacttgccttggcttttggatcatgtttgttaaatcttttaaccagatttatttcttcttgcctagagaccattatgataatgcagcagggccaccagtcagtttcagataatgatgtcaaccccggccaccaagaagtaaccttgtctccactagacagagcaggttgcaggaatttagccaattcagaggtcttgttctccataatttggaattttccttcggatttgatcaagttggatagagttggtcaaacccaatgggaaaaagatgaaaacaacaagaaacagaaacaaacagcaacaacaacaacaacaaaaacaatgcatttaattaaatgaagatgagctcatgctggagtagggtggactctgaacccagtgggacaagcgtccttattaagaagagggaaatctggacacacacagagcagagaccgccgtgtgaagatggaggcagagatcggagagatgctgccacacgccacaaatgcctggggctcccagaaactacacggagcctcccccagcggcttcagcaggagcatggctcggccaacactttgatcttggtcttccagcctccagaacgattttccatggatggtgaacagagggaggagccttttgatcacaaccaggtcaccccacttctaagccactgtgcctccagccccacaagactaaggagagagagcgcagcgtggtggagagtgagctgtgctgggaccattgtttccgtaacctcgttttctgtgtccagctgacacaccttcaaagtggcatcaggtcctaaactgtagcttgcaatgtgcctgtttccagaaaccaaggtgaaagtgcttttagacagtgttcccatgcaagagtcccttcccagcttttttctggaaatgcatgtttctctgaactctgagtcccaagaaaaatcacttgagacaccaagaaaatgggggaagtgctaaaattgtgtgggaattcaagcttaacaataaacatcaagacatttttgataaaaatgaatccactgacatcggggaggagcaagagaacagcacgctgacactgggtcagaggctaagaccgacatttctgggaaccactcccggaagggcacagaggagacgctttcagcctctcatcagccagcctggcctgtagctgctgcacgttatgagtgtgttcctggcatgactgcttctaacagcgaccatttcattaagtttttaagtgcctggtaattgcttggttatgaccggtgtctgctccatggcagcctcttcctgtttttgcccgaatgatgaaggaggaagtttacatcttgctccctggggacaggcagagacagtgtgtgcacttccatcctacagggaccagatctgaacagtctggagagaggagctgtggtggcagcagacagatctctgcttcaggggccaggtgtctagaagaaatgctgaggcagtgtcacgctggtgtctgtcctccttacagaatgcctgaacagttccattgactcaaagtgaagatcaaaagaaccaaatgacagcaatagccaagtgtaatcatcagtaaccctgtgttctatccacaggtaaaaaacaatcatcctcttcattatgggtttcaattttaaatgtaatacatttttagaaatgcctatttccttttataatctctttatataatctaggttattctggctcttaggtcttcatttagctactgaaaagatttgatctcaaatcaatgatctaaccacccatgaccatctcccacctctctccccgtacaccccccagcatgaattctgggaactcaggtaaaatgctttctggaaacctgcctgtattagtctgttgtcaagctgctaataaacacatacccgaaactgggtagtttataaagga

SEQ ID NO: 365946 - DNA, 1749 bp, Homo sapiens
ctgacaagtgtccagcagggtggacttcagactccctgttaggaactgaattgtgtcccccaaaaagagaaagtcaccccagggtatgacctaattcaggaaaggtcattgcagatgcatttaattaaatgaagatgagctcatgctggagtagggtggactctgaacccagtgggacaagcgtccttattaagaagagggaaatctggacacacacagagcagagaccgccgtgtgaagatggaggcagagatcggagagatgctgccacacgccacaaatgcctggggctcccagaaactacacggagcctcccccagcggcttcagcaggagcatggctcggccaacactttgatcttggtcttccagcctccagaacgttttcctaaaattcccttttccactggtgtgtggtgcaagatgaggcacattttccatggatggtgaacagagggaggagccttttgatcacaaccaggtcaccccacttctaagccactgtgcctccagccccacaagactaaggagagagagcgcagcgtggtggagagtgagctgtgctgggaccattgtttccgtaacctcgttttctgtgtccagctgacacaccttcaaagtggcatcaggtcctaaactgtagcttgcaatgtgcctgtttccagaaaccaaggtgaaagtgcttttagacagtgttcccatgcaagagtcccttcccagcttttttctggaaatgcatgtttctctgaactctgagtcccaagaaaaatcacttgagacaccaagaaaatgggggaagtgctaaaattgtgtgggaattcaagcttaacaataaacatcaagacatttttgataaaaatgaatccactgacatcggggaggagcaagagaacagcacgctgacactgggtcagaggctaagaccgacatttctgggaaccactcccggaagggcacagaggagacgctttcagcctctcatcagccagcctggcctgtagctgctgcacgttatgagtgtgttcctggcatgactgcttctaacagcgaccatttcattaagtttttaagtgcctggtaattgcttggttatgaccggtgtctgctccatggcagcctcttcctgtttttgcccgaatgatgaaggaggaagtttacatcttgctccctggggacaggcagagacagtgtgtgcacttccatcctacagggaccagatctgaacagtctggagagaggagctgtggtggcagcagacagatctctgcttcaggggccaggtgtctagaagaaatgctgaggcagtgtcacgctggtgtctgtcctccttacagaatgcctgaacagttccattgactcaaagtgaagatcaaaagaaccaaatgacagcaatagccaagtgtaatcatcagtaaccctgtgttctatccacaggtaaaaaacaatcatcctcttcattatgggtttcaattttaaatgtaatacatttttagaaatgcctatttccttttataatctctttatataatctaggttattctggctcttaggtcttcatttagctactgaaaagatttgatctcaaatcaatgatctaaccacccatgaccatctcccacctctctccccgtacaccccccagcatgaattctgggaactcaggtaaaatgctttctggaaacctgcctgtattagtctgttgtcaagctgctaataaacacatacccgaaactgggtagtttataaagga

SEQ ID NO: 365947 - DNA, 2465 bp, Homo sapiens
aggcctgggccgggccgtgacggcggcgctaggacccggcgggccgcgggtgcggcgaggcctgggcggcctgaggagcgcggaccccggcgctcggctcccggcgccatgtgagggggctcgggggccgcggggggccgggcgctccccgccggagatgaggaaactgaggctcagagaggtcacatggcttgctcgaggccccccagccagtgtgaacccacatccctgcccccagggccacctgcaggacgccgacacctacccctcagcagacgccggagagaaatgagtagcaacaaagagcagcggtcagcagtgttcgtgatcctctttgccctcatcaccatcctcatcctctacagctccaacagtgccaatgaggtcttccattacggctccctgcggggccgtagccgccgacctgtcaacctcaagaagtggagcatcactgacggctatgtccccattctcggcaacaagacactgccctctcggtgccaccagtgtgtgattgtcagcagctccagccacctgctgggcaccaagctgggccctgagatcgagcgggctgagtgtacaatccgcatgaatgatgcacccaccactggctactcagctgatgtgggcaacaagaccacctaccgcgtcgtggcccattccagtgtgttccgcgtgctgaggaggccccaggagtttgtcaaccggacccctgaaaccgtgttcatcttctgggggcccccgagcaagatgcagaagccccagggcagcctcgtgcgtgtgatccagcgagcgggcctggtgttccccaacatggaagcatatgccgtctctcccggccgcatgcggcaatttgacgacctcttccggggtgagacgggcaaggacagggagaagtctcattcgtggttgagcacaggctggtttaccatggtgatcgcggtggagttgtgtgaccacgtgcatgtctatggcatggtcccccccaactactgcagccagcggccccgcctccagcgcatgccctaccactactacgagcccaaggggccggacgaatgtgtcacctacatccagaatgagcacagtcgcaagggcaaccaccaccgcttcatcaccgagaaaagggtcttctcatcgtgggcccagctgtatggcatcaccttctcccacccctcctggacctaggccacccagcctgtgggacctcaggagggtcagaggagaagcagcctccgcccagccgctaggccagggaccatcttctggccaatcaaggcttgctggagtgtctcccagccaatcagggccttgaggaggatgtatcctccagccaatcagggcctggggaatctgttggcgaatcagggatttgggagtctatgtggttaatcaggggtgtctttcttgtgcagtcagggtctgcgcacagtcaatcagggtagagggggtatttctgagtcaatctgaggctaaggacatgtcctttcccatgaggccttggttcagagccccaggaatggaccccccaatcactccccactctgctgggataatggggtcctgtcccaaggagctgggaacttggtgttgccccctcaatttccagcaccagaaagagagattgtgtgggggtagaagctgtctggaggcccggccagagaatttgtggggttgtggaggttgtgggggcggtggggaggtcccagaggtgggaggctggcatccaggtcttggctctgccctgagaccttggacaaacccttccccctctctgggcacccttctgcccacaccagtttccagtgcggagtctgagaccctttccacctcccctacaagtgccctcgggtctgtcctccccgtctggaccctcccagccactatcccttgctggaaggctcagctctttggggggtctggggtgacctccccacctcctggaaaactttagggtatttttgcgcaaactccttcagggttgggggactctgaaggaaacgggacaaaaccttaagctgttttcttagcccctcagccagctgccattagcttggctcttaaagggccaggcctccttttctgccctctagcagggaggttttccaactgttggaggcgcctttggggctgcccctttgtctggagtcactgggggcttccgagggtctccctcgaccctctgtcgtcctgggatggctgtcgggagctgtatcacctgggttctgtcccctggctctgtatcaggcactttattaaagctgggcctcagtggggtgtgtttgtctcctgctcttctggagcctggaaggaaagggcttcaggaggaggctgtgaggctggagggaccagatggaggaggccagcagctagccattgcacactggggtgatgggtgggggcggtgactgccccagacttggttttgtaatgatttgtacaggaataaacacacctacgctccg

SEQ ID NO: 365948 - DNA, 2509 bp, Homo sapiens
aggcctgggccgggccgtgacggcggcgctaggacccggcgggccgcgggtgcggcgaggcctgggcggcctgaggagcgcggaccccggcgctcggctcccggcgccatgtgagggggctcgggggccgcggggggccgggcgctccccgccggaggtgtgaacccacatccctgcccccagggccacctgcaggacgccgacacctacccctcagcagacgccggagagaaatgagtagcaacaaagagcagcggtcagcagtgttcgtgatcctctttgccctcatcaccatcctcatcctctacagctccaacagtgccaatgaggtcttccattacggctccctgcggggccgtagccgccgacctgtcaacctcaagaagtggagcatcactgacggctatgtccccattctcggcaacaagacactgccctctcggtgccaccagtgtgtgattgtcagcagctccagccacctgctgggcaccaagctgggccctgagatcgagcgggctgagtgtacaatccgcatgaatgatgcacccaccactggctactcagctgatgtgggcaacaagaccacctaccgcgtcgtggcccattccagtgtgttccgcgtgctgaggaggccccaggagtttgtcaaccggacccctgaaaccgtgttcatcttctgggggcccccgagcaagatgcagaagccccagggcagcctcgtgcgtgtgatccagcgagcgggcctggtgttccccaacatggaagcatatgccgtctctcccggccgcatgcggcaatttgacgacctcttccggggtgagacgggcaaggacagggagaagtctcattcgtggttgagcacaggctggtttaccatggtgatcgcggtggagttgtgtgaccacgtgcatgtctatggcatggtcccccccaactactgcagccagcggccccgcctccagcgcatgccctaccactactacgagcccaaggggccggacgaatgtgtcacctacatccagaatgagcacagtcgcaagggcaaccaccaccgcttcatcaccgagaaaagggtcttctcatcgtgggcccagctgtatggcatcaccttctcccacccctcctggacctaggccacccagcctgtgggacctcaggagggtcagaggagaagcagcctccgcccagccgctaggccagggaccatcttctggccaatcaaggcttgctggagtgtctcccagccaatcagggccttgaggaggatgtatcctccagccaatcagggcctggggaatctgttggcgaatcagggatttgggagtctatgtggttaatcaggggtgtctttcttgtgcagtcagggtctgcgcacagtcaatcagggtagagggggtatttctgagtcaatctgaggctaaggacatgtcctttcccatgaggccttggttcagagccccaggaatggaccccccaatcactccccactctgctgggataatggggtcctgtcccaaggagctgggaacttggtgttgccccctcaatttccagcaccagaaagagagattgtgtgggggtagaagctgtctggaggcccggccagagaatttgtggggttgtggaggttgtgggggcggtggggaggtcccagaggtgggaggctggcatccaggtcttggctctgccctgagaccttggacaaacccttccccctctctgggcacccttctgcccacaccagtttccagtgcggagtctgagaccctttccacctcccctacaagtgccctcgggtctgtcctccccgtctggaccctcccagccactatcccttgctggaaggctcagctctttggggggtctggggtgacctccccacctcctggaaaactttagggtatttttgcgcaaactccttcagggttgggggactctgaaggaaacgggacaaaaccttaagctgttttcttagcccctcagccagctgccattagcttggctcttaaagggccaggcctccttttctgccctctagcagggaggttttccaactgttggaggcgcctttggggctgcccctttgtctggagtcactgggggcttccgagggtctccctcgaccctctgtcgtcctgggatggctgtcgggagctgtatcacctgggttctgtcccctggctctgtatcaggcactttattaaagctgggcctcagtggggtgtgtttgtctcctgctcttctggagcctggaaggaaagggcttcaggaggaggctgtgaggctggagggaccagatggaggaggccagcagctagccattgcacactggggtgatgggtgggggcggtgactgccccagacttggttttgtaatgatttgtacaggaataaacacacctacgctccggcttcgtgtcctgtgtcacctgggtcgagcacagccttctggtccagcgctgcatgcggcctcaggaccacgtcttccggttgggggctcccagtaaag

SEQ ID NO: 365949 - DNA, 2476 bp, Homo sapiens
ccaggcagatggagatgatccttgacaggtctggtggctggttcggggtctactgaaggctgtcttgatcaggaaactgaagactctctgcttttgccacagcagttcctgcagcttccttgaggtgtgaacccacatccctgcccccagggccacctgcaggacgccgacacctacccctcagcagacgccggagagaaatgagtagcaacaaagagcagcggtcagcagtgttcgtgatcctctttgccctcatcaccatcctcatcctctacagctccaacagtgccaatgaggtcttccattacggctccctgcggggccgtagccgccgacctgtcaacctcaagaagtggagcatcactgacggctatgtccccattctcggcaacaagacactgccctctcggtgccaccagtgtgtgattgtcagcagctccagccacctgctgggcaccaagctgggccctgagatcgagcgggctgagtgtacaatccgcatgaatgatgcacccaccactggctactcagctgatgtgggcaacaagaccacctaccgcgtcgtggcccattccagtgtgttccgcgtgctgaggaggccccaggagtttgtcaaccggacccctgaaaccgtgttcatcttctgggggcccccgagcaagatgcagaagccccagggcagcctcgtgcgtgtgatccagcgagcgggcctggtgttccccaacatggaagcatatgccgtctctcccggccgcatgcggcaatttgacgacctcttccggggtgagacgggcaaggacagggagaagtctcattcgtggttgagcacaggctggtttaccatggtgatcgcggtggagttgtgtgaccacgtgcatgtctatggcatggtcccccccaactactgcagccagcggccccgcctccagcgcatgccctaccactactacgagcccaaggggccggacgaatgtgtcacctacatccagaatgagcacagtcgcaagggcaaccaccaccgcttcatcaccgagaaaagggtcttctcatcgtgggcccagctgtatggcatcaccttctcccacccctcctggacctaggccacccagcctgtgggacctcaggagggtcagaggagaagcagcctccgcccagccgctaggccagggaccatcttctggccaatcaaggcttgctggagtgtctcccagccaatcagggccttgaggaggatgtatcctccagccaatcagggcctggggaatctgttggcgaatcagggatttgggagtctatgtggttaatcaggggtgtctttcttgtgcagtcagggtctgcgcacagtcaatcagggtagagggggtatttctgagtcaatctgaggctaaggacatgtcctttcccatgaggccttggttcagagccccaggaatggaccccccaatcactccccactctgctgggataatggggtcctgtcccaaggagctgggaacttggtgttgccccctcaatttccagcaccagaaagagagattgtgtgggggtagaagctgtctggaggcccggccagagaatttgtggggttgtggaggttgtgggggcggtggggaggtcccagaggtgggaggctggcatccaggtcttggctctgccctgagaccttggacaaacccttccccctctctgggcacccttctgcccacaccagtttccagtgcggagtctgagaccctttccacctcccctacaagtgccctcgggtctgtcctccccgtctggaccctcccagccactatcccttgctggaaggctcagctctttggggggtctggggtgacctccccacctcctggaaaactttagggtatttttgcgcaaactccttcagggttgggggactctgaaggaaacgggacaaaaccttaagctgttttcttagcccctcagccagctgccattagcttggctcttaaagggccaggcctccttttctgccctctagcagggaggttttccaactgttggaggcgcctttggggctgcccctttgtctggagtcactgggggcttccgagggtctccctcgaccctctgtcgtcctgggatggctgtcgggagctgtatcacctgggttctgtcccctggctctgtatcaggcactttattaaagctgggcctcagtggggtgtgtttgtctcctgctcttctggagcctggaaggaaagggcttcaggaggaggctgtgaggctggagggaccagatggaggaggccagcagctagccattgcacactggggtgatgggtgggggcggtgactgccccagacttggttttgtaatgatttgtacaggaataaacacacctacgctccggcttcgtgtcctgtgtcacctgggtcgagcacagccttctggtccagcgctgcatgcggcctcaggaccacgtcttccggttgggggctcccagtaaag

SEQ ID NO: 365950 - DNA, 2486 bp, Homo sapiens
  misc_feature (2474)..(2474): n is a, c, g, or t
aggcctgggccgggccgtgacggcggcgctaggacccggcgggccgcgggtgcggcgaggcctgggcggcctgaggagcgcggaccccggcgctcggctcccggcgccatgtgagggggctcgggggccgcggggggccgggcgctccccgccggagatgaggaaactgaggctcagagaggtcacatggcttgctcgaggccccccagccagtgtgaacccacatccctgcccccagggccacctgcaggacgccgacacctacccctcagcagacgccggagagaaatgagtagcaacaaagagcagcggtcagcagtgttcgtgatcctctttgccctcatcaccatcctcatcctctacagctccaacagtgccaatgaggtcttccattacggctccctgcggggccgtagccgccgacctgtcaacctcaagaagtggagcatcactgacggctatgtccccattctcggcaacaagacactgccctctcggtgccaccagtgtgtgattgtcagcagctccagccacctgctgggcaccaagctgggccctgagatcgagcgggctgagtgtacaatccgcatgaatgatgcacccaccactggctactcagctgatgtgggcaacaagaccacctaccgcgtcgtggcccattccagtgtgttccgcgtgctgaggaggccccaggagtttgtcaaccggacccctgaaaccgtgttcatcttctgggggcccccgagcaagatgcagaagccccagggcagcctcgtgcgtgtgatccagcgagcgggcctggtgttccccaacatggaagcatatgccgtctctcccggccgcatgcggcaatttgacgacctcttccggggtgagacgggcaaggacagggagaagtctcattcgtggttgagcacaggctggtttaccatggtgatcgcggtggagttgtgtgaccacgtgcatgtctatggcatggtcccccccaactactgcagccagcggccccgcctccagcgcatgccctaccactactacgagcccaaggggccggacgaatgtgtcacctacatccagaatgagcacagtcgcaagggcaaccaccaccgcttcatcaccgagaaaagggtcttctcatcgtgggcccagctgtatggcatcaccttctcccacccctcctggacctaggccacccagcctgtgggacctcaggagggtcagaggagaagcagcctccgcccagccgctaggccagggaccatcttctggccaatcaaggcttgctggagtgtctcccagccaatcagggccttgaggaggatgtatcctccagccaatcagggcctggggaatctgttggcgaatcagggatttgggagtctatgtggttaatcaggggtgtctttcttgtgcagtcagggtctgcgcacagtcaatcagggtagagggggtatttctgagtcaatctgaggctaaggacatgtcctttcccatgaggccttggttcagagccccaggaatggaccccccaatcactccccactctgctgggataatggggtcctgtcccaaggagctgggaacttggtgttgccccctcaatttccagcaccagaaagagagattgtgtgggggtagaagctgtctggaggcccggccagagaatttgtggggttgtggaggttgtgggggcggtggggaggtcccagaggtgggaggctggcatccaggtcttggctctgccctgagaccttggacaaacccttccccctctctgggcacccttctgcccacaccagtttccagtgcggagtctgagaccctttccacctcccctacaagtgccctcgggtctgtcctccccgtctggaccctcccagccactatcccttgctggaaggctcagctctttggggggtctggggtgacctccccacctcctggaaaactttagggtatttttgcgcaaactccttcagggttgggggactctgaaggaaacgggacaaaaccttaagctgttttcttagcccctcagccagctgccattagcttggctcttaaagggccaggcctccttttctgccctctagcagggaggttttccaactgttggaggcgcctttggggctgcccctttgtctggagtcactgggggcttccgagggtctccctcgaccctctgtcgtcctgggatggctgtcgggagctgtatcacctgggttctgtcccctggctctgtatcaggcactttattaaagctgggcctcagtggggtgtgtttgtctcctgctcttctggagcctggaaggaaagggcttcaggaggaggctgtgaggctggagggaccagatggaggaggccagcagctagccattgcacactggggtgatgggtgggggcggtgactgccccagacttggttttgtaatgatttgtacaggaataaacacacctacgctccgaaaaacaanaaaaaaaacaac

SEQ ID NO: 365951 - DNA, 2502 bp, Homo sapiens
aggcctgggccgggccgtgacggcggcgctaggacccggcgggccgcgggtgcggcgaggcctgggcggcctgaggagcgcggaccccggcgctcggctcccggcgccatgtgagggggctcgggggccgcggggggccgggcgctccccgccggagatgaggaaactgaggctcagagaggtcacatggcttgctcgaggccccccagccagtgtgaacccacatccctgcccccagggccacctgcaggacgccgacacctacccctcagcagacgccggagagaaatgagtagcaacaaactccaacagtgccaatgaggtcttccattacggctccctgcggggccgtagccgccgacctgtcaacctcaagaagtggagcatcactgacggctatgtccccattctcggcaacaagacactgccctctcggtgccaccagtgtgtgattgtcagcagctccagccacctgctgggcaccaagctgggccctgagatcgagcgggctgagtgtacaatccgcatgaatgatgcacccaccactggctactcagctgatgtgggcaacaagaccacctaccgcgtcgtggcccattccagtgtgttccgcgtgctgaggaggccccaggagtttgtcaaccggacccctgaaaccgtgttcatcttctgggggcccccgagcaagatgcagaagccccagggcagcctcgtgcgtgtgatccagcgagcgggcctggtgttccccaacatggaagcatatgccgtctctcccggccgcatgcggcaatttgacgacctcttccggggtgagacgggcaaggacagggagaagtctcattcgtggttgagcacaggctggtttaccatggtgatcgcggtggagttgtgtgaccacgtgcatgtctatggcatggtcccccccaactactgcagccagcggccccgcctccagcgcatgccctaccactactacgagcccaaggggccggacgaatgtgtcacctacatccagaatgagcacagtcgcaagggcaaccaccaccgcttcatcaccgagaaaagggtcttctcatcgtgggcccagctgtatggcatcaccttctcccacccctcctggacctaggccacccagcctgtgggacctcaggagggtcagaggagaagcagcctccgcccagccgctaggccagggaccatcttctggccaatcaaggcttgctggagtgtctcccagccaatcagggccttgaggaggatgtatcctccagccaatcagggcctggggaatctgttggcgaatcagggatttgggagtctatgtggttaatcaggggtgtctttcttgtgcagtcagggtctgcgcacagtcaatcagggtagagggggtatttctgagtcaatctgaggctaaggacatgtcctttcccatgaggccttggttcagagccccaggaatggaccccccaatcactccccactctgctgggataatggggtcctgtcccaaggagctgggaacttggtgttgccccctcaatttccagcaccagaaagagagattgtgtgggggtagaagctgtctggaggcccggccagagaatttgtggggttgtggaggttgtgggggcggtggggaggtcccagaggtgggaggctggcatccaggtcttggctctgccctgagaccttggacaaacccttccccctctctgggcacccttctgcccacaccagtttccagtgcggagtctgagaccctttccacctcccctacaagtgccctcgggtctgtcctccccgtctggaccctcccagccactatcccttgctggaaggctcagctctttggggggtctggggtgacctccccacctcctggaaaactttagggtatttttgcgcaaactccttcagggttgggggactctgaaggaaacgggacaaaaccttaagctgttttcttagcccctcagccagctgccattagcttggctcttaaagggccaggcctccttttctgccctctagcagggaggttttccaactgttggaggcgcctttggggctgcccctttgtctggagtcactgggggcttccgagggtctccctcgaccctctgtcgtcctgggatggctgtcgggagctgtatcacctgggttctgtcccctggctctgtatcaggcactttattaaagctgggcctcagtggggtgtgtttgtctcctgctcttctggagcctggaaggaaagggcttcaggaggaggctgtgaggctggagggaccagatggaggaggccagcagctagccattgcacactggggtgatgggtgggggcggtgactgccccagacttggttttgtaatgatttgtacaggaataaacacacctacgctccggcttcgtgtcctgtgtcacctgggtcgagcacagccttctggtccagcgctgcatgcggcctcaggaccacgtcttccggttgggggctcccagtaaag

SEQ ID NO: 365952 - DNA, 2436 bp, Homo sapiens
aggcctgggccgggccgtgacggcggcgctaggacccggcgggccgcgggtgcggcgaggcctgggcggcctgaggagcgcggaccccggcgctcggctcccggcgccatgtgagggggctcgggggccgcggggggccgggcgctccccgccggagatgaggaaactgaggctcagagaggtcacatggcttgctcgaggccccccagccagtgtgaacccacatccctgcccccagggccacctgcaggacgccgacacctacccctcagcagacgccggagagaaatgagtagcaacaaagagcagcggtcagcagtgttcgtgatcctctttgccctcatcaccatcctcatcctctacagctccaacagtgccaatgaggtcttccattacggctccctgcggggccgtagccgccgacctgtcaacctcaagaagtggagcatcactgacggctatgtccccattctcggcaacaagacactgccctctcggtgccaccagtgtgtgattgtcagcagctccagccacctgctgggcaccaagctgggccctgagatcgagcgggctgagtgtacaatccgcatgaatgatgcacccaccactggctactcagctgatgtgggcaacaagaccacctaccgcgtcgtggcccattccagtgtgttccgcgtgctgaggaggccccaggagtttgtcaaccggacccctgaaaccgtgttcatcttctgggggcccccgagcaagatgcagaagccccagggcagcctcgtgcgtgtgatccagcgagcgggcctggtgttccccaacatggaagcatatgccgtctctcccggccgcatgcggcaatttgacgacctcttccggggtgagacgggcaaggacagggagaagtctcattcgtggttgagcacaggctggtttaccatggtgatcgcggtggagttgtgtgaccacgtgcatgtctatggcatggtcccccccaactactgcagccagcggccccgcctccagcgcatgccctaccactactacgagcccaaggggccggacgaatgtgtcacctacatccagaatgagcacagtcgcaagggcaaccaccaccgcttcatcaccgagaaaagggtcttctcatcgtgggcccagctgtatggcatcaccttctcccacccctcctggacctaggccacccagcctgtgggacctcaggagggtcagaggagaagcagcctccgcccagccgctaggccagggaccatcttctggccaatcaaggcttgctggagtgtctcccagccaatcagggccttgaggaggatgtatcctccagccaatcagggcctggggaatctgttggcgaatcagggatttgggagtctatgtggttaatcaggggtgtctttcttgtgcagtcagggtctgcgcacagtcaatcagggtagagggggtatttctgagtcaatctgaggctaaggacatgtcctttcccatgaggccttggttcagagccccaggaatggaccccccaatcactccccactctgctgggataatggggtcctgtcccaaggagctgggaacttggtgttgccccctcaatttccagcaccagaaagagagattgtgtgggggtagaagctgtctggaggcccggccagagaatttgtggggttgtggaggttgtgggggcggtggggaggtcccagaggtgggaggctggcatccaggtcttggctctgccctgagaccttggacaaacccttccccctctctgggcacccttctgcccacaccagtttccagtgcggagtctgagaccctttccacctcccctacaagtgccctcgggtctgtcctccccgtctggaccctcccagccactatcccttgctggaaggctcagctctttggggggtctggggtgacctccccacctcctggaaaactttagggtatttttgcgcaaactccttcagggttgggggactctgaaggaaacgggacaaaaccttaagctgttttcttagcccctcagccagctgccacttttctgccctctagcagggaggttttccaactgttggaggcgcctttggggctgcccctttgtctggagtcactgggggcttccgagggtctccctcgaccctctgtcgtcctgggatggctgtcgggagctgtatcacctgggttctgtcccctggctctgtatcaggcactttattaaagctgggcctcagtggggtgtgtttgtctcctgctcttctggagcctggaaggaaagggcttcaggaggaggctgtgaggctggagggaccagatggaggaggccagcagctagccattgcacactggggtgatgggtgggggcggtgactgccccagacttggttttgtaatgatttgtacaggaataaacacacctacgctccg

SEQ ID NO: 365953 - DNA, 1417 bp, Homo sapiens
aggcctgggccgggccgtgacggcggcgctaggacccggcgggccgcgggtgcggcgaggcctgggcggcctgaggagcgcggaccccggcgctcggctcccggcgccatgtgagggggctcgggggccgcggggggccgggcgctccccgccggagatgaggaaactgaggctcagagaggtcacatggcttgctcgaggccccccagccagtgtgaacccacatccctgcccccagggccacctgcaggacgccgacacctacccctcagcagacgccggagagaaatgagtagcaacaaagagcagcggtcagcagtgttcgtgatcctctttgccctcatcaccatcctcatcctctacagctccaacagtgccaatgaggtcttccattacggctccctgcggggccgtagccgccgacctgtcaacctcaagaagtggagcatcactgacggctatgtccccattctcggcaacaagacactgccctctcggtgccaccagtgtgtgattgtcagcagctccagccacctgctgggcaccaagctgggccctgagatcgagcgggctgagtgtacaatccgcatgaatgatgcacccaccactggctactcagctgatgtgggcaacaagaccacctaccgcgtcgtggcccattccagtgtgttccgcgtgctgaggaggccccaggagtttgtcaaccggacccctgaaaccgtgttcatcttctgggggcccccgagcaagatgcagaagccccagggcagcctcgtgcgtgtgatccagcgagcgggcctggtgttccccaacatggaagcatatgccgtctctcccggccgcatgcggcaatttgacgacctcttccggggtgagacgggcaaggacagggagaagtctcattcgtggttgagcacaggctggtttaccatggtgatcgcggtggagttgtgtgaccacgtgcatgtctatggcatggtcccccccaactactgcagccagcggccccgcctccagcgcatgccctaccactactacgagcccaaggggccggacgaatgtgtcacctacatccagaatgagcacagtcgcaagggcaaccaccaccgcttcatcaccgagaaaagggtcttctcatcgtgggcccagctgtatggcatcaccttctcccacccctcctggacctaggccacccagcctgtgggacctcaggagggtcagaggagaagcagcctcgccagcgtagcagacatttctggcatcagttgtggggttctccagcattggctgagagtgtgtctcagcatcaggctgggaactgtgggaccagtgggcacggggacacggggttgggggggggccgccccggagggttcggcaccggggagccgggggtaaccgagcctcccgggtagcc

SEQ ID NO: 365954 - DNA, 698 bp, Homo sapiens
aggcctgggccgggccgtgacggcggcgctaggacccggcgggccgcgggtgcggcgaggcctgggcggcctgaggagcgcggaccccggcgctcggctcccggcgccatgtgagggggctcgggggccgcggggggccgggcgctccccgccggaggtgtgaacccacatccctgcccccagggccacctgcaggacgccgacacctacccctcagcagacgccggagagaaatgagtagcaacaaagagcagcggtcagcagtgttcgtgatcctctttgccctcatcaccatcctcatcctctacagcttttctgccctctagcagggaggttttccaactgttggaggcgcctttggggctgcccctttgtctggagtcactgggggcttccgagggtctccctcgaccctctgtcgtcctgggatggctgtcgggagctgtatcacctgggttctgtcccctggctctgtatcaggcactttattaaagctgggcctcagtggggtgtgtttgtctcctgctcttctggagcctggaaggaaagggcttcaggaggaggctgtgaggctggagggaccagatggaggaggccagcagctagccattgcacactggggtgatgggtgggggcggtgactgccccagacttggttttgtaatgatttgtacaggaataaacacacctacgctccg

SEQ ID NO: 365955 - DNA, 575 bp, Homo sapiens
catattggccaggctggtctggatctcttcacctagtgatctgcccacctcggcctcccaaagggctgggattacagacgtgagccaccgcgcccggccaatgtgggagcactttcaagccccgcgtgtcccttgccacatctgcttgaatccttccaacaaccccttgagttaccgactcttattgttcccatttcacagatgaggaaactgaggctcagagaggtcacatggcttgctcgaggccccccagccagtaagtggtgaaaccgggattcgcactggcagctgacatgctgtactgaccatggccttctcagagcaggattgtgacggggcggaccagggggacggtggtcctggctgagggcacagctcgggcaaaggtgggaaagtgggcggcgggcagggggcatccgcaggaaagggtggccacgcgtagtaagatataggcggctggacccctgggcgccttgaatgccaaggtctcagggcagatggggccaccccaggattctggactcctgtcttttgctctaacggtctgtgagggcaagaacaagccgctccctgct

SEQ ID NO: 365956 - DNA, 2564 bp, Homo sapiens
aggcctgggccgggccgtgacggcggcgctaggacccggcgggccgcgggtgcggcgaggcctgggcggcctgaggagcgcggaccccggcgctcggctcccggcgccatgtgagggggctcgggggccgcggggggccgggcgctccccgccggagatgaggaaactgaggctcagagaggtcacatggcttgctcgaggccccccagccagtgtgaacccacatccctgcccccagggccacctgcaggacgccgacacctacccctcagcagacgccggagagaaatgagtagcaacaaagagcagcggtcagcagtgttcgtgatcctctttgccctcatcaccatcctcatcctctacagctccaacagtgccaatgaggtcttccattacggctccctgcggggccgtagccgccgacctgtcaacctcaagaagtggagcatcactgacggctatgtccccattctcggcaacaagacactgccctctcggtgccaccagtgtgtgattgtcagcagctccagccacctgctgggcaccaagctgggccctgagatcgagcgggctgagtgtacaatccgcatgaatgatgcacccaccactggctactcagctgatgtgggcaacaagaccacctaccgcgtcgtggcccattccagtgtgttccgcgtgctgaggaggccccaggagtttgtcaaccggacccctgaaaccgtgttcatcttctgggggcccccgagcaagatgcagaagccccagggcagcctcgtgcgtgtgatccagcgagcgggcctggtgttccccaacatggaagcatatgccgtctctcccggccgcatgcggcaatttgacgacctcttccggggtgagacgggcaaggacagggagaagtctcattcgtggttgagcacaggctggtttaccatggtgatcgcggtggagttgtgtgaccacgtgcatgtctatggcatggtcccccccaactactgcagccagcggccccgcctccagcgcatgccctaccactactacgagcccaaggggccggacgaatgtgtcacctacatccagaatgagcacagtcgcaagggcaaccaccaccgcttcatcaccgagaaaagggtcttctcatcgtgggcccagctgtatggcatcaccttctcccacccctcctggacctaggccacccagcctgtgggacctcaggagggtcagaggagaagcagcctccgcccagccgctaggccagggaccatcttctggccaatcaaggcttgctggagtgtctcccagccaatcagggccttgaggaggatgtatcctccagccaatcagggcctggggaatctgttggcgaatcagggatttgggagtctatgtggttaatcaggggtgtctttcttgtgcagtcagggtctgcgcacagtcaatcagggtagagggggtatttctgagtcaatctgaggctaaggacatgtcctttcccatgaggccttggttcagagccccaggaatggaccccccaatcactccccactctgctgggataatggggtcctgtcccaaggagctgggaacttggtgttgccccctcaatttccagcaccagaaagagagattgtgtgggggtagaagctgtctggaggcccggccagagaatttgtggggttgtggaggttgtgggggcggtggggaggtcccagaggtgggaggctggcatccaggtcttggctctgccctgagaccttggacaaacccttccccctctctgggcacccttctgcccacaccagtttccagtgcggagtctgagaccctttccacctcccctacaagtgccctcgggtctgtcctccccgtctggaccctcccagccactatcccttgctggaaggctcagctctttggggggtctggggtgacctccccacctcctggaaaactttagggtatttttgcgcaaactccttcagggttgggggactctgaaggaaacgggacaaaaccttaagctgttttcttagcccctcagccagctgccattagcttggctcttaaagggccaggcctccttttctgccctctagcagggaggttttccaactgttggaggcgcctttggggctgcccctttgtctggagtcactgggggcttccgagggtctccctcgaccctctgtcgtcctgggatggctgtcgggagctgtatcacctgggttctgtcccctggctctgtatcaggcactttattaaagctgggcctcagtggggtgtgtttgtctcctgctcttctggagcctggaaggaaagggcttcaggaggaggctgtgaggctggagggaccagatggaggaggccagcagctagccattgcacactggggtgatgggtgggggcggtgactgccccagacttggttttgtaatgatttgtacaggaataaacacacctacgctccggcttcgtgtcctgtgtcacctgggtcgagcacagccttctggtccagcgctgcatgcggcctcaggaccacgtcttccggttgggggctcccagtaaag

SEQ ID NO: 365957 - DNA, 2410 bp, Homo sapiens
aggcctgggccgggccgtgacggcggcgctaggacccggcgggccgcgggtgcggcgaggcctgggcggcctgaggagcgcggaccccggcgctcggctcccggcgccatgtgagggggctcgggggccgcggggggccgggcgctccccgccggaggtgtgaacccacatccctgcccccagggccacctgcaggacgccgacacctacccctcagcagacgccggagagaaatgagtagcaacaaagagcagcggtcagcagtgttcgtgatcctctttgccctcatcaccatcctcatcctctacagctccaacagtgccaatgaggtcttccattacggctccctgcggggccgtagccgccgacctgtcaacctcaagaagtggagcatcactgacggctatgtccccattctcggcaacaagacactgccctctcggtgccaccagtgtgtgattgtcagcagctccagccacctgctgggcaccaagctgggccctgagatcgagcgggctgagtgtacaatccgcatgaatgatgcacccaccactggctactcagctgatgtgggcaacaagaccacctaccgcgtcgtggcccattccagtgtgttccgcgtgctgaggaggccccaggagtttgtcaaccggacccctgaaaccgtgttcatcttctgggggcccccgagcaagatgcagaagccccagggcagcctcgtgcgtgtgatccagcgagcgggcctggtgttccccaacatggaagcatatgccgtctctcccggccgcatgcggcaatttgacgacctcttccggggtgagacgggcaaggacagggagaagtctcattcgtggttgagcacaggctggtttaccatggtgatcgcggtggagttgtgtgaccacgtgcatgtctatggcatggtcccccccaactactgcagccagcggccccgcctccagcgcatgccctaccactactacgagcccaaggggccggacgaatgtgtcacctacatccagaatgagcacagtcgcaagggcaaccaccaccgcttcatcaccgagaaaagggtcttctcatcgtgggcccagctgtatggcatcaccttctcccacccctcctggacctaggccacccagcctgtgggacctcaggagggtcagaggagaagcagcctccgcccagccgctaggccagggaccatcttctggccaatcaaggcttgctggagtgtctcccagccaatcagggccttgaggaggatgtatcctccagccaatcagggcctggggaatctgttggcgaatcagggatttgggagtctatgtggttaatcaggggtgtctttcttgtgcagtcagggtctgcgcacagtcaatcagggtagagggggtatttctgagtcaatctgaggctaaggacatgtcctttcccatgaggccttggttcagagccccaggaatggaccccccaatcactccccactctgctgggataatggggtcctgtcccaaggagctgggaacttggtgttgccccctcaatttccagcaccagaaagagagattgtgtgggggtagaagctgtctggaggcccggccagagaatttgtggggttgtggaggttgtgggggcggtggggaggtcccagaggtgggaggctggcatccaggtcttggctctgccctgagaccttggacaaacccttccccctctctgggcacccttctgcccacaccagtttccagtgcggagtctgagaccctttccacctcccctacaagtgccctcgggtctgtcctccccgtctggaccctcccagccactatcccttgctggaaggctcagctctttggggggtctggggtgacctccccacctcctggaaaactttagggtatttttgcgcaaactccttcagggttgggggactctgaaggaaacgggacaaaaccttaagctgttttcttagcccctcagccagctgccattagcttggctcttaaagggccaggcctccttttctgccctctagcagggaggttttccaactgttggaggcgcctttggggctgcccctttgtctggagtcactgggggcttccgagggtctccctcgaccctctgtcgtcctgggatggctgtcgggagctgtatcacctgggttctgtcccctggctctgtatcaggcactttattaaagctgggcctcagtggggtgtgtttgtctcctgctcttctggagcctggaaggaaagggcttcaggaggaggctgtgaggctggagggaccagatggaggaggccagcagctagccattgcacactggggtgatgggtgggggcggtgactgccccagacttggttttgtaatgatttgtacaggaataaacacacctacgctccg

SEQ ID NO: 365958 - DNA, 2528 bp, Homo sapiens
  misc_feature (2516)..(2516): n is a, c, g, or t
aggcctgggccgggccgtgacggcggcgctaggacccggcgggccgcgggtgcggcgaggcctgggcggcctgaggagcgcggaccccggcgctcggctcccggcgccatgtgagggggctcgggggccgcggggggccgggcgctccccgccggagatgaggaaactgaggctcagagaggtcacatggcttgctcgaggccccccagccagtgtgaacccacatccctgcccccagggccacctgcaggacgccgacacctacccctcagcagacgccggagagaaatgagtagcaacaaagagcagcggtcagcagtgttcgtgatcctctttgccctcatcaccatcctcatcctctacagctccaacagtgccaatgaggtcttccattacggctccctgcggggccgtagccgccgacctgtcaacctcaagaagtggagcatcactgacggctatgtccccattctcggcaacaagacactgccctctcggtgccaccagtgtgtgattgtcagcagctccagccacctgctgggcaccaagctgggccctgagatcgagcgggctgagtgtacaatccgcatgaatgatgcacccaccactggctactcagctgatgtgggcaacaagaccacctaccgcgtcgtggcccattccagtgtgttccgcgtgctgaggaggccccaggagtttgtcaaccggacccctgaaaccgtgttcatcttctgggggcccccgagcaagatgcagaagccccagggcagcctcgtgcgtgtgatccagcgagcgggcctggtgttccccaacatggaagcatatgccgtctctcccggccgcatgcggcaatttgacgacctcttccggggtgagacgggcaaggacagggagaagtctcattcgtggttgagcacaggctggtttaccatggtgatcgcggtggagttgtgtgaccacgtgcatgtctatggcatggtcccccccaactactgcagccagcggccccgcctccagcgcatgccctaccactactacgagcccaaggggccggacgaatgtgtcacctacatccagaatgagcacagtcgcaagggcaaccaccaccgcttcatcaccgagaaaagggtcttctcatcgtgggcccagctgtatggcatcaccttctcccacccctcctggacctaggccacccagcctgtgggacctcaggagggtcagaggagaagcagcctccgcccagccgctaggccagggaccatcttctggccaatcaaggcttgctggagtgtctcccagccaatcagggccttgaggaggatgtatcctccagccaatcagggcctggggaatctgttggcgaatcagggatttgggagtctatgtggttaatcaggggtgtctttcttgtgcagtcagggtctgcgcacagtcaatcagggtagagggggtatttctgagtcaatctgaggctaaggacatgtcctttcccatgaggccttggttcagagccccaggaatggaccccccaatcactccccactctgctgggataatggggtcctgtcccaaggagctgggaacttggtgttgccccctcaatttccagcaccagaaagagagattgtgtgggggtagaagctgtctggaggcccggccagagaatttgtggggttgtggaggttgtgggggcggtggggaggtcccagaggtgggaggctggcatccaggtcttggctctgccctgagaccttggacaaacccttccccctctctgggcacccttctgcccacaccagtttccagtgcggagtctgagaccctttccacctcccctacaagtgccctcgggtctgtcctccccgtctggaccctcccagccactatcccttgctggaaggctcagctctttggggggtctggggtgacctccccacctcctggaaaactttagggtatttttgcgcaaactccttcagggttgggggactctgaaggaaacgggacaaaaccttaagctgttttcttagcccctcagccagctgccattagcttggctcttaaagggccaggcctccttttctgccctctagcagggaggttttccaactgttggaggcgcctttggggctgcccctttgtctggagtcactgggggcttccgagggtctccctcgaccctctgtcgtcctgggatggctgtcgggagctgtatcacctgggttctgtcccctggctctgtatcaggcactttattaaagctgggcctcagtggggtgtgtttgtctcctgctcttctggagcctggaaggaaagggcttcaggaggaggctgtgaggctggagggaccagatggaggaggccagcagctagccattgcacactggggtgatgggtgggggcggtgactgccccagacttggttttgtaatgatttgtacaggaataaacacacctacgctccgaaaaaaaaaaaaaaaaaaaaaaaaaaaaaaaaaaaaaaaaaaaaaaacaanaaaaaaaacaac

SEQ ID NO: 365959 - DNA, 2447 bp, Homo sapiens
aggcctgggccgggccgtgacggcggcgctaggacccggcgggccgcgggtgcggcgaggcctgggcggcctgaggagcgcggaccccggcgctcggctcccggcgccatgtgagggggctcgggggccgcggggggccgggcgctccccgccggaggtgtgaacccacatccctgcccccagggccacctgcaggacgccgacacctacccctcagcagacgccggagagaaatgagtagcaacaaactccaacagtgccaatgaggtcttccattacggctccctgcggggccgtagccgccgacctgtcaacctcaagaagtggagcatcactgacggctatgtccccattctcggcaacaagacactgccctctcggtgccaccagtgtgtgattgtcagcagctccagccacctgctgggcaccaagctgggccctgagatcgagcgggctgagtgtacaatccgcatgaatgatgcacccaccactggctactcagctgatgtgggcaacaagaccacctaccgcgtcgtggcccattccagtgtgttccgcgtgctgaggaggccccaggagtttgtcaaccggacccctgaaaccgtgttcatcttctgggggcccccgagcaagatgcagaagccccagggcagcctcgtgcgtgtgatccagcgagcgggcctggtgttccccaacatggaagcatatgccgtctctcccggccgcatgcggcaatttgacgacctcttccggggtgagacgggcaaggacagggagaagtctcattcgtggttgagcacaggctggtttaccatggtgatcgcggtggagttgtgtgaccacgtgcatgtctatggcatggtcccccccaactactgcagccagcggccccgcctccagcgcatgccctaccactactacgagcccaaggggccggacgaatgtgtcacctacatccagaatgagcacagtcgcaagggcaaccaccaccgcttcatcaccgagaaaagggtcttctcatcgtgggcccagctgtatggcatcaccttctcccacccctcctggacctaggccacccagcctgtgggacctcaggagggtcagaggagaagcagcctccgcccagccgctaggccagggaccatcttctggccaatcaaggcttgctggagtgtctcccagccaatcagggccttgaggaggatgtatcctccagccaatcagggcctggggaatctgttggcgaatcagggatttgggagtctatgtggttaatcaggggtgtctttcttgtgcagtcagggtctgcgcacagtcaatcagggtagagggggtatttctgagtcaatctgaggctaaggacatgtcctttcccatgaggccttggttcagagccccaggaatggaccccccaatcactccccactctgctgggataatggggtcctgtcccaaggagctgggaacttggtgttgccccctcaatttccagcaccagaaagagagattgtgtgggggtagaagctgtctggaggcccggccagagaatttgtggggttgtggaggttgtgggggcggtggggaggtcccagaggtgggaggctggcatccaggtcttggctctgccctgagaccttggacaaacccttccccctctctgggcacccttctgcccacaccagtttccagtgcggagtctgagaccctttccacctcccctacaagtgccctcgggtctgtcctccccgtctggaccctcccagccactatcccttgctggaaggctcagctctttggggggtctggggtgacctccccacctcctggaaaactttagggtatttttgcgcaaactccttcagggttgggggactctgaaggaaacgggacaaaaccttaagctgttttcttagcccctcagccagctgccattagcttggctcttaaagggccaggcctccttttctgccctctagcagggaggttttccaactgttggaggcgcctttggggctgcccctttgtctggagtcactgggggcttccgagggtctccctcgaccctctgtcgtcctgggatggctgtcgggagctgtatcacctgggttctgtcccctggctctgtatcaggcactttattaaagctgggcctcagtggggtgtgtttgtctcctgctcttctggagcctggaaggaaagggcttcaggaggaggctgtgaggctggagggaccagatggaggaggccagcagctagccattgcacactggggtgatgggtgggggcggtgactgccccagacttggttttgtaatgatttgtacaggaataaacacacctacgctccggcttcgtgtcctgtgtcacctgggtcgagcacagccttctggtccagcgctgcatgcggcctcaggaccacgtcttccggttgggggctcccagtaaag

SEQ ID NO: 365960 - DNA, 2476 bp, Homo sapiens
aggcctgggccgggccgtgacggcggcgctaggacccggcgggccgcgggtgcggcgaggcctgggcggcctgaggagcgcggaccccggcgctcggctcccggcgccatgtgagggggctcgggggccgcggggggccgggcgctccccgccggagatgaggaaactgaggctcagagaggtcacatggcttgctcgaggccccccagccagtgtgaacccacatccctgcccccagggccacctgcaggacgccgacacctacccctcagcagacgccggagagaaatgagtagcaacaaagagcagcggtcagcagtgttcgtgatcctctttgccctcatcaccatcctcatcctctacagctccaacagtgccaatgaggtcttccattacggctccctgcggggccgtagccgccgacctgtcaacctcaagaagtggagcatcactgacggctatgtccccattctcggcaacaagacactgccctctcggtgccaccagtgtgtgattgtcagcagctccagccacctgctgggcaccaagctgggccctgagatcgagcgggctgagtgtacaatccgcatgaatgatgcacccaccactggctactcagctgatgtgggcaacaagaccacctaccgcgtcgtggcccattccagtgtgttccgcgtgctgaggaggccccaggagtttgtcaaccggacccctgaaaccgtgttcatcttctgggggcccccgagcaagatgcagaagccccagggcagcctcgtgcgtgtgatccagcgagcgggcctggtgttccccaacatggaagcatatgccgtctctcccggccgcatgcggcaatttgacgacctcttccggggtgagacgggcaaggacagggagaagtctcattcgtggttgagcacaggctggtttaccatggtgatcgcggtggagttgtgtgaccacgtgcatgtctatggcatggtcccccccaactactgcagccagcggccccgcctccagcgcatgccctaccactactacgagcccaaggggccggacgaatgtgtcacctacatccagaatgagcacagtcgcaagggcaaccaccaccgcttcatcaccgagaaaagggtcttctcatcgtgggcccagctgtatggcatcaccttctcccacccctcctggacctaggccacccagcctgtgggacctcaggagggtcagaggagaagcagcctccgcccagccgctaggccagggaccatcttctggccaatcaaggcttgctggagtgtctcccagccaatcagggccttgaggaggatgtatcctccagccaatcagggcctggggaatctgttggcgaatcagggatttgggagtctatgtggttaatcaggggtgtctttcttgtgcagtcagggtctgcgcacagtcaatcagggtagagggggtatttctgagtcaatctgaggctaaggacatgtcctttcccatgaggccttggttcagagccccaggaatggaccccccaatcactccccactctgctgggataatggggtcctgtcccaaggagctgggaacttggtgttgccccctcaatttccagcaccagaaagagagattgtgtgggggtagaagctgtctggaggcccggccagagaatttgtggggttgtggaggttgtgggggcggtggggaggtcccagaggtgggaggctggcatccaggtcttggctctgccctgagaccttggacaaacccttccccctctctgggcacccttctgcccacaccagtttccagtgcggagtctgagaccctttccacctcccctacaagtgccctcgggtctgtcctccccgtctggaccctcccagccactatcccttgctggaaggctcagctctttggggggtctggggtgacctccccacctcctggaaaactttagggtatttttgcgcaaactccttcagggttgggggactctgaaggaaacgggacaaaaccttaagctgttttcttagcccctcagccagctgccattagcttggctcttaaagggccaggcctccttttctgccctctagcagggaggttttccaactgttggaggcgcctttggggctgcccctttgtctggagtcactgggggcttccgagggtctccctcgaccctctgtcgtcctgggatggctgtcgggagctgtatcacctgggttctgtcccctggctctgtatcaggcactttattaaagctgggcctcagtggggtgtgtttgtctcctgctcttctggagcctggaaggaaagggcttcaggaggaggctgtgaggctggagggaccagatggaggaggccagcagctagcccctgagttagcagctcgcccctgagttaacagctcgcccctgagttagcagctcgcccctgagttagcagctcgcccctgagttagcagctcgcccctgag

SEQ ID NO: 365961 - DNA, 2545 bp, Homo sapiens
aggcctgggccgggccgtgacggcggcgctaggacccggcgggccgcgggtgcggcgaggcctgggcggcctgaggagcgcggaccccggcgctcggctcccggcgccatgtgagggggctcgggggccgcggggggccgggcgctccccgccggagatgaggaaactgaggctcagagaggtcacatggcttgctcgaggccccccagccagtgtgaacccacatccctgcccccagggccacctgcaggacgccgacacctacccctcagcagacgccggagagaaatgagtagcaacaaagagcagcggtcagcagtgttcgtgatcctctttgccctcatcaccatcctcatcctctacagctccaacagtgccaatgaggtcttccattacggctccctgcggggccgtagccgccgacctgtcaacctcaagaagtggagcatcactgacggctatgtccccattctcggcaacaagacactgccctctcggtgccaccagtgtgtgattgtcagcagctccagccacctgctgggcaccaagctgggccctgagatcgagcgggctgagtgtacaatccgcatgaatgatgcacccaccactggctactcagctgatgtgggcaacaagaccacctaccgcgtcgtggcccattccagtgtgttccgcgtgctgaggaggccccaggagtttgtcaaccggacccctgaaaccgtgttcatcttctgggggcccccgagcaagatgcagaagccccagggcagcctcgtgcgtgtgatccagcgagcgggcctggtgttccccaacatggaagcatatgccgtctctcccggccgcatgcggcaatttgacgacctcttccgggggagaagtctcattcgtggttgagcacaggctggtttaccatggtgatcgcggtggagttgtgtgaccacgtgcatgtctatggcatggtcccccccaactactgcagccagcggccccgcctccagcgcatgccctaccactactacgagcccaaggggccggacgaatgtgtcacctacatccagaatgagcacagtcgcaagggcaaccaccaccgcttcatcaccgagaaaagggtcttctcatcgtgggcccagctgtatggcatcaccttctcccacccctcctggacctaggccacccagcctgtgggacctcaggagggtcagaggagaagcagcctccgcccagccgctaggccagggaccatcttctggccaatcaaggcttgctggagtgtctcccagccaatcagggccttgaggaggatgtatcctccagccaatcagggcctggggaatctgttggcgaatcagggatttgggagtctatgtggttaatcaggggtgtctttcttgtgcagtcagggtctgcgcacagtcaatcagggtagagggggtatttctgagtcaatctgaggctaaggacatgtcctttcccatgaggccttggttcagagccccaggaatggaccccccaatcactccccactctgctgggataatggggtcctgtcccaaggagctgggaacttggtgttgccccctcaatttccagcaccagaaagagagattgtgtgggggtagaagctgtctggaggcccggccagagaatttgtggggttgtggaggttgtgggggcggtggggaggtcccagaggtgggaggctggcatccaggtcttggctctgccctgagaccttggacaaacccttccccctctctgggcacccttctgcccacaccagtttccagtgcggagtctgagaccctttccacctcccctacaagtgccctcgggtctgtcctccccgtctggaccctcccagccactatcccttgctggaaggctcagctctttggggggtctggggtgacctccccacctcctggaaaactttagggtatttttgcgcaaactccttcagggttgggggactctgaaggaaacgggacaaaaccttaagctgttttcttagcccctcagccagctgccattagcttggctcttaaagggccaggcctccttttctgccctctagcagggaggttttccaactgttggaggcgcctttggggctgcccctttgtctggagtcactgggggcttccgagggtctccctcgaccctctgtcgtcctgggatggctgtcgggagctgtatcacctgggttctgtcccctggctctgtatcaggcactttattaaagctgggcctcagtggggtgtgtttgtctcctgctcttctggagcctggaaggaaagggcttcaggaggaggctgtgaggctggagggaccagatggaggaggccagcagctagccattgcacactggggtgatgggtgggggcggtgactgccccagacttggttttgtaatgatttgtacaggaataaacacacctacgctccggcttcgtgtcctgtgtcacctgggtcgagcacagccttctggtccagcgctgcatgcggcctcaggaccacgtcttccggttgggggctcccagtaaag

SEQ ID NO: 365962 - DNA, 2490 bp, Homo sapiens
aggcctgggccgggccgtgacggcggcgctaggacccggcgggccgcgggtgcggcgaggcctgggcggcctgaggagcgcggaccccggcgctcggctcccggcgccatgtgagggggctcgggggccgcggggggccgggcgctccccgccggaggtgtgaacccacatccctgcccccagggccacctgcaggacgccgacacctacccctcagcagacgccggagagaaatgagtagcaacaaagagcagcggtcagcagtgttcgtgatcctctttgccctcatcaccatcctcatcctctacagctccaacagtgccaatgaggtcttccattacggctccctgcggggccgtagccgccgacctgtcaacctcaagaagtggagcatcactgacggctatgtccccattctcggcaacaagacactgccctctcggtgccaccagtgtgtgattgtcagcagctccagccacctgctgggcaccaagctgggccctgagatcgagcgggctgagtgtacaatccgcatgaatgatgcacccaccactggctactcagctgatgtgggcaacaagaccacctaccgcgtcgtggcccattccagtgtgttccgcgtgctgaggaggccccaggagtttgtcaaccggacccctgaaaccgtgttcatcttctgggggcccccgagcaagatgcagaagccccagggcagcctcgtgcgtgtgatccagcgagcgggcctggtgttccccaacatggaagcatatgccgtctctcccggccgcatgcggcaatttgacgacctcttccgggggagaagtctcattcgtggttgagcacaggctggtttaccatggtgatcgcggtggagttgtgtgaccacgtgcatgtctatggcatggtcccccccaactactgcagccagcggccccgcctccagcgcatgccctaccactactacgagcccaaggggccggacgaatgtgtcacctacatccagaatgagcacagtcgcaagggcaaccaccaccgcttcatcaccgagaaaagggtcttctcatcgtgggcccagctgtatggcatcaccttctcccacccctcctggacctaggccacccagcctgtgggacctcaggagggtcagaggagaagcagcctccgcccagccgctaggccagggaccatcttctggccaatcaaggcttgctggagtgtctcccagccaatcagggccttgaggaggatgtatcctccagccaatcagggcctggggaatctgttggcgaatcagggatttgggagtctatgtggttaatcaggggtgtctttcttgtgcagtcagggtctgcgcacagtcaatcagggtagagggggtatttctgagtcaatctgaggctaaggacatgtcctttcccatgaggccttggttcagagccccaggaatggaccccccaatcactccccactctgctgggataatggggtcctgtcccaaggagctgggaacttggtgttgccccctcaatttccagcaccagaaagagagattgtgtgggggtagaagctgtctggaggcccggccagagaatttgtggggttgtggaggttgtgggggcggtggggaggtcccagaggtgggaggctggcatccaggtcttggctctgccctgagaccttggacaaacccttccccctctctgggcacccttctgcccacaccagtttccagtgcggagtctgagaccctttccacctcccctacaagtgccctcgggtctgtcctccccgtctggaccctcccagccactatcccttgctggaaggctcagctctttggggggtctggggtgacctccccacctcctggaaaactttagggtatttttgcgcaaactccttcagggttgggggactctgaaggaaacgggacaaaaccttaagctgttttcttagcccctcagccagctgccattagcttggctcttaaagggccaggcctccttttctgccctctagcagggaggttttccaactgttggaggcgcctttggggctgcccctttgtctggagtcactgggggcttccgagggtctccctcgaccctctgtcgtcctgggatggctgtcgggagctgtatcacctgggttctgtcccctggctctgtatcaggcactttattaaagctgggcctcagtggggtgtgtttgtctcctgctcttctggagcctggaaggaaagggcttcaggaggaggctgtgaggctggagggaccagatggaggaggccagcagctagccattgcacactggggtgatgggtgggggcggtgactgccccagacttggttttgtaatgatttgtacaggaataaacacacctacgctccggcttcgtgtcctgtgtcacctgggtcgagcacagccttctggtccagcgctgcatgcggcctcaggaccacgtcttccggttgggggctcccagtaaag

SEQ ID NO: 365963 - DNA, 2157 bp, Homo sapiens
aggcctgggccgggccgtgacggcggcgctaggacccggcgggccgcgggtgcggcgaggcctgggcggcctgaggagcgcggaccccggcgctcggctcccggcgccatgtgagggggctcgggggccgcggggggccgggcgctccccgccggagatgaggaaactgaggctcagagaggtcacatggcttgctcgaggccccccagccagtgtgaacccacatccctgcccccagggccacctgcaggacgccgacacctacccctcagcagacgccggagagaaatgagtagcaacaaagagcagcggtcagcagtgttcgtgatcctctttgccctcatcaccatcctcatcctctacagctccaacagtgccaatgaggtcttccattacggctccctgcggggccgtagccgccgacctgtcaacctcaagaagtggagcatcactgacggctatgtccccattctcggcaacaagggagaagtctcattcgtggttgagcacaggctggtttaccatggtgatcgcggtggagttgtgtgaccacgtgcatgtctatggcatggtcccccccaactactgcagccagcggccccgcctccagcgcatgccctaccactactacgagcccaaggggccggacgaatgtgtcacctacatccagaatgagcacagtcgcaagggcaaccaccaccgcttcatcaccgagaaaagggtcttctcatcgtgggcccagctgtatggcatcaccttctcccacccctcctggacctaggccacccagcctgtgggacctcaggagggtcagaggagaagcagcctccgcccagccgctaggccagggaccatcttctggccaatcaaggcttgctggagtgtctcccagccaatcagggccttgaggaggatgtatcctccagccaatcagggcctggggaatctgttggcgaatcagggatttgggagtctatgtggttaatcaggggtgtctttcttgtgcagtcagggtctgcgcacagtcaatcagggtagagggggtatttctgagtcaatctgaggctaaggacatgtcctttcccatgaggccttggttcagagccccaggaatggaccccccaatcactccccactctgctgggataatggggtcctgtcccaaggagctgggaacttggtgttgccccctcaatttccagcaccagaaagagagattgtgtgggggtagaagctgtctggaggcccggccagagaatttgtggggttgtggaggttgtgggggcggtggggaggtcccagaggtgggaggctggcatccaggtcttggctctgccctgagaccttggacaaacccttccccctctctgggcacccttctgcccacaccagtttccagtgcggagtctgagaccctttccacctcccctacaagtgccctcgggtctgtcctccccgtctggaccctcccagccactatcccttgctggaaggctcagctctttggggggtctggggtgacctccccacctcctggaaaactttagggtatttttgcgcaaactccttcagggttgggggactctgaaggaaacgggacaaaaccttaagctgttttcttagcccctcagccagctgccattagcttggctcttaaagggccaggcctccttttctgccctctagcagggaggttttccaactgttggaggcgcctttggggctgcccctttgtctggagtcactgggggcttccgagggtctccctcgaccctctgtcgtcctgggatggctgtcgggagctgtatcacctgggttctgtcccctggctctgtatcaggcactttattaaagctgggcctcagtggggtgtgtttgtctcctgctcttctggagcctggaaggaaagggcttcaggaggaggctgtgaggctggagggaccagatggaggaggccagcagctagccattgcacactggggtgatgggtgggggcggtgactgccccagacttggttttgtaatgatttgtacaggaataaacacacctacgctccggcttcgtgtcctgtgtcacctgggtcgagcacagccttctggtccagcgctgcatgcggcctcaggaccacgtcttccggttgggggctcccagtaaag

SEQ ID NO: 365964 - DNA, 899 bp, Homo sapiens
atttccggctcctcccggaagtgccgaagctggctactaagggaacttgggaggatcccacctcagccttcgtgactagtgaggtgcgcaaacgcccgagttttccctggtgcgcgggttccgcctttgcagtgccctccacccttcctggtgtctgacccgcctccttcccaggccttttgttcctgtcccggaaagccggcgtcctgccgcgcgatgcccctgctcggacttcttcccaggagggcctgggcttcgctgctcagccagctcctgcgaccgccctgcgcttcgtgcaccggggcggtccgttgccaaagccaggttgcagaggcagtgttaacatcccaactgaaagcacatcaagagaaaccaaattttattatcaagaccccaaagggtaccagggatcttagtcctcagcatatggttgtgagggagaaaattcttgatttggttatcagctgctttaaacgtcatggagcaaaggggatggacaccccagcatttgagctgaaggaaaccctgactgagaagtatggagaggactctgggctcatgtatgatctgaaggatcaaggtggagagctgttgtccctccgctatgaccttactgttccctttgctcgttatctggccatgaataaggtgaagaagatgaaacgttatcatgttggaaaggtgtggcggcgagagagcccaaccatagtccaaggccgttatagggagttctgccagtgtgattttgacattgctggtcagtttgaccctatgatccccgatgcagagtgtttgaagatcatgtgtgaaatcctaagtggattgcagttgggagactttctcattaagaaatgaccggcggattgtggatgggatgataacgtttcatcttcttcacc

SEQ ID NO: 365965 - DNA, 568 bp, Homo sapiens
gagatagagagaattagtcttcagagtcggatgtcctgtcctgtgctgattgcccctgtctcttacttcttcccaatgatgtcctgttgtcttcttcttgctcagccaggtccgtgaagcgacacatgacaactatctttgtcaccggggcgggccgttgccaaagcgttgcagaggcagtgttaacatcccaactgaaagcacatcaagagaaaccaaattttattatcaagaccccaaagggtaccagggatcttagtcctcagcatatggttgtgagggagaaaattcttgatttggttatcagctgctttaaacgtcatggatgcacacacgcggcgcacttgtgacaaccccaggcatttagacgcttgaaagggaaaaccgcgtggatcttgcacgaaagtactcggacgaaggcacctcttggaggcgtcaattgtacttgatcgtcgagaggcgaatcacaggcttggaagcaagccttgtatagatacccctaccgacatatgacacgttaccttgtcaccacttttgcctccgttatcttgcgcatgaatcaaggtga

SEQ ID NO: 365966 - DNA, 2394 bp, Homo sapiens
atttccggctcctcccggaagtgccgaagctggctactaagggaacttgggaggatcccacctcagccttcgtgactagtgaggtgcgcaaacgcccgagttttccctggtgcgcgggttccgcctttgcagtgccctccacccttcctggtgtctgacccgcctccttcccaggccttttgttcctgtcccggaaagccggcgtcctgccgcgcgatgcccctgctcggacttcttcccaggagggcctgggcttcgctgctcagccagctcctgcgaccgccctgcgcttcgtgcaccggggcggtccgttgccaaagccaggttgcagaggcagtgttaacatcccaactgaaagcacatcaagagaaaccaaattttattatcaagaccccaaagggtaccagggatcttagtcctcagcatatggttgtgagggagaaaattcttgatttggttatcagctgctttaaacgtcatggagcaaaggggatggacaccccagcatttgagctgaaggaaaccctgactgagaagtatggagaggactctgggctcatgtatgatctgaaggatcaaggtggagagctgttgtccctccgctatgaccttactgttccctttgctcgttatctggccatgaataaggtgaagaagatgaaacgttatcatgttggaaaggtgtggcggcgagagagcccaaccatagtccaaggccgttatagggagttctgccagtgtgattttgacattgctggtcagtttgaccctatgatccccgatgcagagtgtttgaagatcatgtgtgaaatcctaagtggattgcagttgggagactttctcattaagatggcttggaaagatgtgagacatgagatggtggtgaagaaaggcctggctcctgaggtggctgatcgaattggggactatgtccagtgtcatggtggggtatccctagtagagcaaatgtttcaggatcccagactatcccagaacaagcaggccctggagggcctgggagacctaaagctgctatttgaatacctgactttatttggaattgctgataagatctcctttgacctcagcctggctcggggcctagactactatacaggagtgatctatgaagcagtgctgctgcagaccccaactcaggctggggaggagcccctgaatgtgggcagtgtggctgctggtgggcgctatgatgggctggtgggcatgtttgaccccaagggccacaaggtgccatgtgtgggactcagcattggggttgagcgaatcttctacattgtggagcagaggatgaagaccaaaggtgagaaggtgcggactacagagactcaagtgtttgtggccacaccacagaagaactttctccaagaacggttgaagcttattgcagagctttgggattctggaatcaaggcagagatgctatacaagaacaaccccaaactattaacccagctgcactattgtgagagcacaggcattccactggtggtcattattggtgagcaagaactgaaagaaggggtcatcaagatccgttcagtggccagcagagaggaggtggccattaaacgggaaaattttgtggctgaaattcagaagcgactgtctgagtcttgatccttgcctgattcccatctgctgctctttgtagaaaaggtttcctctagaactgaattcctctggaattgagtgatggacttcacaacaactagccaggaagggtgacaagtaccttctgcctcctccattcttcctgggtgcagaactgtagaagaccctgaggactcctgggctagtgtgagcagctattctgcatgggtgcagatggctggatgtgaaagagacatgctctagctgcagaggcaaatttgaagtgccacggaacgttgtcaagaggtagtgagattgttgctgtgagcaaggctctgggagagtcacctcaggctcaggattctgaaccattgagatcagaaaccagatacttagccttctactgtagctacggaaccagattctggtgaatttgtccacaatcagccattggcctgtctggggagtttttggaagacagcaaagaggggcaatggctgctttcagctttgaggacagatgctatcctaagggcatggcagtacccatgttgatttgacatctctctagcccatccattgcttacagtagaagagtggggctgtatgcttgataatcttgaacattgaacttaatagatgacttgacaaggtagagatctgatattttgagattttggagaccatttcctgtgccagaatcactgctctattccataccgtgccatggaggctgttttagaagtggttggataacatgttaaataaaatattaagtgtagta

SEQ ID NO: 365967 - DNA, 2597 bp, Homo sapiens
atttccggctcctcccggaagtgccgaagctggctactaagggaacttgggaggatcccacctcagccttcgtgactagtgaggtgcgcaaacgcccgagttttccctggtgcgcgggttccgcctttgcagtgccctccacccttcctggtgtctgacccgcctccttcccaggccttttgttcctgtcccggaaagccggcgtcctgccgcgcgatgcccctgctcggacttcttcccaggagggcctgggcttcgctgctcagccagctcctgcgaccgccctgcgcttcgtgcaccggggcggtccgttgccaaagccaggttgcagaggcagtgttaacatcccaactgaaagcacatcaagagaaaccaaattttattatcaagaccccaaagggtaccagggatcttagtcctcagcatatggttgtgagggagaaaattcttgatttggttatcagctgctttaaacgtcatggagcaaaggggatggacaccccagcatttgagctgaaggaaaccctgactgagaagtatggagaggactctgggctcatgtatgatctgaaggatcaaggtggagagctgttgtccctccgctatgaccttactgttccctttgctcgttatctggccatgaataaggtgaagaagatgaaacgttatcatgttggaaaggtgtggcggcgagagagcccaaccatagtccaaggccgttatagggagttctgccagtgtgtaagtgacctgatgggagcagcacagtttgatagttctaggggccacaaccttgaaactggctggataatggatgttttttcccatctttttctttgctgtaggattttgacattgctggtcagtttgaccctatgatccccgatgcagagtgtttgaagatcatgtgtgaaatcctaagtggattgcagttgggagactttctcattaaggtaaatgaccggcggattgtggatgggatgtttgctgtctgtggtgttcctgaaagcaagttccgtgccatctgctcctccatagataaactagacaagatggcttggaaagatgtgagacatgagatggtggtgaagaaaggcctggctcctgaggtggctgatcgaattggggactatgtccagtgtcatggtggggtatccctagtagagcaaatgtttcaggatcccagactatcccagaacaagcaggccctggagggcctgggagacctaaagctgctatttgaatacctgactttatttggaattgctgataagatctcctttgacctcagcctggctcggggcctagactactatacaggagtgatctatgaagcagtgctgctgcagaccccaactcaggctggggaggagcccctgaatgtgggcagtgtggctgctggtgggcgctatgatgggctggtgggcatgtttgaccccaagggccacaaggtgccatgtgtgggactcagcattggggttgagcgaatcttctacattgtggagcagaggatgaagaccaaaggtgagaaggtgcggactacagagactcaagtgtttgtggccacaccacagaagaactttctccaagaacggttgaagcttattgcagagctttgggattctggaatcaaggcagagatgctatacaagaacaaccccaaactattaacccagctgcactattgtgagagcacaggcattccactggtggtcattattggtgagcaagaactgaaagaaggggtcatcaagatccgttcagtggccagcagagaggaggtggccattaaacgggaaaattttgtggctgaaattcagaagcgactgtctgagtcttgatccttgcctgattcccatctgctgctctttgtagaaaaggtttcctctagaactgaattcctctggaattgagtgatggacttcacaacaactagccaggaagggtgacaagtaccttctgcctcctccattcttcctgggtgcagaactgtagaagaccctgaggactcctgggctagtgtgagcagctattctgcatgggtgcagatggctggatgtgaaagagacatgctctagctgcagaggcaaatttgaagtgccacggaacgttgtcaagaggtagtgagattgttgctgtgagcaaggctctgggagagtcacctcaggctcaggattctgaaccattgagatcagaaaccagatacttagccttctactgtagctacggaaccagattctggtgaatttgtccacaatcagccattggcctgtctggggagtttttggaagacagcaaagaggggcaatggctgctttcagctttgaggacagatgctatcctaagggcatggcagtacccatgttgatttgacatctctctagcccatccattgcttacagtagaagagtggggctgtatgcttgataatcttgaacattgaacttaatagatgacttgacaaggtagagatctgatattttgagattttggagaccatttcctgtgccagaatcactgctctattccataccgtgccatggaggctgttttagaagtggttggataacatgttaaataaaatattaagtgtagta

SEQ ID NO: 365968 - DNA, 1679 bp, Homo sapiens
ttgcaaggcttgggtcactgacattgagttctcaggtaaatgaccggcggattgtggatgggatgtttgctgtctgtggtgttcctgaaagcaagttccgtgccatctgctcctccatagataaactagacaagatggcttggaaagatgtgagacatgagatggtggtgaagaaaggcctggctcctgaggtggctgatcgaattggggactatgtccagtgtcatggtggggtatccctagtagagcaaatgtttcaggatcccagactatcccagaacaagcaggccctggagggcctgggagacctaaagctgctatttgaatacctgactttatttggaattgctgataagatctcctttgacctcagcctggctcggggcctagactactatacaggagtgatctatgaagcagtgctgctgcagaccccaactcaggctggggaggagcccctgaatgtgggcagtgtggctgctggtgggcgctatgatgggctggtgggcatgtttgaccccaagggccacaaggtgccatgtgtgggactcagcattggggttgagcgaatcttctacattgtggagcagaggatgaagaccaaaggtgagaaggtgcggactacagagactcaagtgtttgtggccacaccacagaagaactttctccaagaacggttgaagcttattgcagagctttgggattctggaatcaaggcagagatgctatacaagaacaaccccaaactattaacccagctgcactattgtgagagcacaggcattccactggtggtcattattggtgagcaagaactgaaagaaggggtcatcaagatccgttcagtggccagcagagaggaggtggccattaaacgggaaaattttgtggctgaaattcagaagcgactgtctgagtcttgatccttgcctgattcccatctgctgctctttgtagaaaaggtttcctctagaactgaattcctctggaattgagtgatggacttcacaacaactagccaggaagggtgacaagtaccttctgcctcctccattcttcctgggtgcagaactgtagaagaccctgaggactcctgggctagtgtgagcagctattctgcatgggtgcagatggctggatgtgaaagagacatgctctagctgcagaggcaaatttgaagtgccacggaacgttgtcaagaggtagtgagattgttgctgtgagcaaggctctgggagagtcacctcaggctcaggattctgaaccattgagatcagaaaccagatacttagccttctactgtagctacggaaccagattctggtgaatttgtccacaatcagccattggcctgtctggggagtttttggaagacagcaaagaggggcaatggctgctttcagctttgaggacagatgctatcctaagggcatggcagtacccatgttgatttgacatctctctagcccatccattgcttacagtagaagagtggggctgtatgcttgataatcttgaacattgaacttaatagatgacttgacaaggtagagatctgatattttgagattttggagaccatttcctgtgccagaatcactgctctattccataccgtgccatggaggctgttttagaagtggttggataacatgttaaataaaatattaagtgtagta

SEQ ID NO: 365969 - DNA, 1380 bp, Homo sapiens
atttccggctcctcccggaagtgccgaagctggctactaagggaacttgggaggatcccacctcagccttcgtgactagtgaggtgcgcaaacgcccgagttttccctggtgcgcgggttccgcctttgcagtgccctccacccttcctggtgtctgacccgcctccttcccaggccttttgttcctgtcccggaaagccggcgtcctgccgcgcgatgcccctgctcggacttcttcccaggagggcctgggcttcgctgctcagccagctcctgcgaccgccctgcgcttcgtgcaccggggcggtccgttgccaaagccaggttgcagaggcagtgttaacatcccaactgaaagcacatcaagagaaaccaaattttattatcaagaccccaaagggtaccagggatcttagtcctcagcatatggttgtgagggagaaaattcttgatttggttatcagctgctttaaacgtcatggagcaaaggggatggacaccccagcatttgagctgaaggaaaccctgactgagaagtatggagaggactctgggctcatgtatgatctgaaggatcaaggtggagagctgttgtccctccgctatgaccttactgttccctttgctcgttatctggccatgaataaggtgaagaagatgaaacgttatcatgttggaaaggtgtggcggcgagagagcccaaccatagtccaaggccgttatagggagttctgccagtgtgattttgacattgctggtcagtttgaccctatgatccccgatgcagagtgtttgaagatcatgtgtgaaatcctaagtggattgcagttgggagactttctcattaaggtaaatgaccggcggattgtggatgggatgtttgctgtctgtggtgttcctgaaagcaagttccgtgccatctgctcctccatagataaactagacaagaggctcaggattctgaaccattgagatcagaaaccagatacttagccttctactgtagctacggaaccagattctggtgaatttgtccacaatcagccattggcctgtctggggagtttttggaagacagcaaagaggggcaatggctgctttcagctttgaggacagatgctatcctaagggcatggcagtacccatgttgatttgacatctctctagcccatccattgcttacagtagaagagtggggctgtatgcttgataatcttgaacattgaacttaatagatgacttgacaaggtagagatctgatattttgagattttggagaccatttcctgtgccagaatcactgctctattccataccgtgccatggaggctgttttagaagtggttggataacatgttaaataaaatattaagtgtagta

SEQ ID NO: 365970 - DNA, 2493 bp, Homo sapiens
atttccggctcctcccggaagtgccgaagctggctactaagggaacttgggaggatcccacctcagccttcgtgactagtgaggtgcgcaaacgcccgagttttccctggtgcgcgggttccgcctttgcagtgccctccacccttcctggtgtctgacccgcctccttcccaggccttttgttcctgtcccggaaagccggcgtcctgccgcgcgatgcccctgctcggacttcttcccaggagggcctgggcttcgctgctcagccagctcctgcgaccgccctgcgcttcgtgcaccggggcggtccgttgccaaagccaggttgcagaggcagtgttaacatcccaactgaaagcacatcaagagaaaccaaattttattatcaagaccccaaagggtaccagggatcttagtcctcagcatatggttgtgagggagaaaattcttgatttggttatcagctgctttaaacgtcatggagcaaaggggatggacaccccagcatttgagctgaaggaaaccctgactgagaagtatggagaggactctgggctcatgtatgatctgaaggatcaaggtggagagctgttgtccctccgctatgaccttactgttccctttgctcgttatctggccatgaataaggtgaagaagatgaaacgttatcatgttggaaaggtgtggcggcgagagagcccaaccatagtccaaggccgttatagggagttctgccagtgtgattttgacattgctggtcagtttgaccctatgatccccgatgcagagtgtttgaagatcatgtgtgaaatcctaagtggattgcagttgggagactttctcattaaggtaaatgaccggcggattgtggatgggatgtttgctgtctgtggtgttcctgaaagcaagttccgtgccatctgctcctccatagataaactagacaagatggcttggaaagatgtgagacatgagatggtggtgaagaaaggcctggctcctgaggtggctgatcgaattggggactatgtccagtgtcatggtggggtatccctagtagagcaaatgtttcaggatcccagactatcccagaacaagcaggccctggagggcctgggagacctaaagctgctatttgaatacctgactttatttggaattgctgataagatctcctttgacctcagcctggctcggggcctagactactatacaggagtgatctatgaagcagtgctgctgcagaccccaactcaggctggggaggagcccctgaatgtgggcagtgtggctgctggtgggcgctatgatgggctggtgggcatgtttgaccccaagggccacaaggtgccatgtgtgggactcagcattggggttgagcgaatcttctacattgtggagcagaggatgaagaccaaaggtgagaaggtgcggactacagagactcaagtgtttgtggccacaccacagaagaactttctccaagaacggttgaagcttattgcagagctttgggattctggaatcaaggcagagatgctatacaagaacaaccccaaactattaacccagctgcactattgtgagagcacaggcattccactggtggtcattattggtgagcaagaactgaaagaaggggtcatcaagatccgttcagtggccagcagagaggaggtggccattaaacgggaaaattttgtggctgaaattcagaagcgactgtctgagtcttgatccttgcctgattcccatctgctgctctttgtagaaaaggtttcctctagaactgaattcctctggaattgagtgatggacttcacaacaactagccaggaagggtgacaagtaccttctgcctcctccattcttcctgggtgcagaactgtagaagaccctgaggactcctgggctagtgtgagcagctattctgcatgggtgcagatggctggatgtgaaagagacatgctctagctgcagaggcaaatttgaagtgccacggaacgttgtcaagaggtagtgagattgttgctgtgagcaaggctctgggagagtcacctcaggctcaggattctgaaccattgagatcagaaaccagatacttagccttctactgtagctacggaaccagattctggtgaatttgtccacaatcagccattggcctgtctggggagtttttggaagacagcaaagaggggcaatggctgctttcagctttgaggacagatgctatcctaagggcatggcagtacccatgttgatttgacatctctctagcccatccattgcttacagtagaagagtggggctgtatgcttgataatcttgaacattgaacttaatagatgacttgacaaggtagagatctgatattttgagattttggagaccatttcctgtgccagaatcactgctctattccataccgtgccatggaggctgttttagaagtggttggataacatgttaaataaaatattaagtgtagta

SEQ ID NO: 365971 - DNA, 2286 bp, Homo sapiens
ctttggcttcctgttgctcagggtgaagagtctttgcaggttggtggtcaacagggtcagagatgccacaggtctggccagtgtccagagaagccacatctcacattcattcttctggttgcagaggcagtgttaacatcccaactgaaagcacatcaagagaaaccaaattttattatcaagaccccaaagggtaccagggatcttagtcctcagcatatggttgtgagggagaaaattcttgatttggttatcagctgctttaaacgtcatggagcaaaggggatggacaccccagcatttgagctgaaggaaaccctgactgagaagtatggagaggactctgggctcatgtatgatctgaaggatcaaggtggagagctgttgtccctccgctatgaccttactgttccctttgctcgttatctggccatgaataaggtgaagaagatgaaacgttatcatgttggaaaggtgtggcggcgagagagcccaaccatagtccaaggccgttatagggagttctgccagtgtgattttgacattgctggtcagtttgaccctatgatccccgatgcagagtgtttgaagatcatgtgtgaaatcctaagtggattgcagttgggagactttctcattaaggtaaatgaccggcggattgtggatgggatgtttgctgtctgtggtgttcctgaaagcaagttccgtgccatctgctcctccatagataaactagacaagatggcttggaaagatgtgagacatgagatggtggtgaagaaaggcctggctcctgaggtggctgatcgaattggggactatgtccagtgtcatggtggggtatccctagtagagcaaatgtttcaggatcccagactatcccagaacaagcaggccctggagggcctgggagacctaaagctgctatttgaatacctgactttatttggaattgctgataagatctcctttgacctcagcctggctcggggcctagactactatacaggagtgatctatgaagcagtgctgctgcagaccccaactcaggctggggaggagcccctgaatgtgggcagtgtggctgctggtgggcgctatgatgggctggtgggcatgtttgaccccaagggccacaaggtgccatgtgtgggactcagcattggggttgagcgaatcttctacattgtggagcagaggatgaagaccaaaggtgagaaggtgcggactacagagactcaagtgtttgtggccacaccacagaagaactttctccaagaacggttgaagcttattgcagagctttgggattctggaatcaaggcagagatgctatacaagaacaaccccaaactattaacccagctgcactattgtgagagcacaggcattccactggtggtcattattggtgagcaagaactgaaagaaggggtcatcaagatccgttcagtggccagcagagaggaggtggccattaaacgggaaaattttgtggctgaaattcagaagcgactgtctgagtcttgatccttgcctgattcccatctgctgctctttgtagaaaaggtttcctctagaactgaattcctctggaattgagtgatggacttcacaacaactagccaggaagggtgacaagtaccttctgcctcctccattcttcctgggtgcagaactgtagaagaccctgaggactcctgggctagtgtgagcagctattctgcatgggtgcagatggctggatgtgaaagagacatgctctagctgcagaggcaaatttgaagtgccacggaacgttgtcaagaggtagtgagattgttgctgtgagcaaggctctgggagagtcacctcaggctcaggattctgaaccattgagatcagaaaccagatacttagccttctactgtagctacggaaccagattctggtgaatttgtccacaatcagccattggcctgtctggggagtttttggaagacagcaaagaggggcaatggctgctttcagctttgaggacagatgctatcctaagggcatggcagtacccatgttgatttgacatctctctagcccatccattgcttacagtagaagagtggggctgtatgcttgataatcttgaacattgaacttaatagatgacttgacaaggtagagatctgatattttgagattttggagaccatttcctgtgccagaatcactgctctattccataccgtgccatggaggctgttttagaagtggttggataacatgttaaataaaatattaagtgtagta

SEQ ID NO: 365972 - DNA, 2506 bp, Homo sapiens
atttccggctcctcccggaagtgccgaagctggctactaagggaacttgggaggatcccacctcagccttcgtgactagtgaggccttttgttcctgtcccggaaagccggcgtcctgccgcgcgatgcccctgctcggacttcttcccaggagggcctgggcttcgctgctcagccagctcctgcgaccgccctgcgcttcgtgcaccggggcggtccgttgccaaagccaggttgcagaggcagtgttaacatcccaactgaaagcacatcaagagaaaccaaattttattatcaagaccccaaagggtaccagggatcttagtcctcagcatatggttgtgagggagaaaattcttgatttggttatcagctgctttaaacgtcatggagcaaaggggatggacaccccagcatttgagctgaaggaaaccctgactgagaagtatggagaggactctgggctcatgtatgatctgaaggatcaaggtggagagctgttgtccctccgctatgaccttactgttccctttgctcgttatctggccatgaataaggtgaagaagatgaaacgttatcatgttggaaaggtgtggcggcgagagagcccaaccatagtccaaggccgttatagggagttctgccagtgtgtaagtgacctgatgggagcagcacagtttgatagttctaggggccacaaccttgaaactggctggataatggatgttttttcccatctttttctttgctgtaggattttgacattgctggtcagtttgaccctatgatccccgatgcagagtgtttgaagatcatgtgtgaaatcctaagtggattgcagttgggagactttctcattaaggtaaatgaccggcggattgtggatgggatgtttgctgtctgtggtgttcctgaaagcaagttccgtgccatctgctcctccatagataaactagacaagatggcttggaaagatgtgagacatgagatggtggtgaagaaaggcctggctcctgaggtggctgatcgaattggggactatgtccagtgtcatggtggggtatccctagtagagcaaatgtttcaggatcccagactatcccagaacaagcaggccctggagggcctgggagacctaaagctgctatttgaatacctgactttatttggaattgctgataagatctcctttgacctcagcctggctcggggcctagactactatacaggagtgatctatgaagcagtgctgctgcagaccccaactcaggctggggaggagcccctgaatgtgggcagtgtggctgctggtgggcgctatgatgggctggtgggcatgtttgaccccaagggccacaaggtgccatgtgtgggactcagcattggggttgagcgaatcttctacattgtggagcagaggatgaagaccaaaggtgagaaggtgcggactacagagactcaagtgtttgtggccacaccacagaagaactttctccaagaacggttgaagcttattgcagagctttgggattctggaatcaaggcagagatgctatacaagaacaaccccaaactattaacccagctgcactattgtgagagcacaggcattccactggtggtcattattggtgagcaagaactgaaagaaggggtcatcaagatccgttcagtggccagcagagaggaggtggccattaaacgggaaaattttgtggctgaaattcagaagcgactgtctgagtcttgatccttgcctgattcccatctgctgctctttgtagaaaaggtttcctctagaactgaattcctctggaattgagtgatggacttcacaacaactagccaggaagggtgacaagtaccttctgcctcctccattcttcctgggtgcagaactgtagaagaccctgaggactcctgggctagtgtgagcagctattctgcatgggtgcagatggctggatgtgaaagagacatgctctagctgcagaggcaaatttgaagtgccacggaacgttgtcaagaggtagtgagattgttgctgtgagcaaggctctgggagagtcacctcaggctcaggattctgaaccattgagatcagaaaccagatacttagccttctactgtagctacggaaccagattctggtgaatttgtccacaatcagccattggcctgtctggggagtttttggaagacagcaaagaggggcaatggctgctttcagctttgaggacagatgctatcctaagggcatggcagtacccatgttgatttgacatctctctagcccatccattgcttacagtagaagagtggggctgtatgcttgataatcttgaacattgaacttaatagatgacttgacaaggtagagatctgatattttgagattttggagaccatttcctgtgccagaatcactgctctattccataccgtgccatggaggctgttttagaagtggttggataacatgttaaataaaatattaagtgtagta

SEQ ID NO: 365973 - DNA, 2044 bp, Homo sapiens
atttccggctcctcccggaagtgccgaagctggctactaagggaacttgggaggatcccacctcagccttcgtgactagtgaggtgcgcaaacgcccgagttttccctggtgcgcgggttccgcctttgcagtgccctccacccttcctggtgtctgacccgcctccttcccaggccttttgttcctgtcccggaaagccggcgtcctgccgcgcgatgcccctgctcggacttcttcccaggagggcctgggcttcgctgctcagccagctcctgcgaccgccctgcgcttcgtgcaccggggcggtccgttgccaaagccaggttgcagaggcagtgttaacatcccaactgaaagcacatcaagagaaaccaaattttattatcaagaccccaaagggtaccagggatcttagtcctcagcatatggttgtgagggagaaaattcttgatttggttatcagctgctttaaacgtcatggagcaaaggggatggacaccccagcatttgagctgaaggaaaccctgactgagaagtatggagaggactctgggctcatgtatgatctgaaggatcaaggtggagagctgttgtccctccgctatgaccttactgttccctttgctcgttatctggccatgaataaggtgaagaagatgaaacgttatcatgttggaaaggtgtggcggcgagagagcccaaccatagtccaaggccgttatagggagttctgccagtgtgattttgacattgctggtcagtttgaccctatgatccccgatgcagagtgtttgaagatcatgtgtgaaatcctaagtggattgcagttgggagactttctcattaaggtaaatgaccggcggattgtggatgggatgtttgctgtctgtggtgttcctgaaagcaagttccgtgccatctgctcctccatagataaactagacaagatggcttggaaagatgtgagacatgagatggtggtgaagaaaggcctggctcctgaggtggctgatcgaattggggactatgtccagtgtcatggtggggtatccctagtagagcaaatgtttcaggatcccagactatcccagaacaagcaggccctggagggcctgggagacctaaagctgctatttgaatacctgactttatttggaattgctgataagatctcctttgacctcagcctggctcggggcctagactactatacaggagtgatctatgaagcagtgctgctgcagaccccaactcaggctggggaggagcccctgaatgtgggcagtgtggctgctggtgggcgctatgatgggctggtgggcatgtttgaccccaagggccacaaggtgccatgtgtgggactcagcattggggttgagcgaatcttctacattgtggagcagaggatgaagaccaaaggtgagaaggtgcggactacagagactcaagtgtttgtggccacaccacagaagaactttctccaagaacggttgaagcttattgcagagctttgggattctggaatcaaggcagagatgctatacaagaacaaccccaaactattaacccagctgcactattgtgagagcacaggcattccactggtggtcattattggtgagcaagaactgaaagaaggggtcatcaagatccgttcagtggccagcagagaggaggtggccattaaacgggaaaattttgtggctgaaattcagaagcgactgtctgagtcttgatccttgcctgattcccatctgctgctctttgtagaaaaggtttcctctagaactgaattcctctggaattgagtgatggacttcacaacaactagccaggaagggtgacaagtaccttctgcctcctccattcttcctgggtgcagaactgtagaagaccctgaggactcctgggctagtgtgagcagctattctgcatgggtgcagatggctggatgtgaaagagacatgctctagctgcagaggcaaatttgaagtgccacggaacgttgtcaagagacaaaaaacttggactttcgccgaaagt

SEQ ID NO: 365974 - DNA, 6101 bp, Homo sapiens
cgcagggaaaggcggacctcagtgtctgaaaagccagcttagagtgggagggcctgggagtagaaggtaaaaagggagtggtgagaatgaatgtgagaaggaagccaggacagcgcagtccccagtcccgaacggccagggagaggaggtggcctagcgctggcggggctcaccccaatccgtctgccttttgatgccgtactctgctggttgcgcagccacctcgggatactgcacacggagaggagggaaaataagcgaggcaccgccgcaccacgcgggagacctacggagacccacagcgcccgagccctggaagagcactactggatgtcagcggagaaatggctttgagctcagcctggcgctcggttctgcctctgtggctcctctggagcgctgcctgctcccgcgccgcgtccggggacgacaacgcttttccttttgacattgaagggagctcagcggttggcaggcaagacccgcctgagacgagcgaaccccgcgtggctctgggacgcctgccgcctgcggccgagaaatgcaatgctggattctttcacaccctgtcgggagaatgtgtgccctgcgactgtaatggcaattccaacgagtgtttggacggctcaggatactgtgtgcactgccagcggaacacaacaggagagcactgtgaaaagtgtctggatggttatatcggagattccatcaggggagcaccccaattctgccagccgtgcccctgtcccctgccccacttggccaattttgcagaatcctgctataggaaaaatggagctgttcggtgcatttgtaacgaaaattatgctggacctaactgtgaaagatgtgctcccggttactatggaaaccccttactcattggaagcacctgtaagaaatgtgactgcagtggaaattcagatcccaacctgatctttgaagattgtgatgaagtcactggccagtgtaggaattgcttacgcaacaccaccggattcaagtgtgaacgttgcgctcctggctactatggggacgccaggatagccaagaactgtgcagtgtgcaactgcgggggaggcccatgtgacagtgtaaccggagaatgcttggaagaaggttttgaaccccctacaggctgtgataagtgcgtctgggacctgactgatgacctgcggttagcagcgctctccatcgaggaaggcaaatccggggtgctgagcgtatcctctggggccgccgctcataggcacgtgaatgaaatcaacgccaccatctacctcctcaaaacaaaattgtcagaaagagaaaaccaatacgccctaagaaagatacaaatcaacaatgctgagaacacgatgaaaagccttctgtctgacgtagaggaattagttgaaaaggaaaatcaagcctccagaaaaggacaacttgttcagaaggaaagcatggacaccattaaccacgcaagtcagctggtagagcaagcccatgatatgagggataaaatccaagagatcaacaacaagatgctctattatggggaagagcatgaacttagccccaaggaaatctctgagaagctggtgttggcccagaagatgcttgaagagattagaagccgtcaaccatttttcacccaacgggagctcgtggatgaggaggcagatgaggcttacgaactactgagccaggctgagagctggcagcggctgcacaatgagacccgcactctgtttcctgtcgtcctggagcagctggatgactacaatgctaagttgtcagatctccaggaagcacttgaccaggcccttaaccatgtcagggatgccgaagacatgaacagggccacagcagccaggcagcgggaccatgagaaacaacaggaaagagtgagggaacaaatggaagtggtgaacatgtctctgagcacatctgcggactctctgacaacacctcgtctaactctttcagaacttgatgatataataaagaatgcgtcagggatttatgcagaaatagatggagccaaaagtgaactacaagtaaaactatctaacctaagtaacctcagccatgatttagtccaagaagctattgaccatgcacaggaccttcaacaagaagctaatgaattgagcaggaagttgcacagttcagatatgaacgggctggtacagaaggctttggatgcatcaaatgtctatgaaaatattgttaattatgttagtgaagccaatgaaacagcagaatttgctttgaacaccactgaccgaatttatgatgcggtgagtgggattgatactcaaatcatttaccataaagatgaaagtgagaacctcctcaatcaagccagagaactgcaagcaaaggcagagtctagcagtgatgaagcagtggctgacactagcaggcgtgtgggtggagccctagcaaggaaaagtgcccttaaaaccagactcagtgatgccgttaagcaactacaagcagcagagagaggggatgcccagcagcgcctggggcagtctagactgatcaccgaggaagccaacaggacgacgatggaggtgcagcaggccactgcccccatggccaacaatctaaccaactggtcacagaatcttcaacattttgactcttctgcttacaacactgcagtgaactctgctagggatgcagtaagaaatctgaccgaggttgtccctcagctcctggatcagcttcgtacggttgagcagaagcgacctgcaagcaacgtttctgccagcatccagaggatccgagagctcattgctcagaccagaagtgttgccagcaagatccaagtctccatgatgtttgatggccagtcagctgtggaagtgcactcgagaaccagtatggatgacttaaaggccttcacgtctctgagcctgtacatgaaaccccctgtgaagcggccggaactgaccgagactgcagatcagtttatcctgtacctcggaagcaaaaacgccaaaaaagagtatatgggtcttgcaatcaaaaatgataatctggtatacgtctataatttgggaactaaagatgtggagattcccctggactccaagcccgtcagttcctggcctgcttacttcagcattgtcaagattgaaagggtgggaaaacatggaaaggtgtttttaacagtcccgagtctaagtagcacagcagaggaaaagttcattaaaaagggggaattttcgggagatgactctctgctggacctggaccctgaggacacagtgttttatgttggtggagtgccttccaacttcaagctccctaccagcttaaacctgcctggctttgttggctgcctggaactggccactttgaataatgatgtgatcagcttgtacaactttaagcacatctataatatggacccctccacatcagtgccatgtgcccgagataagctggccttcactcagagtcgggctgccagttacttcttcgatggctccggttatgccgtggtgagagacatcacaaggagagggaaatttggtcaggtgactcgctttgacatagaagttcgaacaccagctgacaacggccttattctcctgatggtcaatggaagtatgtttttcagactggaaatgcgcaatggttacctacatgtgttctatgattttggattcagcagtggccgtgtgcatcttgaagatacgttaaagaaagctcaaattaatgatgcaaaataccatgagatctcaatcatttaccacaatgataagaaaatgatcttggtagttgacagaaggcatgtcaagagcatggataatgaaaagatgaaaataccttttacagatatatacattggaggagctcctccagaaatcttacaatccagggccctcagagcacaccttcccctagatatcaacttcagaggatgcatgaagggcttccagttccaaaagaaggacttcaatttactggagcagacagaaaccctgggagttggttatggatgcccagaagactcacttatatctcgcagagcatatttcaatggacagagcttcattgcttcaattcagaaaatatctttctttgatggctttgaaggaggttttaatttccgaacattacaaccaaatgggttactattctattatgcttcagggtcagacgtgttctccatctcactggataatggtactgtcatcatggatgtaaagggaatcaaagttcagtcagtagataagcagtacaatgatgggctgtcccacttcgtcattagctctgtctcacccacaagatatgaactgatagtagataaaagcagagttgggagtaagaatcctaccaaagggaaaatagaacagacacaagcaagtgaaaagaagttttacttcggtggctcaccaatcagtgctcagtatgctaatttcactggctgcataagtaatgcctactttaccagggtggatagagatgtggaggttgaagatttccaacggtatactgaaaaggtccacacttctctttatgagtgtcccattgagtcttcaccattgtttctcctccataaaaaaggaaaaaatttatccaagcctaaagcaagtcagaataaaaagggagggaaaagtaaagatgcaccttcatgggatcctgttgctctgaaactcccagagcggaatactccaagaaactctcattgccacctttccaacagccctagagcaatagagcacgcctatcaatatggaggaacagccaacagccgccaagagtttgaacacttaaaaggagattttggtgccaaatctcagttttccattcgtctgagaactcgttcctcccatggcatgatcttctatgtctcagatcaagaagagaatgacttcatgactctatttttggcccatggccgcttggtttacatgtttaatgttggtcacaaaaaactgaagattagaagccaggagaaatacaatgatggcctgtggcatgatgtgatatttattcgagaaaggagcagtggccgactggtaattgatggtctccgagtcctagaagaaagtcttcctcctactgaagctacctggaaaatcaagggtcccatttatttgggaggtgtggctcctggaaaggctgtgaaaaatgttcagattaactccatctacagttttagtggctgtctcagcaatctccagctcaatggggcctccatcacctctgcttctcagacattcagtgtgaccccttgctttgaaggccccatggaaacaggaacttacttttcaacagaaggaggatacgtggttctagatgaatctttcaatattggattgaagtttgaaattgcatttgaagtccgtcccagaagcagttccggaaccctggtccacggccacagtgtcaatggggagtacctaaatgttcacatgaaaaatggacaggtcatagtgaaagtcaataatggcatcagagatttttccacctcagttacacccaagcagagtctctgtgatggcagatggcacagaattacagttattagagattctaatgtggttcagttggatgtggactctgaagtgaaccatgtggttggacccctgaatccaaaaccaattgatcacagggagcctgtgtttgttggaggtgttccagaatctctactgacaccacgcttggcccccagcaaacccttcacaggctgcatacgccactttgtgattgatggacacccagtgagcttcagtaaagcagccctggtcagcggcgccgtaagcatcaactcctgtccagcagcctgacatgacagagcacagctgcccaaatacaaagttctttagagcactgaaagaaacacaaagccagccaggaggaacagtaactcttccttcgggtggaagctttcatcgagttgaacaggacttaaacgaatcatcagggaccggatatttcttatttctcatttggattcttaaccttgaatccaaagtgtctgcaatggacaacaattgaaggagtggcaaacttacttgtattgagagcacacgcaattcctactggtgaaattactgtttctgtttctaataaaatagaagggattccaaata

SEQ ID NO: 365975 - DNA, 884 bp, Homo sapiens
cgcagggaaaggcggacctcagtgtctgaaaagccagcttagagtgggagggcctgggagtagaaggtaaaaagggagtggtgagaatgaatgtgagaaggaagccaggacagcgcagtccccagtcccgaacggccagggagaggaggtggcctagcgctggcggggctcaccccaatccgtctgccttttgatgccgtactgtaagctccgtccatctgtaggttcttgagccagaacctctgcgggaaggagaaaaagtgaaagagggagagggagagggagagagagggggagaaggggagagagagagagggagagagaggctggaactctcccttactctcgcactttccctttatttcctaagctgctggttgcgcagccacctcgggatactgcacacggagaggagggaaaataagcgaggcaccgccgcaccacgcgggagacctacggagacccacagcgcccgagccctggaagagcactactggatgtcagcggagaaatggctttgagctcagcctggcgctcggttctgcctctgtggctcctctggagcgctgcctgctcccgcgccgcgtccggggacgacaacgcttttccttttgacattgaagggagctcagcggttggcaggcaagacccgcctgagacgagcgaaccccgcgtggctctgggacgcctgccgcctgcggccgaggtacagtgtccctgccattgccaccctgctggggcacctgcgcccccgcgggctgtgccacactcgtccttctctctctctccgcctctttcctctccccagtgccttgagagtttcacctgggctaggtcagttcggaaacttgaaataaagagttttcctttgtaaaatgaaaatg

SEQ ID NO: 365976 - DNA, 1190 bp, Homo sapiens
  misc_feature (691)..(691): n is a, c, g, or t
caaactgaatcctgctttaattcaagcttgtggagaacaaagtcctacagaaacattccacagaattttctggaaaagagggatcacaacaaccctgtaatgaatgtgagaaggaagccaggacagcgcagtccccagtcccgaacggccagggagaggaggtggcctagcgctggcggggctcaccccaatccgtctgccttttgatgccgtactctgctggttgcgcagccacctcgggatactgcacacggagaggagggaaaataagcgaggcaccgccgcaccacgcgggagacctacggagacccacagcgcccgagccctggaagagcactactggatgtcagcggagaaatggctttgagctcagcctggcgctcggttctgcctctgtggctcctctggagcgctgcctgctcccgcgccgcgtccggggacgacaacgcttttccttttgacattgaagggagctcagcggttggcaggcaagacccgcctgagacgagcgaaccccgcgtggctctgggacgcctgccgcctgcggccgagaaatgcaatgctggattctttcacaccctgtcgggagaatgtgtgccctgcgactgtaatggcaattccaacgagtgtttggacggctcaggatactgtgtgactactgacggagaagacccaggtttttcagcttctnccctatcgttcattctcagctctcagggagccagagaagccagggctccaacatgaacacttcttgtagctcactgtcatgaccagtgtttcagtcagttcttgcaggttgcctgacttacctcatttctctcatttcctgtaagcaaccaaaaataaaaggctttcttttatttcattttgtcttattttgcttttatcttgaaggcatataagacctctgtatctgccttgttcaccttcaactgcttctaattcttcctcaattccagtgtccaatgtcaatttgaaattaaaatttacagactgattttaactaagctgttggtaaagctgacctaagccattcagccacaaaatatagagtatacaaaactatgctaccattttacacatatcaagcaagcaaagagatttttttttactggtggaacactaatctttcaaatatagaatagtggctaaatgaaaataaaacagcttagaaatctaaaatgttt

SEQ ID NO: 365977 - DNA, 721 bp, Homo sapiens
tttatcctgggcctcatgaagagtttggcaactcgctgtcttttcattaaccacatgttccatttcaatttcatgagaaaacctgcttatccaacctagagtgggtcaaggtaaaatgctagctctgtggtatgtaaagaagcctttttcttttgcagatatgaactgatagtagataaaagcagagttgggagtaagaatcctaccaaagggaaaatagaacagacacaagcaagtgaaaagaagttttacttcggtggctcaccaatcagtgctcagtatgctaatttcactggctgcataagtaatgcctactttaccagggtggatagagatgtggaggttgaagatttccaacggtatactgaaaaggtccacacttctctttatgagtgtcccattgagtcttcaccattgtttctcctccataaaaaaggaaaaaatttatccaagcctaaagcaagtcagaataaaaagggagggaaaagtaaagatgcaccttcatgggatcctgttgctctgaaactcccagagcggaatactccaagaaactctcattgccacctttccaacagccctagagcaatagagcacgcctatcaatatggaggaacagccaacagccgccaagagtttgaacacttaaaaggagattttggtgccaaatctcagttttaacattcgtctgagaactcgacccagtgtgtagtcctgctagagt

SEQ ID NO: 365978 - DNA, 6636 bp, Homo sapiens
  misc_feature (6482)..(6482): n is a, c, g, or t
cgcagggaaaggcggacctcagtgtctgaaaagccagcttagagtgggagggcctgggagtagaaggtaaaaagggagtggtgagaatgaatgtgagaaggaagccaggacagcgcagtccccagtcccgaacggccagggagaggaggtggcctagcgctggcggggctcaccccaatccgtctgccttttgatgccgtactctgctggttgcgcagccacctcgggatactgcacacggagaggagggaaaataagcgaggcaccgccgcaccacgcgggagacctacggagacccacagcgcccgagccctggaagagcactactggatgtcagcggagaaatggctttgagctcagcctggcgctcggttctgcctctgtggctcctctggagcgctgcctgctcccgcgccgcgtccggggacgacaacgcttttccttttgacattgaagggagctcagcggttggcaggcaagacccgcctgagacgagcgaaccccgcgtggctctgggacgcctgccgcctgcggccgagaaatgcaatgctggattctttcacaccctgtcgggagaatgtgtgccctgcgactgtaatggcaattccaacgagtgtttggacggctcaggatactgtgtgcactgccagcggaacacaacaggagagcactgtgaaaagtgtctggatggttatatcggagattccatcaggggagcaccccaattctgccagccgtgcccctgtcccctgccccacttggccaattttgcagaatcctgctataggaaaaatggagctgttcggtgcatttgtaacgaaaattatgctggacctaactgtgaaagatgtgctcccggttactatggaaaccccttactcattggaagcacctgtaagaaatgtgactgcagtggaaattcagatcccaacctgatctttgaagattgtgatgaagtcactggccagtgtaggaattgcttacgcaacaccaccggattcaagtgtgaacgttgcgctcctggctactatggggacgccaggatagccaagaactgtgcagtgtgcaactgcgggggaggcccatgtgacagtgtaaccggagaatgcttggaagaaggttttgaaccccctacaggctgtgataagtgcgtctgggacctgactgatgacctgcggttagcagcgctctccatcgaggaaggcaaatccggggtgctgagcgtatcctctggggccgccgctcataggcacgtgaatgaaatcaacgccaccatctacctcctcaaaacaaaattgtcagaaagagaaaaccaatacgccctaagaaagatacaaatcaacaatgctgagaacacgatgaaaagccttctgtctgacgtagaggaattagttgaaaaggaaaatcaagcctccagaaaaggacaacttgttcagaaggaaagcatggacaccattaaccacgcaagtcagctggtagagcaagcccatgatatgagggataaaatccaagagatcaacaacaagatgctctattatggggaagagcatgaacttagccccaaggaaatctctgagaagctggtgttggcccagaagatgcttgaagagattagaagccgtcaaccatttttcacccaacgggagctcgtggatgaggaggcagatgaggcttacgaactactgagccaggctgagagctggcagcggctgcacaatgagacccgcactctgtttcctgtcgtcctggagcagctggatgactacaatgctaagttgtcagatctccaggaagcacttgaccaggcccttaaccatgtcagggatgccgaagacatgaacagggccacagcagccaggcagcgggaccatgagaaacaacaggaaagagtgagggaacaaatggaagtggtgaacatgtctctgagcacatctgcggactctctgacaacacctcgtctaactctttcagaacttgatgatataataaagaatgcgtcagggatttatgcagaaatagatggagccaaaagtgaactacaagtaaaactatctaacctaagtaacctcagccatgatttagtccaagaagctattgaccatgcacaggaccttcaacaagaagctaatgaattgagcaggaagttgcacagttcagatatgaacgggctggtacagaaggctttggatgcatcaaatgtctatgaaaatattgttaattatgttagtgaagccaatgaaacagcagaatttgctttgaacaccactgaccgaatttatgatgcggtgagtgggattgatactcaaatcatttaccataaagatgaaagtgagaacctcctcaatcaagccagagaactgcaagcaaaggcagagtctagcagtgatgaagcagtggctgacactagcaggcgtgtgggtggagccctagcaaggaaaagtgcccttaaaaccagactcagtgatgccgttaagcaactacaagcagcagagagaggggatgcccagcagcgcctggggcagtctagactgatcaccgaggaagccaacaggacgacgatggaggtgcagcaggccactgcccccatggccaacaatctaaccaactggtcacagaatcttcaacattttgactcttctgcttacaacactgcagtgaactctgctagggatgcagtaagaaatctgaccgaggttgtccctcagctcctggatcagcttcgtacggttgagcagaagcgacctgcaagcaacgtttctgccagcatccagaggatccgagagctcattgctcagaccagaagtgttgccagcaagatccaagtctccatgatgtttgatggccagtcagctgtggaagtgcactcgagaaccagtatggatgacttaaaggccttcacgtctctgagcctgtacatgaaaccccctgtgaagcggccggaactgaccgagactgcagatcagtttatcctgtacctcggaagcaaaaacgccaaaaaagagtatatgggtcttgcaatcaaaaatgataatctggtatacgtctataatttgggaactaaagatgtggagattcccctggactccaagcccgtcagttcctggcctgcttacttcagcattgtcaagattgaaagggtgggaaaacatggaaaggtgtttttaacagtcccgagtctaagtagcacagcagaggaaaagttcattaaaaagggggaattttcgggagatgactctctgctggacctggaccctgaggacacagtgttttatgttggtggagtgccttccaacttcaagctccctaccagcttaaacctgcctggctttgttggctgcctggaactggccactttgaataatgatgtgatcagcttgtacaactttaagcacatctataatatggacccctccacatcagtgccatgtgcccgagataagctggccttcactcagagtcgggctgccagttacttcttcgatggctccggttatgccgtggtgagagacatcacaaggagagggaaatttggtcaggtgactcgctttgacatagaagttcgaacaccagctgacaacggccttattctcctgatggtcaatggaagtatgtttttcagactggaaatgcgcaatggttacctacatgtgttctatgattttggattcagcagtggccgtgtgcatcttgaagatacgttaaagaaagctcaaattaatgatgcaaaataccatgagatctcaatcatttaccacaatgataagaaaatgatcttggtagttgacagaaggcatgtcaagagcatggataatgaaaagatgaaaataccttttacagatatatacattggaggagctcctccagaaatcttacaatccagggccctcagagcacaccttcccctagatatcaacttcagaggatgcatgaagggcttccagttccaaaagaaggacttcaatttactggagcagacagaaaccctgggagttggttatggatgcccagaagactcacttatatctcgcagagcatatttcaatggacagagcttcattgcttcaattcagaaaatatctttctttgatggctttgaaggaggttttaatttccgaacattacaaccaaatgggttactattctattatgcttcagggtcagacgtgttctccatctcactggataatggtactgtcatcatggatgtaaagggaatcaaagttcagtcagtagataagcagtacaatgatgggctgtcccacttcgtcattagctctgtctcacccacaagatatgaactgatagtagataaaagcagagttgggagtaagaatcctaccaaagggaaaatagaacagacacaagcaagtgaaaagaagttttacttcggtggctcaccaatcagtgctcagtatgctaatttcactggctgcataagtaatgcctactttaccagggtggatagagatgtggaggttgaagatttccaacggtatactgaaaaggtccacacttctctttatgagtgtcccattgagtcttcaccattgtttctcctccataaaaaaggaaaaaatttatccaagcctaaagcaagtcagaataaaaagggagggaaaagtaaagatgcaccttcatgggatcctgttgctctgaaactcccagagcggaatactccaagaaactctcattgccacctttccaacagccctagagcaatagagcacgcctatcaatatggaggaacagccaacagccgccaagagtttgaacacttaaaaggagattttggtgccaaatctcagttttccattcgtctgagaactcgttcctcccatggcatgatcttctatgtctcagatcaagaagagaatgacttcatgactctatttttggcccatggccgcttggtttacatgtttaatgttggtcacaaaaaactgaagattagaagccaggagaaatacaatgatggcctgtggcatgatgtgatatttattcgagaaaggagcagtggccgactggtaattgatggtctccgagtcctagaagaaagtcttcctcctactgaagctacctggaaaatcaagggtcccatttatttgggaggtgtggctcctggaaaggctgtgaaaaatgttcagattaactccatctacagttttagtggctgtctcagcaatctccagctcaatggggcctccatcacctctgcttctcagacattcagtgtgaccccttgctttgaaggccccatggaaacaggaacttacttttcaacagaaggaggatacgtggttctagatgaatctttcaatattggattgaagtttgaaattgcatttgaagtccgtcccagaagcagttccggaaccctggtccacggccacagtgtcaatggggagtacctaaatgttcacatgaaaaatggacaggtcatagtgaaagtcaataatggcatcagagatttttccacctcagttacacccaagcagagtctctgtgatggcagatggcacagaattacagttattagagattctaatgtggttcagttggatgtggactctgaagtgaaccatgtggttggacccctgaatccaaaaccaattgatcacagggagcctgtgtttgttggaggtgttccagaatctctactgacaccacgcttggcccccagcaaacccttcacaggctgcatacgccactttgtgattgatggacacccagtgagcttcagtaaagcagccctggtcagcggcgccgtaagcatcaactcctgtccagcagcctgacatgacagagcacagctgcccaaatacaaagttctttagagcactgaaagaaacacaaagccagccaggaggaacagtaactcttccttcgggtggaagctttcatcgagttgaacaggacttaaacgaatcatcagggaccggatatttcttatttctcatttggattcttaaccttgaatccaaagtgtctgcaatggacaacaattgaaggagtggcaaacttacttgtattgagagcacacgcaattcctactggtgaaattactgtttctgtttctaataaaatagaagggattccaaataaacacttgcacacatttttgaagtgcggctagattctcagattcacctttcttccagggaagataactttcaatctatataaaaatctctgtcctaaaactacctttctttattttgaagagacttactaacttacatataatctaaattagatgatagatttgtttttagcccttttgtttggtctatcagtataagaagaatattttaggtttatagctgaagttatcaaggtttaataaagtaaatttctaacagaatactagaaaaatgcagtataatttaattttttctaaataagaaacacaggaaatcaactactttttccccttccttatctccttaaaagaaaaataaaattgtacatgagaggaaaaaaangtttataacccccattgaggtgctcataggcactttagaaactaaaaaaccctttggggggggcccggcccccaatttgcccttatagagggggtttacacatcaatggccggcgttttacaactgctggactggaaaaaccctggcgttccca

SEQ ID NO: 365979 - DNA, 4307 bp, Homo sapiens
ataagcactaggtagtcatcataatggttcattcctctgcctgacttccatcacataaacaaactcctgcaagaagaagtgcagagggctgtttttaaatcgtcattcccttttcctgctgctactgccagacaggcagctgtcagagaaccaaaatgctgttcagcaaagacagaagaatgcagaggaggtgtgaccctcaagaaaaccttgccacactaggtgactttgaataacaggaaggaagcatctgtgatcctagaagtatttaaaaagcaagcattaaacatggccccattccccaagaaggtaagaaggagaaataacaatgtttgtttattaacaggaagttgcacagttcagatatgaacgggctggtacagaaggctttggatgcatcaaatgtctatgaaaatattgttaattatgttagtgaagccaatgaaacagcagaatttgctttgaacaccactgaccgaatttatgatgcggtgagtgggattgatactcaaatcatttaccataaagatgaaagtgagaacctcctcaatcaagccagagaactgcaagcaaaggcagagtctagcagtgatgaagcagtggctgacactagcaggcgtgtgggtggagccctagcaaggaaaagtgcccttaaaaccagactcagtgatgccgttaagcaactacaagcagcagagagaggggatgcccagcagcgcctggggcagtctagactgatcaccgaggaagccaacaggacgacgatggaggtgcagcaggccactgcccccatggccaacaatctaaccaactggtcacagaatcttcaacattttgactcttctgcttacaacactgcagtgaactctgctagggatgcagtaagaaatctgaccgaggttgtccctcagctcctggatcagcttcgtacggttgagcagaagcgacctgcaagcaacgtttctgccagcatccagaggatccgagagctcattgctcagaccagaagtgttgccagcaagatccaagtctccatgatgtttgatggccagtcagctgtggaagtgcactcgagaaccagtatggatgacttaaaggccttcacgtctctgagcctgtacatgaaaccccctgtgaagcggccggaactgaccgagactgcagatcagtttatcctgtacctcggaagcaaaaacgccaaaaaagagtatatgggtcttgcaatcaaaaatgataatctggtatacgtctataatttgggaactaaagatgtggagattcccctggactccaagcccgtcagttcctggcctgcttacttcagcattgtcaagattgaaagggtgggaaaacatggaaaggtgtttttaacagtcccgagtctaagtagcacagcagaggaaaagttcattaaaaagggggaattttcgggagatgactctctgctggacctggaccctgaggacacagtgttttatgttggtggagtgccttccaacttcaagctccctaccagcttaaacctgcctggctttgttggctgcctggaactggccactttgaataatgatgtgatcagcttgtacaactttaagcacatctataatatggacccctccacatcagtgccatgtgcccgagataagctggccttcactcagagtcgggctgccagttacttcttcgatggctccggttatgccgtggtgagagacatcacaaggagagggaaatttggtcaggtgactcgctttgacatagaagttcgaacaccagctgacaacggccttattctcctgatggtcaatggaagtatgtttttcagactggaaatgcgcaatggttacctacatgtgttctatgattttggattcagcagtggccgtgtgcatcttgaagatacgttaaagaaagctcaaattaatgatgcaaaataccatgagatctcaatcatttaccacaatgataagaaaatgatcttggtagttgacagaaggcatgtcaagagcatggataatgaaaagatgaaaataccttttacagatatatacattggaggagctcctccagaaatcttacaatccagggccctcagagcacaccttcccctagatatcaacttcagaggatgcatgaagggcttccagttccaaaagaaggacttcaatttactggagcagacagaaaccctgggagttggttatggatgcccagaagactcacttatatctcgcagagcatatttcaatggacagagcttcattgcttcaattcagaaaatatctttctttgatggctttgaaggaggttttaatttccgaacattacaaccaaatgggttactattctattatgcttcagggtcagacgtgttctccatctcactggataatggtactgtcatcatggatgtaaagggaatcaaagttcagtcagtagataagcagtacaatgatgggctgtcccacttcgtcattagctctgtctcacccacaagatatgaactgatagtagataaaagcagagttgggagtaagaatcctaccaaagggaaaatagaacagacacaagcaagtgaaaagaagttttacttcggtggctcaccaatcagtgctcagtatgctaatttcactggctgcataagtaatgcctactttaccagggtggatagagatgtggaggttgaagatttccaacggtatactgaaaaggtccacacttctctttatgagtgtcccattgagtcttcaccattgtttctcctccataaaaaaggaaaaaatttatccaagcctaaagcaagtcagaataaaaagggagggaaaagtaaagatgcaccttcatgggatcctgttgctctgaaactcccagagcggaatactccaagaaactctcattgccacctttccaacagccctagagcaatagagcacgcctatcaatatggaggaacagccaacagccgccaagagtttgaacacttaaaaggagattttggtgccaaatctcagttttccattcgtctgagaactcgttcctcccatggcatgatcttctatgtctcagatcaagaagagaatgacttcatgactctatttttggcccatggccgcttggtttacatgtttaatgttggtcacaaaaaactgaagattagaagccaggagaaatacaatgatggcctgtggcatgatgtgatatttattcgagaaaggagcagtggccgactggtaattgatggtctccgagtcctagaagaaagtcttcctcctactgaagctacctggaaaatcaagggtcccatttatttgggaggtgtggctcctggaaaggctgtgaaaaatgttcagattaactccatctacagttttagtggctgtctcagcaatctccagctcaatggggcctccatcacctctgcttctcagacattcagtgtgaccccttgctttgaaggccccatggaaacaggaacttacttttcaacagaaggaggatacgtggttctagatgaatctttcaatattggattgaagtttgaaattgcatttgaagtccgtcccagaagcagttccggaaccctggtccacggccacagtgtcaatggggagtacctaaatgttcacatgaaaaatggacaggtcatagtgaaagtcaataatggcatcagagatttttccacctcagttacacccaagcagagtctctgtgatggcagatggcacagaattacagttattagagattctaatgtggttcagttggatgtggactctgaagtgaaccatgtggttggacccctgaatccaaaaccaattgatcacagggagcctgtgtttgttggaggtgttccagaatctctactgacaccacgcttggcccccagcaaacccttcacaggctgcatacgccactttgtgattgatggacacccagtgagcttcagtaaagcagccctggtcagcggcgccgtaagcatcaactcctgtccagcagcctgacatgacagagcacagctgcccaaatacaaagttctttagagcactgaaagaaacacaaagccagccaggaggaacagtaactcttccttcgggtggaagctttcatcgagttgaacaggacttaaacgaatcatcagggaccggatatttcttatttctcatttggattcttaaccttgaatccaaagtgtctgcaatggacaacaattgaaggagtggcaaacttacttgtattgagagcacacgcaattcctactggtgaaattactgtttctgtttctaataaaatagaagggattccaaata

SEQ ID NO: 365980 - DNA, 3586 bp, Homo sapiens
gatacaggctagactgaccaccctgactggcaacgctattacctaagacattcagacggccactgcccccatggccaacaatctaaccaactggtcacagaatcttcaacattttgactcttctgcttacaacactgcagtgaactctgctagggatgcagtaagaaatctgaccgaggttgtccctcagctcctggatcagcttcgtacggttgagcagaagcgacctgcaagcaacgtttctgccagcatccagaggatccgagagctcattgctcagaccagaagtgttgccagcaagatccaagtctccatgatgtttgatggccagtcagctgtggaagtgcactcgagaaccagtatggatgacttaaaggccttcacgtctctgagcctgtacatgaaaccccctgtgaagcggccggaactgaccgagactgcagatcagtttatcctgtacctcggaagcaaaaacgccaaaaaagagtatatgggtcttgcaatcaaaaatgataatctggtatacgtctataatttgggaactaaagatgtggagattcccctggactccaagcccgtcagttcctggcctgcttacttcagcattgtcaagattgaaagggtgggaaaacatggaaaggtgtttttaacagtcccgagtctaagtagcacagcagaggaaaagttcattaaaaagggggaattttcgggagatgactctctgctggacctggaccctgaggacacagtgttttatgttggtggagtgccttccaacttcaagctccctaccagcttaaacctgcctggctttgttggctgcctggaactggccactttgaataatgatgtgatcagcttgtacaactttaagcacatctataatatggacccctccacatcagtgccatgtgcccgagataagctggccttcactcagagtcgggctgccagttacttcttcgatggctccggttatgccgtggtgagagacatcacaaggagagggaaatttggtcaggtgactcgctttgacatagaagttcgaacaccagctgacaacggccttattctcctgatggtcaatggaagtatgtttttcagactggaaatgcgcaatggttacctacatgtgttctatgattttggattcagcagtggccgtgtgcatcttgaagatacgttaaagaaagctcaaattaatgatgcaaaataccatgagatctcaatcatttaccacaatgataagaaaatgatcttggtagttgacagaaggcatgtcaagagcatggataatgaaaagatgaaaataccttttacagatatatacattggaggagctcctccagaaatcttacaatccagggccctcagagcacaccttcccctagatatcaacttcagaggatgcatgaagggcttccagttccaaaagaaggacttcaatttactggagcagacagaaaccctgggagttggttatggatgcccagaagactcacttatatctcgcagagcatatttcaatggacagagcttcattgcttcaattcagaaaatatctttctttgatggctttgaaggaggttttaatttccgaacattacaaccaaatgggttactattctattatgcttcagggtcagacgtgttctccatctcactggataatggtactgtcatcatggatgtaaagggaatcaaagttcagtcagtagataagcagtacaatgatgggctgtcccacttcgtcattagctctgtctcacccacaagatatgaactgatagtagataaaagcagagttgggagtaagaatcctaccaaagggaaaatagaacagacacaagcaagtgaaaagaagttttacttcggtggctcaccaatcagtgctcagtatgctaatttcactggctgcataagtaatgcctactttaccagggtggatagagatgtggaggttgaagatttccaacggtatactgaaaaggtccacacttctctttatgagtgtcccattgagtcttcaccattgtttctcctccataaaaaaggaaaaaatttatccaagcctaaagcaagtcagaataaaaagggagggaaaagtaaagatgcaccttcatgggatcctgttgctctgaaactcccagagcggaatactccaagaaactctcattgccacctttccaacagccctagagcaatagagcacgcctatcaatatggaggaacagccaacagccgccaagagtttgaacacttaaaaggagattttggtgccaaatctcagttttccattcgtctgagaactcgttcctcccatggcatgatcttctatgtctcagatcaagaagagaatgacttcatgactctatttttggcccatggccgcttggtttacatgtttaatgttggtcacaaaaaactgaagattagaagccaggagaaatacaatgatggcctgtggcatgatgtgatatttattcgagaaaggagcagtggccgactggtaattgatggtctccgagtcctagaagaaagtcttcctcctactgaagctacctggaaaatcaagggtcccatttatttgggaggtgtggctcctggaaaggctgtgaaaaatgttcagattaactccatctacagttttagtggctgtctcagcaatctccagctcaatggggcctccatcacctctgcttctcagacattcagtgtgaccccttgctttgaaggccccatggaaacaggaacttacttttcaacagaaggaggatacgtggttctagatgaatctttcaatattggattgaagtttgaaattgcatttgaagtccgtcccagaagcagttccggaaccctggtccacggccacagtgtcaatggggagtacctaaatgttcacatgaaaaatggacaggtcatagtgaaagtcaataatggcatcagagatttttccacctcagttacacccaagcagagtctctgtgatggcagatggcacagaattacagttattagagattctaatgtggttcagttggatgtggactctgaagtgaaccatgtggttggacccctgaatccaaaaccaattgatcacagggagcctgtgtttgttggaggtgttccagaatctctactgacaccacgcttggcccccagcaaacccttcacaggctgcatacgccactttgtgattgatggacacccagtgagcttcagtaaagcagccctggtcagcggcgccgtaagcatcaactcctgtccagcagcctgacatgacagagcacagctgcccaaatacaaagttctttagagcactgaaagaaacacaaagccagccaggaggaacagtaactcttccttcgggtggaagctttcatcgagttgaacaggacttaaacgaatcatcagggaccggatatttcttatttctcatttggattcttaaccttgaatccaaagtgtctgcaatggacaacaattgaaggagtggcaaacttacttgtattgagagcacacgcaattcctactggtgaaattactgtttctgtttctaataaaatagaagggattccaaata

SEQ ID NO: 365981 - DNA, 5968 bp, Homo sapiens
cgcagggaaaggcggacctcagtgtctgaaaagccagcttagagtgggagggcctgggagtagaaggtaaaaagggagtggtgagaatgaatgtgagaaggaagccaggacagcgcagtccccagtcccgaacggccagggagaggaggtggcctagcgctggcggggctcaccccaatccgtctgccttttgatgccgtactctgctggttgcgcagccacctcgggatactgcacacggagaggagggaaaataagcgaggcaccgccgcaccacgcgggagacctacggagacccacagcgcccgagccctggaagagcactactggatgtcagcggagaaatggctttgagctcagcctggcgctcggttctgcctctgtggctcctctggagcgctgcctgctcccgcgccgcgtccggggacgacaacgcttttccttttgacattgaagggagctcagcggttggcaggcaagacccgcctgagacgagcgaaccccgcgtggctctgggacgcctgccgcctgcggccgagaaatgcaatgctggattctttcacaccctgtcgggagaatgtgtgccctgcgactgtaatggcaattccaacgagtgtttggacggctcaggatactgtgtgcactgccagcggaacacaacaggagagcactgtgaaaagtgtctggatggttatatcggagattccatcaggggagcaccccaattctgccagccgtgcccctgtcccctgccccacttggccaattttgcagaatcctgctataggaaaaatggagctgttcggtgcatttgtaacgaaaattatgctggacctaactgtgaaagatgtgctcccggttactatggaaaccccttactcattggaagcacctgtaagaaatgtgactgcagtggaaattcagatcccaacctgatctttgaagattgtgatgaagtcactggccagtgtaggaattgcttacgcaacaccaccggattcaagtgtgaacgttgcgctcctggctactatggggacgccaggatagccaagaactgtgcagtgtgcaactgcgggggaggcccatgtgacagtgtaaccggagaatgcttggaagaaggttttgaaccccctacaggcatggactgcccaaccataagctgtgataagtgcgtctgggacctgactgatgacctgcggttagcagcgctctccatcgaggaaggcaaatccggggtgctgagcgtatcctctggggccgccgctcataggcacgtgaatgaaatcaacgccaccatctacctcctcaaaacaaaattgtcagaaagagaaaaccaatacgccctaagaaagatacaaatcaacaatgctgagaacacgatgaaaagccttctgtctgacgtagaggaattagttgaaaaggaaaatcaagcctccagaaaaggacaacttgttcagaaggaaagcatggacaccattaaccacgcaagtcagctggtagagcaagcccatgatatgagggataaaatccaagagatcaacaacaagatgctctattatggggaagagcatgaacttagccccaaggaaatctctgagaagctggtgttggcccagaagatgcttgaagagattagaagccgtcaaccatttttcacccaacgggagctcgtggatgaggaggcagatgaggcttacgaactactgagccaggctgagagctggcagcggctgcacaatgagacccgcactctgtttcctgtcgtcctggagcagctggatgactacaatgctaagttgtcagatctccaggaagcacttgaccaggcccttaaccatgtcagggatgccgaagacatgaacagggccacagcagccaggcagcgggaccatgagaaacaacaggaaagagtgagggaacaaatggaagtggtgaacatgtctctgagcacatctgcggactctctgacaacacctcgtctaactctttcagaacttgatgatataataaagaatgcgtcagggatttatgcagaaatagatggagccaaaagtgaactacaagtaaaactatctaacctaagtaacctcagccatgatttagtccaagaagctattgaccatgcacaggaccttcaacaagaagctaatgaattgagcaggaagttgcacagttcagatatgaacgggctggtacagaaggctttggatgcatcaaatgtctatgaaaatattgttaattatgttagtgaagccaatgaaacagcagaatttgctttgaacaccactgaccgaatttatgatgcggtgagtgggattgatactcaaatcatttaccataaagatgaaagtgagaacctcctcaatcaagccagagaactgcaagcaaaggcagagtctagcagtgatgaagcagtggctgacactagcaggcgtgtgggtggagccctagcaaggaaaagtgcccttaaaaccagactcagtgatgccgttaagcaactacaagcagcagagagaggggatgcccagcagcgcctggggcagtctagactgatcaccgaggaagccaacaggacgacgatggaggtgcagcaggccactgcccccatggccaacaatctaaccaactggtcacagaatcttcaacattttgactcttctgcttacaacactgcagtgaactctgctagggatgcagtaagaaatctgaccgaggttgtccctcagctcctggatcagcttcgtacggttgagcagaagcgacctgcaagcaacgtttctgccagcatccagaggatccgagagctcattgctcagaccagaagtgttgccagcaagatccaagtctccatgatgtttgatggccagtcagctgtggaagtgcactcgagaaccagtatggatgacttaaaggccttcacgtctctgagcctgtacatgaaaccccctgtgaagcggccggaactgaccgagactgcagatcagtttatcctgtacctcggaagcaaaaacgccaaaaaagagtatatgggtcttgcaatcaaaaatgataatctggtatacgtctataatttgggaactaaagatgtggagattcccctggactccaagcccgtcagttcctggcctgcttacttcagcattgtcaagattgaaagggtgggaaaacatggaaaggtgtttttaacagtcccgagtctaagtagcacagcagaggaaaagttcattaaaaagggggaattttcgggagatgactctctgctggacctggaccctgaggacacagtgttttatgttggtggagtgccttccaacttcaagctccctaccagcttaaacctgcctggctttgttggctgcctggaactggccactttgaataatgatgtgatcagcttgtacaactttaagcacatctataatatggacccctccacatcagtgccatgtgcccgagataagctggccttcactcagagtcgggctgccagttacttcttcgatggctccggttatgccgtggtgagagacatcacaaggagagggaaatttggtcaggtgactcgctttgacatagaagttcgaacaccagctgacaacggccttattctcctgatggtcaatggaagtatgtttttcagactggaaatgcgcaatggttacctacatgtgttctatgattttggattcagcagtggccgtgtgcatcttgaagatacgttaaagaaagctcaaattaatgatgcaaaataccatgagatctcaatcatttaccacaatgataagaaaatgatcttggtagttgacagaaggcatgtcaagagcatggataatgaaaagatgaaaataccttttacagatatatacattggaggagctcctccagaaatcttacaatccagggccctcagagcacaccttcccctagatatcaacttcagaggatgcatgaagggcttccagttccaaaagaaggacttcaatttactggagcagacagaaaccctgggagttggttatggatgcccagaagactcacttatatctcgcagagcatatttcaatggacagagcttcattgcttcaattcagaaaatatctttctttgatggctttgaaggaggttttaatttccgaacattacaaccaaatgggttactattctattatgcttcagggtcagacgtgttctccatctcactggataatggtactgtcatcatggatgtaaagggaatcaaagttcagtcagtagataagcagtacaatgatgggctgtcccacttcgtcattagctctgtctcacccacaagatatgaactgatagtagataaaagcagagttgggagtaagaatcctaccaaagggaaaatagaacagacacaagcaagtgaaaagaagttttacttcggtggctcaccaatcagtgctcagtatgctaatttcactggctgcataagtaatgcctactttaccagggagggaaaagtaaagatgcaccttcatgggatcctgttgctctgaaactcccagagcggaatactccaagaaactctcattgccacctttccaacagccctagagcaatagagcacgcctatcaatatggaggaacagccaacagccgccaagagtttgaacacttaaaaggagattttggtgccaaatctcagttttccattcgtctgagaactcgttcctcccatggcatgatcttctatgtctcagatcaagaagagaatgacttcatgactctatttttggcccatggccgcttggtttacatgtttaatgttggtcacaaaaaactgaagattagaagccaggagaaatacaatgatggcctgtggcatgatgtgatatttattcgagaaaggagcagtggccgactggtaattgatggtctccgagtcctagaagaaagtcttcctcctactgaagctacctggaaaatcaagggtcccatttatttgggaggtgtggctcctggaaaggctgtgaaaaatgttcagattaactccatctacagttttagtggctgtctcagcaatctccagctcaatggggcctccatcacctctgcttctcagacattcagtgtgaccccttgctttgaaggccccatggaaacaggaacttacttttcaacagaaggaggatacgtggttctagatgaatctttcaatattggattgaagtttgaaattgcatttgaagtccgtcccagaagcagttccggaaccctggtccacggccacagtgtcaatggggagtacctaaatgttcacatgaaaaatggacaggtcatagtgaaagtcaataatggcatcagagatttttccacctcagttacacccaagcagagtctctgtgatggcagatggcacagaattacagttattagagattctaatgtggttcagttggatgtggactctgaagtgaaccatgtggttggacccctgaatccaaaaccaattgatcacagggagcctgtgtttgttggaggtgttccagaatctctactgacaccacgcttggcccccagcaaacccttcacaggctgcatacgccactttgtgattgatggacacccagtgagcttcagtaaagcagccctggtcagcggcgccgtaagcatcaactcctgtccagcagcctgacatgacagagcacagctgcccaaatacaaagttctttagagcactgaaagaaacacaaagccagccaggaggaacagtaactcttccttcgggtggaagctttcatcgagttgaacaggacttaaacgaatcatcagggaccggatatttcttatttctcatttggattcttaaccttgaatccaaagtgtctgcaatggacaacaattgaaggagtggcaaacttacttgtattgagagcacacgcaattcctactggtgaaattactgtttctgtttctaataaaatagaagggattccaaata

SEQ ID NO: 365982 - DNA, 3694 bp, Homo sapiens
cgcagggaaaggcggacctcagtgtctgaaaagccagcttagagtgggagggcctgggagtagaaggtaaaaagggagtggtgagaatgaatgtgagaaggaagccaggacagcgcagtccccagtcccgaacggccagggagaggaggtggcctagcgctggcggggctcaccccaatccgtctgccttttgatgccgtactctgctggttgcgcagccacctcgggatactgcacacggagaggagggaaaataagcgaggcaccgccgcaccacgcgggagacctacggagacccacagcgcccgagccctggaagagcactactggatgtcagcggagaaatggctttgagctcagcctggcgctcggttctgcctctgtggctcctctggagcgctgcctgctcccgcgccgcgtccggggacgacaacgcttttccttttgacattgaagggagctcagcggttggcaggcaagacccgcctgagacgagcgaaccccgcgtggctctgggacgcctgccgcctgcggccgagaaatgcaatgctggattctttcacaccctgtcgggagaatgtgtgccctgcgactgtaatggcaattccaacgagtgtttggacggctcaggatactgtgtgcactgccagcggaacacaacaggagagcactgtgaaaagtgtctggatggttatatcggagattccatcaggggagcaccccaattctgccagccgtgcccctgtcccctgccccacttggccaattttgcagaatcctgctataggaaaaatggagctgttcggtgcatttgtaacgaaaattatgctggacctaactgtgaaagatgtgctcccggttactatggaaaccccttactcattggaagcacctgtaagaaatgtgactgcagtggaaattcagatcccaacctgatctttgaagattgtgatgaagtcactggccagtgtaggaattgcttacgcaacaccaccggattcaagtgtgaacgttgcgctcctggctactatggggacgccaggatagccaagaactgtgcagtgtgcaactgcgggggaggcccatgtgacagtgtaaccggagaatgcttggaagaaggttttgaaccccctacaggcatggactgcccaaccataagctgtgataagtgcgtctgggacctgactgatgacctgcggttagcagcgctctccatcgaggaaggcaaatccggggtgctgagcgtatcctctggggccgccgctcataggcacgtgaatgaaatcaacgccaccatctacctcctcaaaacaaaattgtcagaaagagaaaaccaatacgccctaagaaagatacaaatcaacaatgctgagaacacgatgaaaagccttctgtctgacgtagaggaattagttgaaaaggaaaatcaagcctccagaaaaggacaacttgttcagaaggaaagcatggacaccattaaccacgcaagtcagctggtagagcaagcccatgatatgagggataaaatccaagagatcaacaacaagatgctctattatggggaagagcatgaacttagccccaaggaaatctctgagaagctggtgttggcccagaagatgcttgaagagattagaagccgtcaaccatttttcacccaacgggagctcgtggatgaggaggcagatgaggcttacgaactactgagccaggctgagagctggcagcggctgcacaatgagacccgcactctgtttcctgtcgtcctggagcagctggatgactacaatgctaagttgtcagatctccaggaagcacttgaccaggcccttaaccatgtcagggatgccgaagacatgaacagggccacagcagccaggcagcgggaccatgagaaacaacaggaaagagtgagggaacaaatggaagtggtgaacatgtctctgagcacatctgcggactctctgacaacacctcgtctaactctttcagaacttgatgatataataaagaatgcgtcagggatttatgcagaaatagatggagccaaaagtgaactacaagtaaaactatctaacctaagtaacctcagccatgatttagtccaagaagctattgaccatgcacaggaccttcaacaagaagctaatgaattgagcaggaagttgcacagttcagatatgaacgggctggtacagaaggctttggatgcatcaaatgtctatgaaaatattgttaattatgttagtgaagccaatgaaacagcagaatttgctttgaacaccactgaccgaatttatgatgtgagtattccctgaaagttctttataccttgcctttcccactggcttttctgttttctgatgtcatctcttgaacttccagtgtgaaatccaaatggcagaaagagtggaaaaggcaggggaactaagggaagaccatttcatgaatgccttgaaggtttcagtctgcagattcttcgagatgtgctgtagtccagtcagcaaatgccagttcctttgacagtttatttttttagccaaagtccctgagatgtgctattgtccttctcttcatccaggtgatatttattcgagaaaggagcagtggccgactggtaattgatggtctccgagtcctagaagaaagtcttcctcctactgaagctacctggaaaatcaagggtcccatttatttgggaggtgtggctcctggaaaggctgtgaaaaatgttcagattaactccatctacagttttagtggctgtctcagcaatctccagctcaatggggcctccatcacctctgcttctcagacattcagtgtgaccccttgctttgaaggccccatggaaacaggaacttacttttcaacagaaggaggatacgtggttctagatgaatctttcaatattggattgaagtttgaaattgcatttgaagtccgtcccagaagcagttccggaaccctggtccacggccacagtgtcaatggggagtacctaaatgttcacatgaaaaatggacaggtcatagtgaaagtcaataatggcatcagagatttttccacctcagttacacccaagcagagtctctgtgatggcagatggcacagaattacagttattagagattctaatgtggttcagttggatgtggactctgaagtgaaccatgtggttggacccctgaatccaaaaccaattgatcacagggagcctgtgtttgttggaggtgttccagaatctctactgacaccacgcttggcccccagcaaacccttcacaggctgcatacgccactttgtgattgatggacacccagtgagcttcagtaaagcagccctggtcagcggcgccgtaagcatcaactcctgtccagcagcctgacatgacagagcacagctgcccaaatacaaagttctttagagcactgaaagaaacacaaagccagccaggaggaacagtaactcttccttcgggtggaagctttcatcgagttgaacaggacttaaacgaatcatcagggaccggatatttcttatttctcatttggattcttaaccttgaatccaaagtgtctgcaatggacaacaattgaaggagtggcaaacttacttgtattgagagcacacgcaattcctactggtgaaattactgtttctgtttctaataaaatagaagggattccaaata

SEQ ID NO: 365983 - DNA, 6150 bp, Homo sapiens
  misc_feature (5996)..(5996): n is a, c, g, or t
cgcagggaaaggcggacctcagtgtctgaaaagccagcttagagtgggagggcctgggagtagaaggtaaaaagggagtggtgagaatgaatgtgagaaggaagccaggacagcgcagtccccagtcccgaacggccagggagaggaggtggcctagcgctggcggggctcaccccaatccgtctgccttttgatgccgtactctgctggttgcgcagccacctcgggatactgcacacggagaggagggaaaataagcgaggcaccgccgcaccacgcgggagacctacggagacccacagcgcccgagccctggaagagcactactggatgtcagcggagaaatggctttgagctcagcctggcgctcggttctgcctctgtggctcctctggagcgctgcctgctcccgcgccgcgtccggggacgacaacgcttttccttttgacattgaagggagctcagcggttggcaggcaagacccgcctgagacgagcgaaccccgcgtggctctgggacgcctgccgcctgcggccgagaaatgcaatgctggattctttcacaccctgtcgggagaatgtgtgccctgcgactgtaatggcaattccaacgagtgtttggacggctcaggatactgtgtgcactgccagcggaacacaacaggagagcactgtgaaaagtgtctggatggttatatcggagattccatcaggggagcaccccaattctgccagccgtgcccctgtcccctgccccacttggccaattttgcagaatcctgctataggaaaaatggagctgttcggtgcatttgtaacgaaaattatgctggacctaactgtgaaagatgtgctcccggttactatggaaaccccttactcattggaagcacctgtaagaaatgtgactgcagtggaaattcagatcccaacctgatctttgaagattgtgatgaagtcactggccagtgtaggaattgcttacgcaacaccaccggattcaagtgtgaacgttgcgctcctggctactatggggacgccaggatagccaagaactgtgcagtgtgcaactgcgggggaggcccatgtgacagtgtaaccggagaatgcttggaagaaggttttgaaccccctacaggcatggactgcccaaccataagctgtgataagtgcgtctgggacctgactgatgacctgcggttagcagcgctctccatcgaggaaggcaaatccggggtgctgagcgtatcctctggggccgccgctcataggcacgtgaatgaaatcaacgccaccatctacctcctcaaaacaaaattgtcagaaagagaaaaccaatacgccctaagaaagatacaaatcaacaatgctgagaacacgatgaaaagccttctgtctgacgtagaggaattagttgaaaaggaaaatcaagcctccagaaaaggacaacttgttcagaaggaaagcatggacaccattaaccacgcaagtcagctggtagagcaagcccatgatatgagggataaaatccaagagatcaacaacaagatgctctattatggggaagagcatgaacttagccccaaggaaatctctgagaagctggtgttggcccagaagatgcttgaagagattagaagccgtcaaccatttttcacccaacgggagctcgtggatgaggaggcagatgaggcttacgaactactgagccaggctgagagctggcagcggctgcacaatgagacccgcactctgtttcctgtcgtcctggagcagctggatgactacaatgctaagttgtcagatctccaggaagcacttgaccaggcccttaaccatgtcagggatgccgaagacatgaacagggccacagcagccaggcagcgggaccatgagaaacaacaggaaagagtgagggaacaaatggaagtggtgaacatgtctctgagcacatctgcggactctctgacaacacctcgtctaactctttcagaacttgatgatataataaagaatgcgtcagggatttatgcagaaatagatggagccaaaagtgaactacaagtaaaactatctaacctaagtaacctcagccatgatttagtccaagaagctattgaccatgcacaggaccttcaacaagaagctaatgaattgagcaggaagttgcacagttcagatatgaacgggctggtacagaaggctttggatgcatcaaatgtctatgaaaatattgttaattatgttagtgaagccaatgaaacagcagaatttgctttgaacaccactgaccgaatttatgatgcggtgagtgggattgatactcaaatcatttaccataaagatgaaagtgagaacctcctcaatcaagccagagaactgcaagcaaaggcagagtctagcagtgatgaagcagtggctgacactagcaggcgtgtgggtggagccctagcaaggaaaagtgcccttaaaaccagactcagtgatgccgttaagcaactacaagcagcagagagaggggatgcccagcagcgcctggggcagtctagactgatcaccgaggaagccaacaggacgacgatggaggtgcagcaggccactgcccccatggccaacaatctaaccaactggtcacagaatcttcaacattttgactcttctgcttacaacactgcagtgaactctgctagggatgcagtaagaaatctgaccgaggttgtccctcagctcctggatcagcttcgtacggttgagcagaagcgacctgcaagcaacgtttctgccagcatccagaggatccgagagctcattgctcagaccagaagtgttgccagcaagatccaagtctccatgatgtttgatggccagtcagctgtggaagtgcactcgagaaccagtatggatgacttaaaggccttcacgtctctgagcctgtacatgaaaccccctgtgaagcggccggaactgaccgagactgcagatcagtttatcctgtacctcggaagcaaaaacgccaaaaaagagtatatgggtcttgcaatcaaaaatgataatctggtatacgtctataatttgggaactaaagatgtggagattcccctggactccaagcccgtcagttcctggcctgcttacttcagcattgtcaagattgaaagggtgggaaaacatggaaaggtgtttttaacagtcccgagtctaagtagcacagcagaggaaaagttcattaaaaagggggaattttcgggagatgactctctgctggacctggaccctgaggacacagtgttttatgttggtggagtgccttccaacttcaagctccctaccagcttaaacctgcctggctttgttggctgcctggaactggccactttgaataatgatgtgatcagcttgtacaactttaagcacatctataatatggacccctccacatcagtgccatgtgcccgagataagctggccttcactcagagtcgggctgccagttacttcttcgatggctccggttatgccgtggtgagagacatcacaaggagagggaaatttggtcaggtgactcgctttgacatagaagttcgaacaccagctgacaacggccttattctcctgatggtcaatggaagtatgtttttcagactggaaatgcgcaatggttacctacatgtgttctatgattttggattcagcagtggccgtgtgcatcttgaagatacgttaaagaaagctcaaattaatgatgcaaaataccatgagatctcaatcatttaccacaatgataagaaaatgatcttggtagttgacagaaggcatgtcaagagcatggataatgaaaagatgaaaataccttttacagatatatacattggaggagctcctccagaaatcttacaatccagggccctcagagcacaccttcccctagatatcaacttcagaggatgcatgaagggcttccagttccaaaagaaggacttcaatttactggagcagacagaaaccctgggagttggttatggatgcccagaagactcacttatatctcgcagagcatatttcaatggacagagcttcattgcttcaattcagaaaatatctttctttgatggctttgaaggaggttttaatttccgaacattacaaccaaatgggttactattctattatgcttcagggtcagacgtgttctccatctcactggataatggtactgtcatcatggatgtaaagggaatcaaagttcagtcagtagataagcagtacaatgatgggctgtcccacttcgtcattagctctgtctcacccacaagatatgaactgatagtagataaaagcagagttgggagtaagaatcctaccaaagggaaaatagaacagacacaagcaagtgaaaagaagttttacttcggtggctcaccaatcagtgctcagtatgctaatttcactggctgcataagtaatgcctactttaccagggtggatagagatgtggaggttgaagatttccaacggtatactgaaaaggtccacacttctctttatgagtgtcccattgagtcttcaccattgtttctcctccataaaaaaggaaaaaatttatccaagcctaaagcaagtcagaataaaaagggagggaaaagtaaagatgcaccttcatgggatcctgttgctctgaaactcccagagcggaatactccaagaaactctcattgccacctttccaacagccctagagcaatagagcacgcctatcaatatggaggaacagccaacagccgccaagagtttgaacacttaaaaggagattttggtgccaaatctcagttttccattcgtctgagaactcgttcctcccatggcatgatcttctatgtctcagatcaagaagagaatgacttcatgactctatttttggcccatggccgcttggtttacatgtttaatgttggtcacaaaaaactgaagattagaagccaggagaaatacaatgatggcctgtggcatgatgtgatatttattcgagaaaggagcagtggccgactggtaattgatggtctccgagtcctagaagaaagtcttcctcctactgaagctacctggaaaatcaagggtcccatttatttgggaggtgtggctcctggaaaggctgtgaaaaatgttcagattaactccatctacagttttagtggctgtctcagcaatctccagctcaatggggcctccatcacctctgcttctcagacattcagtgtgaccccttgctttgaaggccccatggaaacaggaacttacttttcaacagaaggaggatacgtggttctagatgaatctttcaatattggattgaagtttgaaagaaacacaaagccagccaggaggaacagtaactcttccttcgggtggaagctttcatcgagttgaacaggacttaaacgaatcatcagggaccggatatttcttatttctcatttggattcttaaccttgaatccaaagtgtctgcaatggacaacaattgaaggagtggcaaacttacttgtattgagagcacacgcaattcctactggtgaaattactgtttctgtttctaataaaatagaagggattccaaataaacacttgcacacatttttgaagtgcggctagattctcagattcacctttcttccagggaagataactttcaatctatataaaaatctctgtcctaaaactacctttctttattttgaagagacttactaacttacatataatctaaattagatgatagatttgtttttagcccttttgtttggtctatcagtataagaagaatattttaggtttatagctgaagttatcaaggtttaataaagtaaatttctaacagaatactagaaaaatgcagtataatttaattttttctaaataagaaacacaggaaatcaactactttttccccttccttatctccttaaaagaaaaataaaattgtacatgagaggaaaaaaangtttataacccccattgaggtgctcataggcactttagaaactaaaaaaccctttggggggggcccggcccccaatttgcccttatagagggggtttacacatcaatggccggcgttttacaactgctggactggaaaaaccctggcgttccca

SEQ ID NO: 365984 - DNA, 5061 bp, Homo sapiens
cgcagggaaaggcggacctcagtgtctgaaaagccagcttagagtgggagggcctgggagtagaaggtaaaaagggagtggtgagaatgaatgtgagaaggaagccaggacagcgcagtccccagtcccgaacggccagggagaggaggtggcctagcgctggcggggctcaccccaatccgtctgccttttgatgccgtactctgctggttgcgcagccacctcgggatactgcacacggagaggagggaaaataagcgaggcaccgccgcaccacgcgggagacctacggagacccacagcgcccgagccctggaagagcactactggatgtcagcggagaaatggctttgagctcagcctggcgctcggttctgcctctgtggctcctctggagcgctgcctgctcccgcgccgcgtccggggacgacaacgcttttccttttgacattgaagggagctcagcggttggcaggcaagacccgcctgagacgagcgaaccccgcgtggctctgggacgcctgccgcctgcggccgagaaatgcaatgctggattctttcacaccctgtcgggagaatgtgtgccctgcgactgtaatggcaattccaacgagtgtttggacggctcaggatactgtgtgcactgccagcggaacacaacaggagagcactgtgaaaagtgtctggatggttatatcggagattccatcaggggagcaccccaattctgccagccgtgcccctgtcccctgccccacttggccaattttgcagaatcctgctataggaaaaatggagctgttcggtgcatttgtaacgaaaattatgctggacctaactgtgaaagatgtgctcccggttactatggaaaccccttactcattggaagcacctgtaagaaatgtgactgcagtggaaattcagatcccaacctgatctttgaagattgtgatgaagtcactggccagtgtaggaattgcttacgcaacaccaccggattcaagtgtgaacgttgcgctcctggctactatggggacgccaggatagccaagaactgtgcagtgtgcaactgcgggggaggcccatgtgacagtgtaaccggagaatgcttggaagaaggttttgaaccccctacaggcatggactgcccaaccataagctgtgataagtgcgtctgggacctgactgatgacctgcggttagcagcgctctccatcgaggaaggcaaatccggggtgctgagcgtatcctctggggccgccgctcataggcacgtgaatgaaatcaacgccaccatctacctcctcaaaacaaaattgtcagaaagagaaaaccaatacgccctaagaaagatacaaatcaacaatgctgagaacacgatgaaaagccttctgtctgacgtagaggaattagttgaaaaggaaaatcaagcctccagaaaaggacaacttgttcagaaggaaagcatggacaccattaaccacgcaagtcagctggtagagcaagcccatgatatgagggataaaatccaagagatcaacaacaagatgctctattatggggaagagcatgaacttagccccaaggaaatctctgagaagctggtgttggcccagaagatgcttgaagagattagaagccgtcaaccatttttcacccaacgggagctcgtggatgaggaggcagatgaggcttacgaactactgagccaggctgagagctggcagcggctgcacaatgagacccgcactctgtttcctgtcgtcctggagcagctggatgactacaatgctaagttgtcagatctccaggaagcacttgaccaggcccttaaccatgtcagggatgccgaagacatgaacagggccacagcagccaggcagcgggaccatgagaaacaacaggaaagagtgagggaacaaatggaagtggtgaacatgtctctgagcacatctgcggactctctgacaacacctcgtctaactctttcagaacttgatgatataataaagaatgcgtcagggatttatgcagaaatagatggagccaaaagtgaactacaagtaaaactatctaacctaagtaacctcagccatgatttagtccaagaagctattgaccatgcacaggaccttcaacaagaagctaatgaattgagcaggaagttgcacagttcagatatgaacgggctggtacagaaggctttggatgcatcaaatgtctatgaaaatattgttaattatgttagtgaagccaatgaaacagcagaatttgctttgaacaccactgaccgaatttatgatgcggtgagtgggattgatactcaaatcatttaccataaagatgaaagtgagaacctcctcaatcaagccagagaactgcaagcaaaggcagagtctagcagtgatgaagcagtggctgacactagcaggcgtgtgggtggagccctagcaaggaaaagtgcccttaaaaccagactcagtgatgccgttaagcaactacaagcagcagagagaggggatgcccagcagcgcctggggcagtctagactgatcaccgaggaagccaacaggacgacgatggaggtgcagcaggccactgcccccatggccaacaatctaaccaactggtcacagaatcttcaacattttgactcttctgcttacaacactgcagtgaactctgctagggatgcagtaagaaatctgaccgaggttgtccctcagctcctggatcagcttcgtacggttgagcagaagcgacctgcaagcaacgtttctgccagcatccagaggatccgagagctcattgctcagaccagaagtgttgccagcaagatccaagtctccatgatgtttgatggccagtcagctgtggaagtgcactcgagaaccagtatggatgacttaaaggccttcacgtctctgagcctgtacatgaaaccccctgtgaagcggccggaactgaccgagactgcagatcagtttatcctgtacctcggaagcaaaaacgccaaaaaagagtatatgggtcttgcaatcaaaaatgataatctggtatacgtctataatttgggaactaaagatgtggagattcccctggactccaagcccgtcagttcctggcctgcttacttcagcattgtcaagattgaaagggtgggaaaacatggaaaggtgtttttaacagtcccgagtctaagtagcacagcagaggaaaagttcattaaaaagggggaattttcgggagatgactctctgctggacctggaccctgaggacacagtgttttatgttggtggagtgccttccaacttcaagctccctaccagcttaaacctgcctggctttgttggctgcctggaactggccactttgaataatgatgtgatcagcttgtacaactttaagcacatctataatatggacccctccacatcagtgccatgtgcccgagataagctggccttcactcagagtcgggctgccagttacttcttcgatggctccggttatgccgtggtgagagacatcacaaggagagggaaatttggtcaggtgactcgctttgacatagaagttcgaacaccagctgacaacggccttattctcctgatggtcaatggaagtatgtttttcagactggaaatgcgcaatggttacctacatgtgttctatgattttggattcagcagtggccgtgtgcatcttgaagatacgttaaagaaagctcaaattaatgatgcaaaataccatgagatctcaatcatttaccacaatgataagaaaatgatcttggtagttgacagaaggcatgtcaagagcatggataatgaaaagatgaaaataccttttacagatatatacattggaggagctcctccagaaatcttacaatccagggccctcagagcacaccttcccctagatatcaacttcagaggatgcatgaagggcttccagttccaaaagaaggacttcaatttactggagcagacagaaaccctgggagttggttatggatgcccagaagactcacttatatctcgcagagcatatttcaatggacagagcttcattgcttcaattcagaaaatatctttctttgatggctttgaaggaggttttaatttccgaacattacaaccaaatgggttactattctattatgcttcagggtcagacgtgttctccatctcactggataatggtactgtcatcatggatgtaaagggaatcaaagttcagtcagtagataagcagtacaatgatgggctgtcccacttcgtcattagctctgtctcacccacaagatatgaactgatagtagataaaagcagagttgggagtaagaatcctaccaaagggaaaatagaacagacacaagcaagtgaaaagaagttttacttcggtggctcaccaatcagtgctcagtatgctaatttcactggctgcataagtaatgcctactttaccagggtggatagagatgtggaggttgaagatttccaacggtatactgaaaaggtccacacttctctttatgagtgtcccattgagtcttcaccattgtttctcctccataaaaaaggaaaaaatttatccaagcctaaagcaagtcagaataaaaagggagggaaaagtaaagatgcaccttcatgggatcctgttgctctgaaactcccagagcggaatactccaagaaactctcattgccacctttccaacagccctagagcaatagagcacgcctatcaatatggaggaacagccaacagccgccaagagtttgaacacttaaaaggagattttggtgccaagtaaagtaacacactatactcctagactcctaatgacatggctgggctccatctttgtttgtcacatgtcatcgttttttcccatctttcctttctgtgccaccttaatcctattatgttatcaccaaaataaacactaaatagtacatgatttatgctatcaaaagaattatattctctgtgactttccaattgtaaggttcataaaacagtattcttccaggatactgtatttgatcaaa

SEQ ID NO: 365985 - DNA, 976 bp, Homo sapiens
cagaaaaattgaatcttagtttattcgaattcattactttctcattatattttatgaacaggcaaaaatgtagaggcttaagggtgaagggtaatgaattaaacagaaatattaaccaagtccaaaaatagtgtggaagctaaaatttctttcctccttcttagcaaagtacacattataagtgaggcccaggtgaaattaactttaaaaaacataggtagatcatgaaaattcactgctgaggctttacatgtaagtggtaaatttcagccttgaaagacagctacaatacacagaaatgtgatcatggaaaacatggcaaaacgttaaaattaccacatgtccataggacttcacaagcaaataatgttactgagaaatgagtcaattataactatgttctatttttgaaatgtaaatcatattgatgatatgagcaaatatgtatacttttaccaggaagtaatatttgggcttggaatacctcaattgcaatctttgtttttatttcttgctcttttcagaatctctactgacaccacgcttggcccccagcaaacccttcacaggctgcatacgccactttgtgattgatggacacccagtgagcttcagtaaagcagccctggtcagcggcgccgtaagcatcaactcctgtccagcagcctgacatgacagagcacagctgcccaaatacaaagttctttagagcactgaaagaaacacaaagccagccaggaggaacagtaactcttccttcgggtggaagctttcatcgagttgaacaggacttaaacgaatcatcagggaccggatatttcttatttctcatttggattcttaaccttgaatccaaagtgtctgcaatggacaacaattgaaggagtggcaaacttacttgtattgagagcacacgcaattcctactggtgaaattactgtttctgtttctaataaaatagaagggattccaaata

SEQ ID NO: 365986 - DNA, 4345 bp, Homo sapiens
cgcagggaaaggcggacctcagtgtctgaaaagccagcttagagtgggagggcctgggagtagaaggtaaaaagggagtggtgagaatgaatgtgagaaggaagccaggacagcgcagtccccagtcccgaacggccagggagaggaggtggcctagcgctggcggggctcaccccaatccgtctgccttttgatgccgtactctgctggttgcgcagccacctcgggatactgcacacggagaggagggaaaataagcgaggcaccgccgcaccacgcgggagacctacggagacccacagcgcccgagccctggaagagcactactggatgtcagcggagaaatggctttgagctcagcctggcgctcggttctgcctctgtggctcctctggagcgctgcctgctcccgcgccgcgtccggggacgacaacgcttttccttttgacattgaagggagctcagcggttggcaggcaagacccgcctgagacgagcgaaccccgcgtggctctgggacgcctgccgcctgcggccgagaaatgcaatgctggattctttcacaccctgtcgggagaatgtgtgccctgcgactgtaatggcaattccaacgagtgtttggacggctcaggatactgtgtgcactgccagcggaacacaacaggagagcactgtgaaaagtgtctggatggttatatcggagattccatcaggggagcaccccaattctgccagccgtgcccctgtcccctgccccacttggccaattttgcagaatcctgctataggaaaaatggagctgttcggtgcatttgtaacgaaaattatgctggacctaactgtgaaagatgtgctcccggttactatggaaaccccttactcattggaagcacctgtaagaaatgtgactgcagtggaaattcagatcccaacctgatctttgaagattgtgatgaagtcactggccagtgtaggaattgcttacgcaacaccaccggattcaagtgtgaacgttgcgctcctggctactatggggacgccaggatagccaagaactgtgcagtgtgcaactgcgggggaggcccatgtgacagtgtaaccggagaatgcttggaagaaggttttgaaccccctacaggcatggactgcccaaccataagctgtgataagtgcgtctgggacctgactgatgacctgcggttagcagcgctctccatcgaggaaggcaaatccggggtgctgagcgtatcctctggggccgccgctcataggcacgtgaatgaaatcaacgccaccatctacctcctcaaaacaaaattgtcagaaagagaaaaccaatacgccctaagaaagatacaaatcaacaatgctgagaacacgatgaaaagccttctgtctgacgtagaggaattagttgaaaaggaaaatcaagcctccagaaaaggacaacttgttcagaaggaaagcatggacaccattaaccacgcaagtcagctggtagagcaagcccatgatatgagggataaaatccaagagatcaacaacaagatgctctattatggggaagagcatgaacttagccccaaggaaatctctgagaagctggtgttggcccagaagatgcttgaagagattagaagccgtcaaccatttttcacccaacgggagctcgtggatgaggaggcagatgaggcttacgaactactgagccaggctgagagctggcagcggctgcacaatgagacccgcactctgtttcctgtcgtcctggagcagctggatgactacaatgctaagttgtcagatctccaggaagcacttgaccaggcccttaaccatgtcagggatgccgaagacatgaacagggccacagcagccaggcagcgggaccatgagaaacaacaggaaagagtgagggaacaaatggaagtggtgaacatgtctctgagcacatctgcggactctctgacaacacctcgtctaactctttcagaacttgatgatataataaagaatgcgtcagggatttatgcagaaatagatggagccaaaagtgaactacaagtaaaactatctaacctaagtaacctcagccatgatttagtccaagaagctattgaccatgcacaggaccttcaacaagaagctaatgaattgagcaggaagttgcacagttcagatatgaacgggctggtacagaaggctttggatgcatcaaatgtctatgaaaatattgttaattatgttagtgaagccaatgaaacagcagaatttgctttgaacaccactgaccgaatttatgatgcggtgagtgggattgatactcaaatcatttaccataaagatgaaagtgagaacctcctcaatcaagccagagaactgcaagcaaaggcagagtctagcagtgatgaagcagtggctgacactagcaggcgtgtgggtggagccctagcaaggaaaagtgcccttaaaaccagactcagtgatgccgttaagcaactacaagcagcagagagaggggatgcccagcagcgcctggggcagtctagactgatcaccgaggaagccaacaggacgacgatggaggtgcagcaggccactgcccccatggccaacaatctaaccaactggtcacagaatcttcaacattttgactcttctgcttacaacactgcagtgaactctgctagggatgcagtaagaaatctgaccgaggttgtccctcagctcctggatcagcttcgtacggttgagcagaagcgacctgcaagcaacgtttctgccagcatccagaggatccgagagctcattgctcagaccagaagtgttgccagcaagatccaagtctccatgatgtttgatggccagtcagctgtggaagtgcactcgagaaccagtatggatgacttaaaggccttcacgtctctgagcctgtacatgaaaccccctgtgaagcggccggaactgaccgagactgcagatcagtttatcctgtacctcggaagcaaaaacgccaaaaaagagtatatgggtcttgcaatcaaaaatgataatctggtatacgtctataatttgggaactaaagatgtggagattcccctggactccaagcccgtcagttcctggcctgcttacttcagcattgtcaagattgaaagggtgggaaaacatggaaaggtgtttttaacagtcccgagtctaagtagcacagcagaggaaaagttcattaaaaagggggaattttcgggagatgactctctgctggacctggaccctgaggacacagtgttttatgttggtggagtgccttccaacttcaagctccctaccagcttaaacctgcctggctttgttggctgcctggaactggccactttgaataatgatgtgatcagcttgtacaactttaagcacatctataatatggacccctccacatcagtgccatgtgcccgagataagctggccttcactcagagtcgggctgccagttacttcttcgatggctccggttatgccgtggtgagagacatcacaaggagagggaaatttggtcaggtgactcgctttgacatagaagttcgaacaccagctgacaacggccttattctcctgatggtcaatggaagtatgtttttcagactggaaatgcgcaatggttacctacatgtgttctatgattttggattcagcagtggccgtgtgcatcttgaagatacgttaaagaaagctcaaattaatgatgcaaaataccatgagatctcaatcatttaccacaatgataagaaaatgatcttggtagttgacagaaggcatgtcaagagcatggataatgaaaagatgaaaataccttttacagatatatacattggaggagctcctccagaaatcttacaatccagggccctcagagcacaccttcccctagatatcaacttcagaggatgcatgaagggcttccagttccaaaagaaggacttcaatttactggagcagacagaaaccctgggagttggttatggatgcccagaagactcacttatatctcgcagagcatatttcaatggacagagcttcattgcttcaattcagaaaatatctttctttgatggctttgaaggaggttttaatttccgaacattacaaccaaatgggttactattctattatgcttcagggtcagacgtgttctccatctcactggataatggtactgtcatcatggatgtaaagggaatcaaagttcagtcagtagataagcagtacaatgatgggctgtcccacttcgtcattagctctgtctcacccacaagattgaaccggatagcttgccggtatcctctatg

SEQ ID NO: 365987 - DNA, 2544 bp, Homo sapiens
  misc_feature (2475)..(2475): n is a, c, g, or t
  misc_feature (2491)..(2492): n is a, c, g, or t
  misc_feature (2507)..(2507): n is a, c, g, or t
cgcagggaaaggcggacctcagtgtctgaaaagccagcttagagtgggagggcctgggagtagaaggtaaaaagggagtggtgagaatgaatgtgagaaggaagccaggacagcgcagtccccagtcccgaacggccagggagaggaggtggcctagcgctggcggggctcaccccaatccgtctgccttttgatgccgtactctgctggttgcgcagccacctcgggatactgcacacggagaggagggaaaataagcgaggcaccgccgcaccacgcgggagacctacggagacccacagcgcccgagccctggaagagcactactggatgtcagcggagaaatggctttgagctcagcctggcgctcggttctgcctctgtggctcctctggagcgctgcctgctcccgcgccgcgtccggggacgacaacgcttttccttttgacattgaagggagctcagcggttggcaggcaagacccgcctgagacgagcgaaccccgcgtggctctgggacgcctgccgcctgcggccgagaaatgcaatgctggattctttcacaccctgtcgggagaatgtgtgccctgcgactgtaatggcaattccaacgagtgtttggacggctcaggatactgtgtgcactgccagcggaacacaacaggagagcactgtgaaaagtgtctggatggttatatcggagattccatcaggggagcaccccaattctgccagccgtgcccctgtcccctgccccacttggccaattttgcagaatcctgctataggaaaaatggagctgttcggtgcatttgtaacgaaaattatgctggacctaactgtgaaagatgtgctcccggttactatggaaaccccttactcattggaagcacctgtaagaaatgtgactgcagtggaaattcagatcccaacctgatctttgaagattgtgatgaagtcactggccagtgtaggaattgcttacgcaacaccaccggattcaagtgtgaacgttgcgctcctggctactatggggacgccaggatagccaagaactgtgcagtgtgcaactgcgggggaggcccatgtgacagtgtaaccggagaatgcttggaagaaggttttgaaccccctacaggcatggactgcccaaccataagctgtgataagtgcgtctgggacctgactgatgacctgcggttagcagcgctctccatcgaggaaggcaaatccggggtgctgagcgtatcctctggggccgccgctcataggcacgtgaatgaaatcaacgccaccatctacctcctcaaaacaaaattgtcagaaagagaaaaccaatacgccctaagaaagatacaaatcaacaatgctgagaacacgatgaaaagccttctgtctgacgtagaggaattagttgaaaaggaaaatcaagcctccagaaaaggacaacttgttcagaaggaaagcatggacaccattaaccacgcaagtcagctggtagagcaagcccatgatatgagggataaaatccaagagatcaacaacaagatgctctattatggggaagagcatgaacttagccccaaggaaatctctgagaagctggtgttggcccagaagatgcttgaagagattagaagccgtcaaccatttttcacccaacgggagctcgtggatgaggaggcagatgaggcttacgaactactgagccaggctgagagctggcagcggctgcacaatgagacccgcactctgtttcctgtcgtcctggagcagctggatgactacaatgctaagttgtcagatctccaggaagcacttgaccaggcccttaaccatgtcagggatgccgaagacatgaacagggccacagcagccaggcagcgggaccatgagaaacaacaggaaagagtgagggaacaaatggaagtggtgaacatgtctctgagcacatctgcggactctctgacaacacctcgtctaactctttcagaacttgatgatataataaagaatgcgtcagggatttatgcagaaatagatggagccaaaagtgaactacaagtaaaactatctaacctaagtaacctcagccatgatttagtccaagaagctattgaccatgcacaggaccttcaacaagaagctaatgaattgagcaggaagttgcacagttcagatatgaacgggctggtacagaaggctttggatgcatcaaatgtctatgaaaatattgttaattatgttagtgaagccaatgaaacagcagaatttgctttgaacaccactgaccgaatttatgatgcggtgagtgggattgatactcaaatcatttaccataaagatgaaagtgagaacctcctcaatcaagccagagaactgcaagcaaaggcagagtctagcagtgatgaagcagtggctgacactagcaggcgtgtgggtggagccctagcaaggaaaagtgcccttaaaaccnagctctctagtgatcnntataatcaagcttancgatacggtcgacctcgaggggggccattaccccatg

SEQ ID NO: 365988 - DNA, 1614 bp, Homo sapiens
cgcagggaaaggcggacctcagtgtctgaaaagccagcttagagtgggagggcctgggagtagaaggtaaaaagggagtggtgagaatgaatgtgagaaggaagccaggacagcgcagtccccagtcccgaacggccagggagaggaggtggcctagcgctggcggggctcaccccaatccgtctgccttttgatgccgtactctgctggttgcgcagccacctcgggatactgcacacggagaggagggaaaataagcgaggcaccgccgcaccacgcgggagacctacggagacccacagcgcccgagccctggaagagcactactggatgtcagcggagaaatggctttgagctcagcctggcgctcggttctgcctctgtggctcctctggagcgctgcctgctcccgcgccgcgtccggggacgacaacgcttttccttttgacattgaagggagctcagcggttggcaggcaagacccgcctgagacgagcgaaccccgcgtggctctgggacgcctgccgcctgcggccgagaaatgcaatgctggattctttcacaccctgtcgggagaatgtgtgccctgcgactgtaatggcaattccaacgagtgtttggacggctcaggatactgtgtgcactgccagcggaacacaacaggagagcactgtgaaaagtgtctggatggttatatcggagattccatcaggggagcaccccaattctgccagccgtgcccctgtcccctgccccacttggccaattttgcagaatcctgctataggaaaaatggagctgttcggtgcatttgtaacgaaaattatgctggacctaactgtgaaagatgtgctcccggttactatggaaaccccttactcattggaagcacctgtaagaaatgtgactgcagtggaaattcagatcccaacctgatctttgaagattgtgatgaagtcactggccagtgtaggaattgcttacgcaacaccaccggattcaagtgtgaacgttgcgctcctggctactatggggacgccaggatagccaagaactgtgcagtgtgcaactgcgggggaggcccatgtgacagtgtaaccggagaatgcttggaagaaggttttgaaccccctacaggcatggactgcccaaccataagtaaaaataacagtacatgattgactaaccccactttctctaatgtgctgcaggtgtgggattaagaaaagctatgcaatatcactctctagaaactctgagtcccacccctggacttaaccctttctgcacctcagcaaatggagcctgcaccaagtacttggtggtccacttgattccctagggcaaatgggtggtttacatttgcatagctctattttatccagtctttacattcagaatcttacctaatggctaaaggcaaagtcagaaacacaactcccagtgacagagctcttttcagctccttttcctatatcgtctcttcaggtccctgaaaatacgacgtacaaacaatttacaacacctggggaaactgagataccaagagatttaagtggcttctcccaagttacctcaaatctgaagtgggagcagaagtaaatattcaggctt

SEQ ID NO: 365989 - DNA, 1032 bp, Homo sapiens
  misc_feature (953)..(953): n is a, c, g, or t
  misc_feature (959)..(959): n is a, c, g, or t
  misc_feature (999)..(999): n is a, c, g, or t
  misc_feature (1002)..(1002): n is a, c, g, or t
  misc_feature (1004)..(1004): n is a, c, g, or t
  misc_feature (1009)..(1009): n is a, c, g, or t
  misc_feature (1012)..(1012): n is a, c, g, or t
  misc_feature (1018)..(1018): n is a, c, g, or t
cgcagggaaaggcggacctcagtgtctgaaaagccagcttagagtgggagggcctgggagtagaaggtaaaaagggagtggtgagaatgaatgtgagaaggaagccaggacagcgcagtccccagtcccgaacggccagggagaggaggtggcctagcgctggcggggctcaccccaatccgtctgccttttgatgccgtactctgctggttgcgcagccacctcgggatactgcacacggagaggagggaaaataagcgaggcaccgccgcaccacgcgggagacctacggagacccacagcgcccgagccctggaagagcactactggatgtcagcggagaaatggctttgagctcagcctggcgctcggttctgcctctgtggctcctctggagcgctgcctgctcccgcgccgcgtccggggacgacaacgcttttccttttgacattgaagggagctcagcggttggcaggcaagacccgcctgagacgagcgaaccccgcgtggctctgggacgcctgccgcctgcggccgagaaatgcaatgctggattctttcacaccctgtcgggagaatgtgtgccctgcgactgtaatggcaattccaacgagtgtttggacggctcaggatactgtgtgcactgccagcggaacacaacaggagagcactgtgaaaagtgtctggatggttatatcggagattccatcaggggagcaccccaattctgccagccgtgcccctgtcccctgccccacttggccaattttgcagaatcctgctataggaaaaatggagctgttcggtgcatttgtaacgaaaattatgctggacctaactgtgaaaggccttctccacagagcacgagaggctttccactgaatgactcgaaatgcaatgctggattctttcacacccgtcgggagaatgtgtgccctgcgactgtaatggcnattccnacgagtgtttggacggctcaggatactgtgtgcactgccngcngnacacnacnggagancactgtgaaaagtg

SEQ ID NO: 365990 - DNA, 473 bp, Homo sapiens
tgatatttattcgagaaaggagcagtggccgactggtaattgatggtctccgagtcctagaagaaagtcttcctcctactgaagctacctggaaaatcaagggtcccatttatttgggaggtgtggctcctggaaaggctgtgaaaaatgttcaggtaagccaggcatgaccaggtagagccattgaccattagagccagaagatcatctaattgaggccctcgtctcacagattaggaaactagaaactagcaccagtaaaactgtagttttctggaaatgggatatcaaagtaagtactgtcttatgggctgcctgtctgccctgtggcattacaaagtcagaagtaatctttcaattctaaggtagatgtcaaatgaaaaagtttcagaggcataaattatcatgaaaatttatgtctcaaggagatcttatttgttcaggaagtacccatacttttaatgtaaagacat

SEQ ID NO: 365991 - DNA, 851 bp, Homo sapiens
caaacaagagcccaagctacactcctgagtcaatccctttcagccaggagaatagcaggcactgaatggctcaagcttagttacttaaacaattcattgtgactagactgatcaatgtttctcaatagaggtgctattaacgttgtggctaggacatttcccagctgtacgctacaggtacatctcattgcagtacctttggcatatctggtcccacccatcatatatcatttgtgtacaccagttccctggctggatataccagttcaatcctatagctggaagcctggctgaactgaatggcctacagatgaagtgaaccaaatgatctataacataatggggaggggtagttccttaaaaacgaaatctggtcctatgaagaagatgagagagtgcaaatgaattctgggagggaaatcaataaatatccactacatctttcttctttgtaggaaagaagattaaaaggaagaaaaaccatgatgctaaatatttaaatgtgtgatattcctcttcagatgtgctcccggttactatggaaaccccttactcattggaagcacctgtaagaaatgtgactgcagtggaaattcagatcccaacctgatctttgaagattgtgatgaagtcactggccagtgtaggaattgcttacgcaacaccaccggattcaagtgtgaacgttgcgctcctggctactatggggacgccaggatagccaagaactgtgcaggtgcagtatcataaatactaagccagctgcctggccagcatgaccctctgccaatactgaatttagatgaagaatttctcttggggaagtattgtgagtgcccccttgtcacttt

SEQ ID NO: 365992 - DNA, 280 bp, Homo sapiens
cacaagcagtattacaagtgttctgcaattctgtacctcgaattttaaatgctactttccagaattgttgatctatgttcagagtattcagaatactgcaaatactgcagatgactgcatcgtacaaatgagaagtttccttgttgaaatggaatccttttcgaggcatcttggctccactagtacttctttctgctgctcttccacaggcagtgatgaagcagtggctgacactagcaggcgtgtgggtggagccctagcaaggaaaagtgcccttaaa

SEQ ID NO: 365993 - DNA, 758 bp, Homo sapiens
acttttcagcaattattattgagtgtcttttattggctaagctgtggaagatacaaagtgaagagtaaatcagtgaggaagataggataccacagtgggagcagataaatattgaaagaaattggtgggtatgtaatgtcaagagtaagcaatgtaacatgcattacaagtaatcacaagaagtttaactgggagagaacatatggcctgttctgtctatatgtggcctggttaactgggaaaagcttcatagagaacatggaaaaacataagctatattcagaaattaagctttaaatcattctatctagaggtcagaaaatacatagatcacttcctctaatacctgaagtggtaaatggaagatgatcatgaaaaaaatacacctatgcatataaagcaaaggggcctggagacagctcacaataaaggcatatgctgtataacaaaacagaatcaaatgagggataaagtttctgccattccaaaaactgcattgccagaagcctactaaacagaagagataaactcctgaccttcagagatggggccattttaaaaataaactttctgaagatttcccacagcattgcaatagcaaagttggaagaagaggaaacacagccttttctgcaatcttggaatgtacctgagatgtgctattgtccttctcttcatccaggtgatatttattcgagaaaggagcagtggccgactggtaattgatggtctccgagtcctagaagaaagtcttcctc

SEQ ID NO: 365994 - DNA, 2719 bp, Homo sapiens
  misc_feature (55)..(55): n is a, c, g, or t
  misc_feature (209)..(209): n is a, c, g, or t
  misc_feature (638)..(638): n is a, c, g, or t
  misc_feature (690)..(690): n is a, c, g, or t
  misc_feature (828)..(828): n is a, c, g, or t
  misc_feature (831)..(831): n is a, c, g, or t
  misc_feature (913)..(913): n is a, c, g, or t
  misc_feature (1049)..(1049): n is a, c, g, or t
  misc_feature (1137)..(1137): n is a, c, g, or t
ttttaaagagctgagccaaaaaagcaacagacaaggcaagtgggcattcgaccanatgccagactaaagaacttctcttcctcttaaatataacccatagatcagtccttcaaatcccaaaagtaagtacatgtcgcccatgctgtgcatacagggtggtgtcctagccttgaatcatttctgtgctcttagatcacattctgtccttnaccacgcacacaaaaacacacacatacacacagacgcccacacaaaccctttcttcagaggccacatttgagttgggcattatttttgacaaatactgtgtgagatctctgaaacagaatctcccaagttgagagaatggaatcagcttctcggagaagagctccattcacgctgagccaaatctgcttgagcagttatttgtacacaagtgccatcaatgttgatgggaatttggaatgaagcactgaaaacagcatgttaggccagtgagaataatccttgaaatctctgtggtaattcaatttcagcagtggttggaccacccaggagccactggaagcatggtgcatttcaaggtctgcctattttttcaacaattttctctttgaaactttaagctcttcagtcagcacaatgtcaaaatgatnagcagacatgggcaattttctagtccagcaacttgagatacagtaaaaattngaagaataaattacatatgaaaggcagttggttgggactgaactgtgactgatgatataggaatagcaccagattttatagcattctgtcattctaaaactggccatcaagtgaagtaacttaggaatggaaaaccanacnttgtatgtcctaactgatacgtgggagctaagctatgaggacgcagaggcataagaatgatacaatggactttggggacttncagggaagagtggagtggggagggataaaagactacaaatatggtgcagtgtatactgctcgggtgatgggtgcaccaaagtctaacaaatcaccactaaagaacttactcatgtaaccaaataccacctataccncaataacttacggaaaaattaaaaaattttttaaaagtaaaactggccatcacattacctttcatgcattatttttgggatgatttcntgtgttatagaactttcacatgccaggaagatttacgtttaggaaatacattatgcccacccacccctatctgtgcttatacaacattcttttctcatacatttaatctagcctttatacggattatttgtaggaaaatcaagcctccagaaaaggacaacttgttcagaaggaaagcatggacaccattaaccacgcaagtcagctggtagagcaagcccatgatatgagggataaaatccaagagatcaacaacaagatgctctattatggggaagagcatgaacttagccccaaggaaatctctgagaagctggtgttggcccagaagatgcttgaagagattagaagccgtcaaccatttttcacccaacgggagctcgtggatgaggaggcagatgaggcttacgaactactgagccaggctgagagctggcagcggctgcacaatgagacccgcactctgtttcctgtcgtcctggagcagctggatgactacaatgctaagttgtcagatctccaggaagcacttgaccaggcccttaaccatgtcagggatgccgaagacatgaacagggccacagcagccaggcagcgggaccatgaggtacagcggacactcaccatcaatgcatttcagcatcagcagtgtgatggtacaccaagaaggggctgttgatataaatttttttaaaatattggtatagttaaatacttatattttaaaatattggtgtgttttttggtgctataaattactaacttgtgtgttcctaaaatcaagttgaaactaggataattgtctagttcttgctttgataagaacgcagtagttctgatgcttgtgtccatgtgtatgggtctgttattcttgcaagtgggtaagcaatgcatagctttttttatactgagagcactagaaggccaaagcatctcaaaaccatgggttctgggtatgcataatttttggaaaggcacgataagcaaatctcacagtctggctggtcagcagctgcagggataaggagactaattgccaaggccatgcaaatgcaaagaggaaggtgaggaggattcccagatgtgatcatagcttgcaaagatggtcatctcatggggccagaattcgtgcatgcccacacctacaaagctgagaactggtagtggtcatgtgtccgcttcaagcaatgcatgtattcacagccgccagcatcaagaggggccatcttttgataggatgacacatgcatgttcaaacatattttaaaagattagggagaaaagaatactgtgaacaaatagaaaccaattatgagcaaattcacgaattcggttatgtactattgtggctggcaaaagccacttaaactaggctctctagcctgattttcagccatcattacccctcactaagaatccttgtaaaatttcttccgtaaaagttaattacactcatcaccactgtttgctaatgggagcaaacccctagccaatattttttagaataatatggttgggataactttttttttttttttgctaaatgaatgcatgattatcttatacaataaaagtataacac

SEQ ID NO: 365995 - DNA, 1968 bp, Homo sapiens
tttatcctgggcctcatgaagagtttggcaactcgctgtcttttcattaaccacatgttccatttcaatttcatgagaaaacctgcttatccaacctagagtgggtcaaggtaaaatgctagctctgtggtatgtaaagaagcctttttcttttgcagatatgaactgatagtagataaaagcagagttgggagtaagaatcctaccaaagggaaaatagaacagacacaagcaagtgaaaagaagttttacttcggtggctcaccaatcagtgctcagtatgctaatttcactggctgcataagtaatgcctactttaccagggtggatagagatgtggaggttgaagatttccaacggtatactgaaaaggtccacacttctctttatgagtgtcccattgagtcttcaccattgtttctcctccataaaaaaggaaaaaatttatccaagcctaaagcaagtcagaataaaaagggagggaaaagtaaagatgcaccttcatgggatcctgttgctctgaaactcccagagcggaatactccaagaaactctcattgccacctttccaacagccctagagcaatagagcacgcctatcaatatggaggaacagccaacagccgccaagagtttgaacacttaaaaggagattttggtgccaaatctcagttttccattcgtctgagaactcgttcctcccatggcatgatcttctatgtctcagatcaagaagagaatgacttcatgactctatttttggcccatggccgcttggtttacatgtttaatgttggtcacaaaaaactgaagattagaagccaggagaaatacaatgatggcctgtggcatgatgtgatatttattcgagaaaggagcagtggccgactggtaattgatggtctccgagtcctagaagaaagtcttcctcctactgaagctacctggaaaatcaagggtcccatttatttgggaggtgtggctcctggaaaggctgtgaaaaatgttcagattaactccatctacagttttagtggctgtctcagcaatctccagctcaatggggcctccatcacctctgcttctcagacattcagtgtgaccccttgctttgaaggccccatggaaacaggaacttacttttcaacagaaggaggatacgtggttctagatgaatctttcaatattggattgaagtttgaaattgcatttgaagtccgtcccagaagcagttccggaaccctggtccacggccacagtgtcaatggggagtacctaaatgttcacatgaaaaatggacaggtcatagtgaaagtcaataatggcatcagagatttttccacctcagttacacccaagcagagtctctgtgatggcagatggcacagaattacagttattagagattctaatgtggttcagttggatgtggactctgaagtgaaccatgtggttggacccctgaatccaaaaccaattgatcacagggagcctgtgtttgttggaggtgttccagaatctctactgacaccacgcttggcccccagcaaacccttcacaggctgcatacgccactttgtgattgatggacacccagtgagcttcagtaaagcagccctggtcagcggcgccgtaagcatcaactcctgtccagcagcctgacatgacagagcacagctgcccaaatacaaagttctttagagcactgaaagaaacacaaagccagccaggaggaacagtaactcttccttcgggtggaagctttcatcgagttgaacaggacttaaacgaatcatcagggaccggatatttcttatttctcatttggattcttaaccttgaatccaaagtgtctgcaatggacaacaattgaaggagtggcaaacttacttgtattgagagcacacgcaattcctactggtgaaattactgtttctgtttctaataaaatagaagggattccaaata

SEQ ID NO: 365996 - DNA, 1879 bp, Homo sapiens
ataagcactaggtagtcatcataatggttcattcctctgcctgacttccatcacataaacaaactcctgcaagaagaagtgcagagggctgtttttaaatcgtcattcccttttcctgctgctactgccagacaggcagctgtcagagaaccaaaatgctgttcagcaaagacagaagaatgcagaggaggtgtgaccctcaagaaaaccttgccacactaggtgactttgaataacaggaaggaagcatctgtgatcctagaagtatttaaaaagcaagcattaaacatggccccattccccaagaaggtaagaaggagaaataacaatgtttgtttattaacaggaagttgcacagttcagatatgaacgggctggtacagaaggctttggatgcatcaaatgtctatgaaaatattgttaattatgttagtgaagccaatgaaacagcagaatttgctttgaacaccactgaccgaatttatgatgtgagtattccctgaaagttctttataccttgcctttcccactggcttttctgttttctgatgtcatctcttgaacttccagtgtgaaatccaaatggcagaaagagtggaaaaggcaggggaactaagggaagaccatttcatgaatgccttgaaggtttcagtctgcagattcttcgagatgtgctgtagtccagtcagcaaatgccagttcctttgacagtttatttttttagccaaagtccctgagatgtgctattgtccttctcttcatccaggtgatatttattcgagaaaggagcagtggccgactggtaattgatggtctccgagtcctagaagaaagtcttcctcctactgaagctacctggaaaatcaagggtcccatttatttgggaggtgtggctcctggaaaggctgtgaaaaatgttcagattaactccatctacagttttagtggctgtctcagcaatctccagctcaatggggcctccatcacctctgcttctcagacattcagtgtgaccccttgctttgaaggccccatggaaacaggaacttacttttcaacagaaggaggatacgtggttctagatgaatctttcaatattggattgaagtttgaaattgcatttgaagtccgtcccagaagcagttccggaaccctggtccacggccacagtgtcaatggggagtacctaaatgttcacatgaaaaatggacaggtcatagtgaaagtcaataatggcatcagagatttttccacctcagttacacccaagcagagtctctgtgatggcagatggcacagaattacagttattagagattctaatgtggttcagttggatgtggactctgaagtgaaccatgtggttggacccctgaatccaaaaccaattgatcacagggagcctgtgtttgttggaggtgttccagaatctctactgacaccacgcttggcccccagcaaacccttcacaggctgcatacgccactttgtgattgatggacacccagtgagcttcagtaaagcagccctggtcagcggcgccgtaagcatcaactcctgtccagcagcctgacatgacagagcacagctgcccaaatacaaagttctttagagcactgaaagaaacacaaagccagccaggaggaacagtaactcttccttcgggtggaagctttcatcgagttgaacaggacttaaacgaatcatcagggaccggatatttcttatttctcatttggattcttaaccttgaatccaaagtgtctgcaatggacaacaattgaaggagtggcaaacttacttgtattgagagcacacgcaattcctactggtgaaattactgtttctgtttctaataaaatagaagggattccaaata

SEQ ID NO: 365997 - DNA, 6053 bp, Homo sapiens
  misc_feature (5899)..(5899): n is a, c, g, or t
cgcagggaaaggcggacctcagtgtctgaaaagccagcttagagtgggagggcctgggagtagaaggtaaaaagggagtggtgagaatgaatgtgagaaggaagccaggacagcgcagtccccagtcccgaacggccagggagaggaggtggcctagcgctggcggggctcaccccaatccgtctgccttttgatgccgtactctgctggttgcgcagccacctcgggatactgcacacggagaggagggaaaataagcgaggcaccgccgcaccacgcgggagacctacggagacccacagcgcccgagccctggaagagcactactggatgtcagcggagaaatggctttgagctcagcctggcgctcggttctgcctctgtggctcctctggagcgctgcctgctcccgcgccgcgtccggggacgacaacgcttttccttttgacattgaagggagctcagcggttggcaggcaagacccgcctgagacgagcgaaccccgcgtggctctgggacgcctgccgcctgcggccgagaaatgcaatgctggattctttcacaccctgtcgggagaatgtgtgccctgcgactgtaatggcaattccaacgagtgtttggacggctcaggatactgtgtgcactgccagcggaacacaacaggagagcactgtgaaaagtgtctggatggttatatcggagattccatcaggggagcaccccaattctgccagccgtgcccctgtcccctgccccacttggccaattttgcagaatcctgctataggaaaaatggagctgttcggtgcatttgtaacgaaaattatgctggacctaactgtgaaagatgtgctcccggttactatggaaaccccttactcattggaagcacctgtaagaaatgtgactgcagtggaaattcagatcccaacctgatctttgaagattgtgatgaagtcactggccagtgtaggaattgcttacgcaacaccaccggattcaagtgtgaacgttgcgctcctggctactatggggacgccaggatagccaagaactgtgcagtgtgcaactgcgggggaggcccatgtgacagtgtaaccggagaatgcttggaagaaggttttgaaccccctacaggcatggactgcccaaccataagctgtgataagtgcgtctgggacctgactgatgacctgcggttagcagcgctctccatcgaggaaggcaaatccggggtgctgagcgtatcctctggggccgccgctcataggcacgtgaatgaaatcaacgccaccatctacctcctcaaaacaaaattgtcagaaagagaaaaccaatacgccctaagaaagatacaaatcaacaatgctgagaacacgatgaaaagccttctgtctgacgtagaggaattagttgaaaaggaaaatcaagcctccagaaaaggacaacttgttcagaaggaaagcatggacaccattaaccacgcaagtcagctggtagagcaagcccatgatatgagggataaaatccaagagatcaacaacaagatgctctattatggggaagagcatgaacttagccccaaggaaatctctgagaagctggtgttggcccagaagatgcttgaagagattagaagccgtcaaccatttttcacccaacgggagctcgtggatgaggaggcagatgaggcttacgaactactgagccaggctgagagctggcagcggctgcacaatgagacccgcactctgtttcctgtcgtcctggagcagctggatgactacaatgctaagttgtcagatctccaggaagcacttgaccaggcccttaaccatgtcagggatgccgaagacatgaacagggccacagcagccaggcagcgggaccatgagaaacaacaggaaagagtgagggaacaaatggaagtggtgaacatgtctctgagcacatctgcggactctctgacaacacctcgtctaactctttcagaacttgatgatataataaagaatgcgtcagggatttatgcagaaatagatggagccaaaagtgaactacaagtaaaactatctaacctaagtaacctcagccatgatttagtccaagaagctattgaccatgcacaggaccttcaacaagaagctaatgaattgagcaggaagttgcacagttcagatatgaacgggctggtacagaaggctttggatgcatcaaatgtctatgaaaatattgttaattatgttagtgaagccaatgaaacagcagaatttgctttgaacaccactgaccgaatttatgatgcggtgagtgggattgatactcaaatcatttaccataaagatgaaagtgagaacctcctcaatcaagccagagaactgcaagcaaaggcagagtctagcagtgatgaagcagtggctgacactagcaggcgtgtgggtggagccctagcaaggaaaagtgcccttaaaaccagactcagtgatgccgttaagcaactacaagcagcagagagaggggatgcccagcagcgcctggggcagtctagactgatcaccgaggaagccaacaggacgacgatggaggtgcagcaggccactgcccccatggccaacaatctaaccaactggtcacagaatcttcaacattttgactcttctgcttacaacactgcagtgaactctgctagggatgcagtaagaaatctgaccgaggttgtccctcagctcctggatcagcttcgtacggttgagcagaagcgacctgcaagcaacgtttctgccagcatccagaggatccgagagctcattgctcagaccagaagtgttgccagcaagatccaagtctccatgatgtttgatggccagtcagctgtggaagtgcactcgagaaccagtatggatgacttaaaggccttcacgtctctgagcctgtacatgaaaccccctgtgaagcggccggaactgaccgagactgcagatcagtttatcctgtacctcggaagcaaaaacgccaaaaaagagtatatgggtcttgcaatcaaaaatgataatctggtatacgtctataatttgggaactaaagatgtggagattcccctggactccaagcccgtcagttcctggcctgcttacttcagcattgtcaagattgaaagggtgggaaaacatggaaaggtgtttttaacagtcccgagtctaagtagcacagcagaggaaaagttcattaaaaagggggaattttcgggagatgactctctgctggacctggaccctgaggacacagtgttttatgttggtggagtgccttccaacttcaagctccctaccagcttaaacctgcctggctttgttggctgcctggaactggccactttgaataatgatgtgatcagcttgtacaactttaagcacatctataatatggacccctccacatcagtgccatgtgcccgagataagctggccttcactcagagtcgggctgccagttacttcttcgatggctccggttatgccgtggtgagagacatcacaaggagagggaaatttggtcaggtgactcgctttgacatagaagttcgaacaccagctgacaacggccttattctcctgatggtcaatggaagtatgtttttcagactggaaatgcgcaatggttacctacatgtgttctatgattttggattcagcagtggccgtgtgcatcttgaagatacgttaaagaaagctcaaattaatgatgcaaaataccatgagatctcaatcatttaccacaatgataagaaaatgatcttggtagttgacagaaggcatgtcaagagcatggataatgaaaagatgaaaataccttttacagatatatacattggaggagctcctccagaaatcttacaatccagggccctcagagcacaccttcccctagatatcaacttcagaggatgcatgaagggcttccagttccaaaagaaggacttcaatttactggagcagacagaaaccctgggagttggttatggatgcccagaagactcacttatatctcgcagagcatatttcaatggacagagcttcattgcttcaattcagaaaatatctttctttgatggctttgaaggaggttttaatttccgaacattacaaccaaatgggttactattctattatgcttcagggtcagacgtgttctccatctcactggataatggtactgtcatcatggatgtaaagggaatcaaagttcagtcagtagataagcagtacaatgatgggctgtcccacttcgtcattagctctgtctcacccacaagatatgaactgatagtagataaaagcagagttgggagtaagaatcctaccaaagggaaaatagaacagacacaagcaagtgaaaagaagttttacttcggtggctcaccaatcagtgctcagtatgctaatttcactggctgcataagtaatgcctactttaccagggtggatagagatgtggaggttgaagatttccaacggtatactgaaaaggtccacacttctctttatgagtgtcccattgagtcttcaccattgtttctcctccataaaaaaggaaaaaatttatccaagcctaaagcaagtcagaataaaaagggagggaaaagtaaagatgcaccttcatgggatcctgttgctctgaaactcccagagcggaatactccaagaaactctcattgccacctttccaacagccctagagcaatagagcacgcctatcaatatggaggaacagccaacagccgccaagagtttgaacacttaaaaggagattttggtgccaaatctcagttttccattcgtctgagaactcgttcctcccatggcatgatcttctatgtctcagatcaagaagagaatgacttcatgactctatttttggcccatggccgcttggtttacatgtttaatgttggtcacaaaaaactgaagattagaagccaggagaaatacaatgatggcctgtggcatgatgtgatatttattcgagaaaggagcagtggccgactggtaattgatggtctccgagtcctagaagaaagtcttcctcctactgaagctacctggaaaatcaagggtcccatttatttgggaggtgtggctcctggaaaggctgtgaaaaatgttcagattaactccatctacagttttagtggctgtctcagcaatctccagctcaatggggcctccatcacctctgcttctcagacattcagtgtgaccccttgctttgaaggccccatggaaacaggaacttatcttccttcgggtggaagctttcatcgagttgaacaggacttaaacgaatcatcagggaccggatatttcttatttctcatttggattcttaaccttgaatccaaagtgtctgcaatggacaacaattgaaggagtggcaaacttacttgtattgagagcacacgcaattcctactggtgaaattactgtttctgtttctaataaaatagaagggattccaaataaacacttgcacacatttttgaagtgcggctagattctcagattcacctttcttccagggaagataactttcaatctatataaaaatctctgtcctaaaactacctttctttattttgaagagacttactaacttacatataatctaaattagatgatagatttgtttttagcccttttgtttggtctatcagtataagaagaatattttaggtttatagctgaagttatcaaggtttaataaagtaaatttctaacagaatactagaaaaatgcagtataatttaattttttctaaataagaaacacaggaaatcaactactttttccccttccttatctccttaaaagaaaaataaaattgtacatgagaggaaaaaaangtttataacccccattgaggtgctcataggcactttagaaactaaaaaaccctttggggggggcccggcccccaatttgcccttatagagggggtttacacatcaatggccggcgttttacaactgctggactggaaaaaccctggcgttccca

SEQ ID NO: 365998 - DNA, 3779 bp, Homo sapiens
  misc_feature (3701)..(3701): n is a, c, g, or t
cgcagggaaaggcggacctcagtgtctgaaaagccagcttagagtgggagggcctgggagtagaaggtaaaaagggagtggtgagaatgaatgtgagaaggaagccaggacagcgcagtccccagtcccgaacggccagggagaggaggtggcctagcgctggcggggctcaccccaatccgtctgccttttgatgccgtactctgctggttgcgcagccacctcgggatactgcacacggagaggagggaaaataagcgaggcaccgccgcaccacgcgggagacctacggagacccacagcgcccgagccctggaagagcactactggatgtcagcggagaaatggctttgagctcagcctggcgctcggttctgcctctgtggctcctctggagcgctgcctgctcccgcgccgcgtccggggacgacaacgcttttccttttgacattgaagggagctcagcggttggcaggcaagacccgcctgagacgagcgaaccccgcgtggctctgggacgcctgccgcctgcggccgagaaatgcaatgctggattctttcacaccctgtcgggagaatgtgtgccctgcgactgtaatggcaattccaacgagtgtttggacggctcaggatactgtgtgcactgccagcggaacacaacaggagagcactgtgaaaagtgtctggatggttatatcggagattccatcaggggagcaccccaattctgccagccgtgcccctgtcccctgccccacttggccaattttgcagaatcctgctataggaaaaatggagctgttcggtgcatttgtaacgaaaattatgctggacctaactgtgaaagatgtgctcccggttactatggaaaccccttactcattggaagcacctgtaagaaatgtgactgcagtggaaattcagatcccaacctgatctttgaagattgtgatgaagtcactggccagtgtaggaattgcttacgcaacaccaccggattcaagtgtgaacgttgcgctcctggctactatggggacgccaggatagccaagaactgtgcagtgtgcaactgcgggggaggcccatgtgacagtgtaaccggagaatgcttggaagaaggttttgaaccccctacaggcatggactgcccaaccataagctgtgataagtgcgtctgggacctgactgatgacctgcggttagcagcgctctccatcgaggaaggcaaatccggggtgctgagcgtatcctctggggccgccgctcataggcacgtgaatgaaatcaacgccaccatctacctcctcaaaacaaaattgtcagaaagagaaaaccaatacgccctaagaaagatacaaatcaacaatgctgagaacacgatgaaaagccttctgtctgacgtagaggaattagttgaaaaggaaaatcaagcctccagaaaaggacaacttgttcagaaggaaagcatggacaccattaaccacgcaagtcagctggtagagcaagcccatgatatgagggataaaatccaagagatcaacaacaagatgctctattatggggaagagcatgaacttagccccaaggaaatctctgagaagctggtgttggcccagaagatgcttgaagagattagaagccgtcaaccatttttcacccaacgggagctcgtggatgaggaggcagatgaggcttacgaactactgagccaggctgagagctggcagcggctgcacaatgagacccgcactctgtttcctgtcgtcctggagcagctggatgactacaatgctaagttgtcagatctccaggaagcacttgaccaggcccttaaccatgtcagggatgccgaagacatgaacagggccacagcagccaggcagcgggaccatgagaaacaacaggaaagagtgagggaacaaatggaagtggtgaacatgtctctgagcacatctgcggactctctgacaacacctcgtctaactctttcagaacttgatgatataataaagaatgcgtcagggatttatgcagaaatagatggagccaaaagtgaactacaagtaaaactatctaacctaagtaacctcagccatgatttagtccaagaagctattgaccatgcacaggaccttcaacaagaagctaatgaattgagcaggaagttgcacagttcagatatgaacgggctggtacagaaggctttggatgcatcaaatgtctatgaaaatattgttaattatgttagtgaagccaatgaaacagcagaatttgctttgaacaccactgaccgaatttatgatgcggtgagtgggattgatactcaaatcatttaccataaagatgaaagtgagaacctcctcaatcaagccagagaactgcaagcaaaggcagagtctagcagtgatgaagcagtggctgacactagcaggcgtgtgggtggagccctagcaaggaaaagtgcccttaaaaccagactcagtgatgccgttaagcaactacaagcagcagagagaggggatgcccagcagcgcctggggcagtctagactgatcaccgaggaagccaacaggacgacgatggaggtgcagcaggccactgcccccatggccaacaatctaaccaactggtcacagaatcttcaacattttgactcttctgcttacaacactgcagtgaactctgctagggatgcagtaagaaatctgaccgaggttgtccctcagctcctggatcagcttcgtacggttgagcagaagcgacctgcaagcaacgtttctgccagcatccagaggatccgagagctcattgctcagaccagaagtgttgccagcaagatccaagtctccatgatgtttgatggccagtcagctgtggaagtgcactcgagaaccagtatggatgacttaaaggccttcacgtctctgagcctgtacatgaaaccccctgtgaagcggccggaactgaccgagactgcagatcagtttatcctgtacctcggaagcaaaaacgccaaaaaagagtatatgggtcttgcaatcaaaaatgataatctggtatacgtctataatttgggaactaaagatgtggagattcccctggactccaagcccgtcagttcctggcctgcttacttcagcattgtcaagattgaaagggtgggaaaacatggaaaggtgtttttaacagtcccgagtctaagtagcacagcagaggaaaagttcattaaaaagggggaattttcgggagatgactctctgctggacctggaccctgaggacacagtgttttatgttggtggagtgccttccaacttcaagctccctaccagcttaaacctgcctggctttgttggctgcctggaactggccactttgaataatgatgtgatcagcttgtacaactttaagcacatctataatatggacccctccacatcagtgccatgtgcccgagataagctggccttcactcagagtcgggctgccagttacttcttcgatggctccggttatgccgtggtgagagacatcacaaggagagggaaatttggtcaggtgactcgctttgacatagaagttcgaacaccagctgacaacggccttattctcctgatggtcaatggaagtatgtttttcagactggaaatgcgcaatggttacctacatgtgttctatgattttggattcaggtggtgtgcncaccacctgagtccaaaggtggttccagaaaaagaagtaaaccgaatgcttacaccctcagagttcctgaaggaagtg

SEQ ID NO: 365999 - DNA, 1608 bp, Homo sapiens
cgcagggaaaggcggacctcagtgtctgaaaagccagcttagagtgggagggcctgggagtagaaggtaaaaagggagtggtgagaatgaatgtgagaaggaagccaggacagcgcagtccccagtcccgaacggccagggagaggaggtggcctagcgctggcggggctcaccccaatccgtctgccttttgatgccgtactctgctggttgcgcagccacctcgggatactgcacacggagaggagggaaaataagcgaggcaccgccgcaccacgcgggagacctacggagacccacagcgcccgagccctggaagagcactactggatgtcagcggagaaatggctttgagctcagcctggcgctcggttctgcctctgtggctcctctggagcgctgcctgctcccgcgccgcgtccggggacgacaacgcttttccttttgacattgaagggagctcagcggttggcaggcaagacccgcctgagacgagcgaaccccgcgtggctctgggacgcctgccgcctgcggccgagaaatgcaatgctggattctttcacaccctgtcgggagaatgtgtgccctgcgactgtaatggcaattccaacgagtgtttggacggctcaggatactgtgtgcactgccagcggaacacaacaggagagcactgtgaaaagtgtctggatggttatatcggagattccatcaggggagcaccccaattctgccagccgtgcccctgtcccctgccccacttggccaattttgcagaatcctgctataggaaaaatggagctgttcggtgcatttgtaacgaaaattatgctggacctaactgtgaaagatgtgctcccggttactatggaaaccccttactcattggaagcacctgtaagaaatgtgactgcagtggaaattcagatcccaacctgatctttgaagattgtgatgaagtcactggccagtgtaggaattgcttacgcaacaccaccggattcaagtgtgaacgttgcgctcctggctactatggggacgccaggatagccaagaactgtgcagtgtgcaactgcgggggaggcccatgtgacagtgtaaccggagaatgcttggaagaaggttttgaaccccctacaggctgtgataagtgcgtctgggacctgactgatgacctgcggttagcagcgctctccatcgaggaaggcaaatccggggtgctgagcgtatcctctggggccgccgctcataggcacgtgaatgaaatcaacgccaccatctacctcctcaaaacaaaattgtcagaaagagaaaaccaatacgccctaagaaagatacaaatcaacaatgctgagaacacgatgaaaagccttctgtctgacgtagaggaattagttgaaaagcactggaacaagccaagaagaagactggaattgcaggaaggagtataatgactcagaagacagtgtccattcagagagcccacagtttatgaagggactgatgaccacattgccgctgcacagtgggctctgtgactacaggagccttgctctgtagggaggggattacccttctccaataaaaagcctctgggcatgtgtttgttat

SEQ ID NO: 366000 - DNA, 1629 bp, Homo sapiens
cgcagggaaaggcggacctcagtgtctgaaaagccagcttagagtgggagggcctgggagtagaaggtaaaaagggagtggtgagaatgaatgtgagaaggaagccaggacagcgcagtccccagtcccgaacggccagggagaggaggtggcctagcgctggcggggctcaccccaatccgtctgccttttgatgccgtactctgctggttgcgcagccacctcgggatactgcacacggagaggagggaaaataagcgaggcaccgccgcaccacgcgggagacctacggagacccacagcgcccgagccctggaagagcactactggatgtcagcggagaaatggctttgagctcagcctggcgctcggttctgcctctgtggctcctctggagcgctgcctgctcccgcgccgcgtccggggacgacaacgcttttccttttgacattgaagggagctcagcggttggcaggcaagacccgcctgagacgagcgaaccccgcgtggctctgggacgcctgccgcctgcggccgagaaatgcaatgctggattctttcacaccctgtcgggagaatgtgtgccctgcgactgtaatggcaattccaacgagtgtttggacggctcaggatactgtgtgcactgccagcggaacacaacaggagagcactgtgaaaagtgtctggatggttatatcggagattccatcaggggagcaccccaattctgccagccgtgcccctgtcccctgccccacttggccaattttgcagaatcctgctataggaaaaatggagctgttcggtgcatttgtaacgaaaattatgctggacctaactgtgaaagatgtgctcccggttactatggaaaccccttactcattggaagcacctgtaagaaatgtgactgcagtggaaattcagatcccaacctgatctttgaagattgtgatgaagtcactggccagtgtaggaattgcttacgcaacaccaccggattcaagtgtgaacgttgcgctcctggctactatggggacgccaggatagccaagaactgtgcagtgtgcaactgcgggggaggcccatgtgacagtgtaaccggagaatgcttggaagaaggttttgaaccccctacaggcatggactgcccaaccataagctgtgataagtgcgtctgggacctgactgatgacctgcggttagcagcgctctccatcgaggaaggcaaatccggggtgctgagcgtatcctctggggccgccgctcataggcacgtgaatgaaatcaacgccaccatctacctcctcaaaacaaaattgtcagaaagagaaaaccaatacgccctaagaaagatacaaatcaacaatgctgagaacacgatgaaaagccttctgtctgacgtagaggaattagttgaaaagcactggaacaagccaagaagaagactggaattgcaggaaggagtataatgactcagaagacagtgtccattcagagagcccacagtttatgaagggactgatgaccacattgccgctgcacagtgggctctgtgactacaggagccttgctctgtagggaggggattacccttctccaataaaaagcctctgggcatgtgtttgttat

SEQ ID NO: 366001 - DNA, 717 bp, Homo sapiens
cgcagggaaaggcggacctcagtgtctgaaaagccagcttagagtgggagggcctgggagtagaaggtaaaaagggagtggtgagaatgaatgtgagaaggaagccaggacagcgcagtccccagtcccgaacggccagggagaggaggtggcctagcgctggcggggctcaccccaatccgtctgccttttgatgccgtactctgctggttgcgcagccacctcgggatactgcacacggagaggagggaaaataagcgaggcaccgccgcaccacgcgggagacctacggagacccacagcgcccgagccctggaagagcactactggatgtcagcggagaaatggctttgagctcagcctggcgctcggttctgcctctgtggctcctctggagcgctgcctgctcccgcgccgcgtccggggacgacaacgcttttccttttgacattgaagggagctcagcggttggcaggcaagacccgcctgagacgagcgaaccccgcgtggctctgggacgcctgccgcctgcggccgaggtacagtgtccctgccattgccaccctgctggggcacctgcgcccccgcgggctgtgccacactcgtccttctctctctctccgcctctttcctctccccagtgccttgagagtttcacctgggctaggtcagttcggaaacttgaaataaagagttttcctttgtaaaatgaaaatg

SEQ ID NO: 366002 - DNA, 569 bp, Homo sapiens
ccctccaagctaccctgtcattatgccaagttagaaaattaatttagtttgtataactatatgatgtatatttcacatgtgtgttcactctgctttaaaaatattaattaccttttgtgtgaagttcagagacctgtcttttcccatgtggcagttttatatgttttgtggtcacaaatgtcaggaatctcaatgtaattctggataaatttttctgctctatgatttgtaaagaaatgaaaatcttatattttttaattgaaaattagtagttttagaaaaaaacgcacttatttgattttagtaaacgttgggcattttgaaaagttattcagagaaatgttactggtaggcaggacttttgtatctgatggaggaaaccgatgtagggtttggataaaataagactagcaggctgggcacagtggctcactcctgtagtctcagcattttgggaggacaaggtgggaggatcacttgataccaagagttcaaggttacagtgggctgtagtcatgccactgtactccagtctgtgccacagaaccagaccctgtctcaaaaaaaaa

SEQ ID NO: 366003 - DNA, 2397 bp, Homo sapiens
gctgcagcggcagcagctgtcgcgccagtcgcaacagaagcaggtccgaggcacagcccgatcccgccatggagcagccgaggaaggcggtggtagtgacgggatttggcccttttggggaacacaccgtgaacgccagttggattgcagttcaggagctagaaaagctaggccttggcgacagcgtggacctgcatgtgtacgagattccggttgagtaccaaacagtccagagactcatccccgccctgtgggagaagcacagtccacagctggtggtgcatgtgggggtgtcaggcatggcgaccacagtcacactggagaaatgtggacacaacaagggctacaaggggctggacaactgccgcttttgccccggctcccagtgctgcgtggaggacgggcctgaaagcattgactccatcatcgacatggatgctgtgtgcaagcgagtcaccacgttgggcctggatgtgtcggtgaccatctcgcaggatgccggcagccttggaagtcagaagtccaaggtcaaggtggtagcaggactggttccttctggaggtgctgaggatatctctgcgactttacctactacacctctttgtaccagagtcacggtcgatcagccttcgtccacgtgcccccactggggaagccgtacaacgcggaccagctgggcagggcactgagagccatcattgaggagatgttggacctcctggagcagtcagagggcaaaatcaactattgccacaaacactgagggacgctcaggtctcctaagacctcatcctgctggggaccccacgaggggacatccaccctctggggtgtggccaggaaaagacaagctcttcagcttggggatccgatctggatgacctgagtgagctgccaccgctggaggacatgggacaacccccggcggaggaggctgagcagcctggggccctggcccgagagttccttgctgccatggagcccgagcccgccccagccccggccccagaagagtggctggacattctggggaacgggctgttgaggaagaagacgctggtcccagggccgccaggttcgagccgcccggtcaagggccaggtggtcaccgtacatctgcagacgtcgctggagaatggcacacgggtgcaggaggagccggagctggtgttcactctgggtgactgtgacgtcatccaggccctggatctcagtgtcccactcatggacgtgggggagacggccatggtcactgctgactccaagtactgctacggcccccaaggcagcaggagcccatacatccccccgcacgcggccctgtgcctggaggtgaccctgaagacggctgtggacgggcctgacctggagatgctcacggggcaggagcgcgtggccctggccaaccggaagcgggagtgcggcaacgcccactaccagcgggcggacttcgtcctggccgccaactcctacgacctcgccatcaaggctatcacctccagcgccaaagtggacatgacgttcgaggaggaggcacagctcctgcagttgaaggtgaagtgtctgaacaacctggcggcctcgcagctgaagctcgaccactaccgcgcagccctgcgctcctgcagccttgtgctggagcaccagccagacaacatcaaggctctcttccgcaagggcaaggtgctggcccagcagggggagtacagtgaggccatccccatcctgagggcagccctgaagctggaaccttccaacaagacgatccacgcagagctctcaaagctggtgaagaagcatgcggcgcagcggagcacggagaccgccttgtaccggaaaatgctgggcaaccccagccggctgcctgctaagtgccctggcaagggtgcctggtccatcccatggaagtggctgtttggggcgactgctgttgccttggggggtgtggcactctctgtggtcatcgctgccaggaactgaccacctaggtggctgccaccccctctgcacaccatggaccctgccctgcgctccccaactcccccaggctccctgtccactgccctccctggtctggccccctcctccgggttaggggagcaaggattgggggtcgtgcagcccagccagcaggagggactgaggccctctaggaggaaagcccagagggagggggccctcattccttcagacccagttttcccccaccctccttaccccgctgggctaggtctccgccagggctggcctcagtttctcctcaacaggcctgggggcagcccttcccctgcctagtccccgcctgagtgccagccccccaccccgcctgccgccccctgtccaggttccctccccgccacagtgaaataaagcatcccaccctgcagtttcaaaaaa

SEQ ID NO: 366004 - DNA, 1807 bp, Homo sapiens
  misc_feature (43)..(43): n is a, c, g, or t
aaagcgagaagcgcacttcggctaggtacgaggctgggtgttnctggttcccgaggcgcggcggccgcggctgggggcggggaggggggcgcaggaccccaagtgggggtcccggagccagagggccaattcctgtccccccagcagcatggcatcgtgtgctgaaccctctgagccctctgccccactgcccgccggggtcccaccgctcgaggacttcgaggtactggatggggttgaggatgcagagggtgaggaggaagaggaggaggaagaggaggaagaggatgacctgagtgagctgccaccgctggaggacatgggacaacccccggcggaggaggctgagcagcctggggccctggcccgagagttccttgctgccatggagcccgagcccgccccagccccggccccagaagagtggctggacattctggggaacgggctgttgaggaagaagacgctggtcccagggccgccaggttcgagccgcccggtcaagggccaggtggtcaccgtacatctgcagacgtcgctggagaatggcacacgggtgcaggaggagccggagctggtgttcactctgggtgactgtgacgtcatccaggccctggatctcagtgtcccactcatggacgtgggggagacggccatggtcactgctgactccaagtactgctacggcccccaaggcagcaggagcccatacatccccccgcacgcggccctgtgcctggaggtgaccctgaagacggctgtggacgggcctgacctggagatgctcacggggcaggagcgcgtggccctggccaaccggaagcgggagtgcggcaacgcccactaccagcgggcggacttcgtcctggccgccaactcctacgacctcgccatcaaggctatcacctccagcgccaaagtggacatgacgttcgaggaggaggcacagctcctgcagttgaaggtgaagtgtctgaacaacctggcggcctcgcagctgaagctcgaccactaccgcgcagccctgcgctcctgcagccttgtgctggagcaccagccagacaacatcaaggctctcttccgcaagggcaaggtgctggcccagcagggggagtacagtgaggccatccccatcctgagggcagccctgaagctggaaccttccaacaagacgatccacgcagagctctcaaagctggtgaagaagcatgcggcgcagcggagcacggagaccgccttgtaccggaaaatgctgggcaaccccagccggctgcctgctaagtgccctggcaagggtgcctggtccatcccatggaagtggctgtttggggcgactgctgttgccttggggggtgtggcactctctgtggtcatcgctgccaggaactgaccacctaggtggctgccaccccctctgcacaccatggaccctgccctgcgctccccaactcccccaggctccctgtccactgccctccctggtctggccccctcctccgggttaggggagcaaggattgggggtcgtgcagcccagccagcaggagggactgaggccctctaggaggaaagcccagagggagggggccctcattccttcagacccagttttcccccaccctccttaccccgctgggctaggtctccgccagggctggcctcagtttctcctcaacaggcctgggggcagcccttcccctgcctagtccccgcctgagtgccagccccccaccccgcctgccgccccctgtccaggttccctccccgccacagtgaaataaagcatcccaccctgcagtttcaaaaaa

SEQ ID NO: 366005 - DNA, 1745 bp, Homo sapiens
gctggtactggtcccaggtggtagatgcgcaggaccccaagtgggggtcccggagccagagggccaattcctgtccccccagcagcatggcatcgtgtgctgaaccctctgagccctctgccccactgcccgccggggtcccaccgctcgaggacttcgaggtactggatggggttgaggatgcagagggtgaggaggaagaggaggaggaagaggaggaagaggatgacctgagtgagctgccaccgctggaggacatgggacaacccccggcggaggaggctgagcagcctggggccctggcccgagagttccttgctgccatggagcccgagcccgccccagccccggccccagaagagtggctggacattctggggaacgggctgttgaggaagaagacgctggtcccagggccgccaggttcgagccgcccggtcaagggccaggtggtcaccgtacatctgcagacgtcgctggagaatggcacacgggtgcaggaggagccggagctggtgttcactctgggtgactgtgacgtcatccaggccctggatctcagtgtcccactcatggacgtgggggagacggccatggtcactgctgactccaagtactgctacggcccccaaggcagcaggagcccatacatccccccgcacgcggccctgtgcctggaggtgaccctgaagacggctgtggacgggcctgacctggagatgctcacggggcaggagcgcgtggccctggccaaccggaagcgggagtgcggcaacgcccactaccagcgggcggacttcgtcctggccgccaactcctacgacctcgccatcaaggctatcacctccagcgccaaagtggacatgacgttcgaggaggaggcacagctcctgcagttgaaggtgaagtgtctgaacaacctggcggcctcgcagctgaagctcgaccactaccgcgcagccctgcgctcctgcagccttgtgctggagcaccagccagacaacatcaaggctctcttccgcaagggcaaggtgctggcccagcagggggagtacagtgaggccatccccatcctgagggcagccctgaagctggaaccttccaacaagacgatccacgcagagctctcaaagctggtgaagaagcatgcggcgcagcggagcacggagaccgccttgtaccggaaaatgctgggcaaccccagccggctgcctgctaagtgccctggcaagggtgcctggtccatcccatggaagtggctgtttggggcgactgctgttgccttggggggtgtggcactctctgtggtcatcgctgccaggaactgaccacctaggtggctgccaccccctctgcacaccatggaccctgccctgcgctccccaactcccccaggctccctgtccactgccctccctggtctggccccctcctccgggttaggggagcaaggattgggggtcgtgcagcccagccagcaggagggactgaggccctctaggaggaaagcccagagggagggggccctcattccttcagacccagttttcccccaccctccttaccccgctgggctaggtctccgccagggctggcctcagtttctcctcaacaggcctgggggcagcccttcccctgcctagtccccgcctgagtgccagccccccaccccgcctgccgccccctgtccaggttccctccccgccacagtgaaataaagcatcccaccctgcagtttcaaaaaa

SEQ ID NO: 366006 - DNA, 1628 bp, Homo sapiens
gattcccctcaccctctgcatcctcaaccccatccagtacctcgaagtcctcgagcggtgggaccccggcgggtgaggaggaagaggaggaggaagaggaggaagaggatgacctgagtgagctgccaccgctggaggacatgggacaacccccggcggaggaggctgagcagcctggggccctggcccgagagttccttgctgccatggagcccgagcccgccccagccccggccccagaagagtggctggacattctggggaacgggctgttgaggaagaagacgctggtcccagggccgccaggttcgagccgcccggtcaagggccaggtggtcaccgtacatctgcagacgtcgctggagaatggcacacgggtgcaggaggagccggagctggtgttcactctgggtgactgtgacgtcatccaggccctggatctcagtgtcccactcatggacgtgggggagacggccatggtcactgctgactccaagtactgctacggcccccaaggcagcaggagcccatacatccccccgcacgcggccctgtgcctggaggtgaccctgaagacggctgtggacgggcctgacctggagatgctcacggggcaggagcgcgtggccctggccaaccggaagcgggagtgcggcaacgcccactaccagcgggcggacttcgtcctggccgccaactcctacgacctcgccatcaaggctatcacctccagcgccaaagtggacatgacgttcgaggaggaggcacagctcctgcagttgaaggtgaagtgtctgaacaacctggcggcctcgcagctgaagctcgaccactaccgcgcagccctgcgctcctgcagccttgtgctggagcaccagccagacaacatcaaggctctcttccgcaagggcaaggtgctggcccagcagggggagtacagtgaggccatccccatcctgagggcagccctgaagctggaaccttccaacaagacgatccacgcagagctctcaaagctggtgaagaagcatgcggcgcagcggagcacggagaccgccttgtaccggaaaatgctgggcaaccccagccggctgcctgctaagtgccctggcaagggtgcctggtccatcccatggaagtggctgtttggggcgactgctgttgccttggggggtgtggcactctctgtggtcatcgctgccaggaactgaccacctaggtggctgccaccccctctgcacaccatggaccctgccctgcgctccccaactcccccaggctccctgtccactgccctccctggtctggccccctcctccgggttaggggagcaaggattgggggtcgtgcagcccagccagcaggagggactgaggccctctaggaggaaagcccagagggagggggccctcattccttcagacccagttttcccccaccctccttaccccgctgggctaggtctccgccagggctggcctcagtttctcctcaacaggcctgggggcagcccttcccctgcctagtccccgcctgagtgccagccccccaccccgcctgccgccccctgtccaggttccctccccgccacagtgaaataaagcatcccaccctgcagtttcaaaaaa

SEQ ID NO: 366007 - DNA, 1836 bp, Homo sapiens
ggcgtcactcctcctcaggccctcaggttcacttctgtaactaaggcttcaggatgggtcattcagcaaccccagagctgccctgcccgtcaagcttgaactctttaaggaaataacatttagagtggactgtgcccccagcagcccccaagggccaattcctgtccccccagcagcatggcatcgtgtgctgaaccctctgagccctctgccccactgcccgccggggtcccaccgctcgaggacttcgaggtactggatggggttgaggatgcagagggtgaggaggaagaggaggaggaagaggaggaagaggatgacctgagtgagctgccaccgctggaggacatgggacaacccccggcggaggaggctgagcagcctggggccctggcccgagagttccttgctgccatggagcccgagcccgccccagccccggccccagaagagtggctggacattctggggaacgggctgttgaggaagaagacgctggtcccagggccgccaggttcgagccgcccggtcaagggccaggtggtcaccgtacatctgcagacgtcgctggagaatggcacacgggtgcaggaggagccggagctggtgttcactctgggtgactgtgacgtcatccaggccctggatctcagtgtcccactcatggacgtgggggagacggccatggtcactgctgactccaagtactgctacggcccccaaggcagcaggagcccatacatccccccgcacgcggccctgtgcctggaggtgaccctgaagacggctgtggacgggcctgacctggagatgctcacggggcaggagcgcgtggccctggccaaccggaagcgggagtgcggcaacgcccactaccagcgggcggacttcgtcctggccgccaactcctacgacctcgccatcaaggctatcacctccagcgccaaagtggacatgacgttcgaggaggaggcacagctcctgcagttgaaggtgaagtgtctgaacaacctggcggcctcgcagctgaagctcgaccactaccgcgcagccctgcgctcctgcagccttgtgctggagcaccagccagacaacatcaaggctctcttccgcaagggcaaggtgctggcccagcagggggagtacagtgaggccatccccatcctgagggcagccctgaagctggaaccttccaacaagacgatccacgcagagctctcaaagctggtgaagaagcatgcggcgcagcggagcacggagaccgccttgtaccggaaaatgctgggcaaccccagccggctgcctgctaagtgccctggcaagggtgcctggtccatcccatggaagtggctgtttggggcgactgctgttgccttggggggtgtggcactctctgtggtcatcgctgccaggaactgaccacctaggtggctgccaccccctctgcacaccatggaccctgccctgcgctccccaactcccccaggctccctgtccactgccctccctggtctggccccctcctccgggttaggggagcaaggattgggggtcgtgcagcccagccagcaggagggactgaggccctctaggaggaaagcccagagggagggggccctcattccttcagacccagttttcccccaccctccttaccccgctgggctaggtctccgccagggctggcctcagtttctcctcaacaggcctgggggcagcccttcccctgcctagtccccgcctgagtgccagccccccaccccgcctgccgccccctgtccaggttccctccccgccacagtgaaataaagcatcccaccctgcagtttcaaaaaa

SEQ ID NO: 366008 - DNA, 1564 bp, Homo sapiens
  misc_feature (43)..(43): n is a, c, g, or t
aaagcgagaagcgcacttcggctaggtacgaggctgggtgttngatgacctgagtgagctgccaccgctggaggacatgggacaacccccggcggaggaggctgagcagcctggggccctggcccgagagttccttgctgccatggagcccgagcccgccccagccccggccccagaagagtggctggacattctggggaacgggctgttgaggaagaagacgctggtcccagggccgccaggttcgagccgcccggtcaagggccaggtggtcaccgtacatctgcagacgtcgctggagaatggcacacgggtgcaggaggagccggagctggtgttcactctgggtgactgtgacgtcatccaggccctggatctcagtgtcccactcatggacgtgggggagacggccatggtcactgctgactccaagtactgctacggcccccaaggcagcaggagcccatacatccccccgcacgcggccctgtgcctggaggtgaccctgaagacggctgtggacgggcctgacctggagatgctcacggggcaggagcgcgtggccctggccaaccggaagcgggagtgcggcaacgcccactaccagcgggcggacttcgtcctggccgccaactcctacgacctcgccatcaaggctatcacctccagcgccaaagtggacatgacgttcgaggaggaggcacagctcctgcagttgaaggtgaagtgtctgaacaacctggcggcctcgcagctgaagctcgaccactaccgcgcagccctgcgctcctgcagccttgtgctggagcaccagccagacaacatcaaggctctcttccgcaagggcaaggtgctggcccagcagggggagtacagtgaggccatccccatcctgagggcagccctgaagctggaaccttccaacaagacgatccacgcagagctctcaaagctggtgaagaagcatgcggcgcagcggagcacggagaccgccttgtaccggaaaatgctgggcaaccccagccggctgcctgctaagtgccctggcaagggtgcctggtccatcccatggaagtggctgtttggggcgactgctgttgccttggggggtgtggcactctctgtggtcatcgctgccaggaactgaccacctaggtggctgccaccccctctgcacaccatggaccctgccctgcgctccccaactcccccaggctccctgtccactgccctccctggtctggccccctcctccgggttaggggagcaaggattgggggtcgtgcagcccagccagcaggagggactgaggccctctaggaggaaagcccagagggagggggccctcattccttcagacccagttttcccccaccctccttaccccgctgggctaggtctccgccagggctggcctcagtttctcctcaacaggcctgggggcagcccttcccctgcctagtccccgcctgagtgccagccccccaccccgcctgccgccccctgtccaggttccctccccgccacagtgaaataaagcatcccaccctgcagtttcaaaaaa

SEQ ID NO: 366009 - DNA, 2332 bp, Homo sapiens
gctgcagcggcagcagctgtcgcgccagtcgcaacagaagcaggtccgaggcacagcccgatcccgccatggagcagccgaggaaggcggtggtagtgacgggatttggcccttttggggaacacaccgtgaacgccagttggattgcagttcaggagctagaaaagctaggccttggcgacagcgtggacctgcatgtgtacgagattccggttgagtaccaaacagtccagagactcatccccgccctgtgggagaagcacagtccacagctggtggtgcatgtgggggtgtcaggcatggcgaccacagtcacactggagaaatgtggacacaacaagggctacaaggggctggacaactgccgcttttgccccggctcccagtgctgcgtggaggacgggcctgaaagcattgactccatcatcgacatggatgctgtgtgcaagcgagtcaccacgttgggcctggatgtgtcggtgaccatctcgcaggatgccggcagatatctctgcgactttacctactacacctctttgtaccagagtcacggtcgatcagccttcgtccacgtgcccccactggggaagccgtacaacgcggaccagctgggcagggcactgagagccatcattgaggagatgttggacctcctggagcagtcagagggcaaaatcaactattgccacaaacactgagggacgctcaggtctcctaagacctcatcctgctggggaccccacgaggggacatccaccctctggggtgtggccaggaaaagacaagctcttcagcttggggatccgatctggatgacctgagtgagctgccaccgctggaggacatgggacaacccccggcggaggaggctgagcagcctggggccctggcccgagagttccttgctgccatggagcccgagcccgccccagccccggccccagaagagtggctggacattctggggaacgggctgttgaggaagaagacgctggtcccagggccgccaggttcgagccgcccggtcaagggccaggtggtcaccgtacatctgcagacgtcgctggagaatggcacacgggtgcaggaggagccggagctggtgttcactctgggtgactgtgacgtcatccaggccctggatctcagtgtcccactcatggacgtgggggagacggccatggtcactgctgactccaagtactgctacggcccccaaggcagcaggagcccatacatccccccgcacgcggccctgtgcctggaggtgaccctgaagacggctgtggacgggcctgacctggagatgctcacggggcaggagcgcgtggccctggccaaccggaagcgggagtgcggcaacgcccactaccagcgggcggacttcgtcctggccgccaactcctacgacctcgccatcaaggctatcacctccagcgccaaagtggacatgacgttcgaggaggaggcacagctcctgcagttgaaggtgaagtgtctgaacaacctggcggcctcgcagctgaagctcgaccactaccgcgcagccctgcgctcctgcagccttgtgctggagcaccagccagacaacatcaaggctctcttccgcaagggcaaggtgctggcccagcagggggagtacagtgaggccatccccatcctgagggcagccctgaagctggaaccttccaacaagacgatccacgcagagctctcaaagctggtgaagaagcatgcggcgcagcggagcacggagaccgccttgtaccggaaaatgctgggcaaccccagccggctgcctgctaagtgccctggcaagggtgcctggtccatcccatggaagtggctgtttggggcgactgctgttgccttggggggtgtggcactctctgtggtcatcgctgccaggaactgaccacctaggtggctgccaccccctctgcacaccatggaccctgccctgcgctccccaactcccccaggctccctgtccactgccctccctggtctggccccctcctccgggttaggggagcaaggattgggggtcgtgcagcccagccagcaggagggactgaggccctctaggaggaaagcccagagggagggggccctcattccttcagacccagttttcccccaccctccttaccccgctgggctaggtctccgccagggctggcctcagtttctcctcaacaggcctgggggcagcccttcccctgcctagtccccgcctgagtgccagccccccaccccgcctgccgccccctgtccaggttccctccccgccacagtgaaataaagcatcccaccctgcagtttcaaaaaa

SEQ ID NO: 366010 - DNA, 1498 bp, Homo sapiens
  misc_feature (16)..(16): n is a, c, g, or t
  misc_feature (22)..(23): n is a, c, g, or t
agccggagctggtgtncctctnngtgactgtgacgtcatccaggccctggatctcagtgtcccactcatggacgtgggggagacggccatggtcactgctgactccaagtactgctacggcccccaaggcaggaacgggctgttgaggaagaagacgctggtcccagggccgccaggttcgagccgcccggtcaagggccaggtggtcaccgtacatctgcagacgtcgctggagaatggcacacgggtgcaggaggagccggagctggtgttcactctgggtgactgtgacgtcatccaggccctggatctcagtgtcccactcatggacgtgggggagacggccatggtcactgctgactccaagtactgctacggcccccaaggcagcaggagcccatacatccccccgcacgcggccctgtgcctggaggtgaccctgaagacggctgtggacgggcctgacctggagatgctcacggggcaggagcgcgtggccctggccaaccggaagcgggagtgcggcaacgcccactaccagcgggcggacttcgtcctggccgccaactcctacgacctcgccatcaaggctatcacctccagcgccaaagtggacatgacgttcgaggaggaggcacagctcctgcagttgaaggtgaagtgtctgaacaacctggcggcctcgcagctgaagctcgaccactaccgcgcagccctgcgctcctgcagccttgtgctggagcaccagccagacaacatcaaggctctcttccgcaagggcaaggtgctggcccagcagggggagtacagtgaggccatccccatcctgagggcagccctgaagctggaaccttccaacaagacgatccacgcagagctctcaaagctggtgaagaagcatgcggcgcagcggagcacggagaccgccttgtaccggaaaatgctgggcaaccccagccggctgcctgctaagtgccctggcaagggtgcctggtccatcccatggaagtggctgtttggggcgactgctgttgccttggggggtgtggcactctctgtggtcatcgctgccaggaactgaccacctaggtggctgccaccccctctgcacaccatggaccctgccctgcgctccccaactcccccaggctccctgtccactgccctccctggtctggccccctcctccgggttaggggagcaaggattgggggtcgtgcagcccagccagcaggagggactgaggccctctaggaggaaagcccagagggagggggccctcattccttcagacccagttttcccccaccctccttaccccgctgggctaggtctccgccagggctggcctcagtttctcctcaacaggcctgggggcagcccttcccctgcctagtccccgcctgagtgccagccccccaccccgcctgccgccccctgtccaggttccctccccgccacagtgaaataaagcatcccaccctgcagtttcaaaaaa

SEQ ID NO: 366011 - DNA, 1516 bp, Homo sapiens
ctcggctttgacagagtgcaagacgatgacttgcaaaatgtcgcagctggaacgcaacatagagaccatcatcaacaccttccaccaatactctgtgaagctggggcacccagacaccccggccccagaagagtggctggacattctggggaacgggctgttgaggaagaagacgctggtcccagggccgccaggttcgagccgcccggtcaagggccaggtggtcaccgtacatctgcagacgtcgctggagaatggcacacgggtgcaggaggagccggagctggtgttcactctgggtgactgtgacgtcatccaggccctggatctcagtgtcccactcatggacgtgggggagacggccatggtcactgctgactccaagtactgctacggcccccaaggcagcaggagcccatacatccccccgcacgcggccctgtgcctggaggtgaccctgaagacggctgtggacgggcctgacctggagatgctcacggggcaggagcgcgtggccctggccaaccggaagcgggagtgcggcaacgcccactaccagcgggcggacttcgtcctggccgccaactcctacgacctcgccatcaaggctatcacctccagcgccaaagtggacatgacgttcgaggaggaggcacagctcctgcagttgaaggtgaagtgtctgaacaacctggcggcctcgcagctgaagctcgaccactaccgcgcagccctgcgctcctgcagccttgtgctggagcaccagccagacaacatcaaggctctcttccgcaagggcaaggtgctggcccagcagggggagtacagtgaggccatccccatcctgagggcagccctgaagctggaaccttccaacaagacgatccacgcagagctctcaaagctggtgaagaagcatgcggcgcagcggagcacggagaccgccttgtaccggaaaatgctgggcaaccccagccggctgcctgctaagtgccctggcaagggtgcctggtccatcccatggaagtggctgtttggggcgactgctgttgccttggggggtgtggcactctctgtggtcatcgctgccaggaactgaccacctaggtggctgccaccccctctgcacaccatggaccctgccctgcgctccccaactcccccaggctccctgtccactgccctccctggtctggccccctcctccgggttaggggagcaaggattgggggtcgtgcagcccagccagcaggagggactgaggccctctaggaggaaagcccagagggagggggccctcattccttcagacccagttttcccccaccctccttaccccgctgggctaggtctccgccagggctggcctcagtttctcctcaacaggcctgggggcagcccttcccctgcctagtccccgcctgagtgccagccccccaccccgcctgccgccccctgtccaggttccctccccgccacagtgaaataaagcatcccaccctgcagtttcaaaaaa

SEQ ID NO: 366012 - DNA, 1818 bp, Homo sapiens
atgggcacggcaggcgcggggccaagcggccgaacctggttcccgaggcgcggcggccgcggctgggggcggggaggggggcgcaggaccccaagtgggggtcccggagccagagggccaattcctgtccccccagcagcatggcatcgtgtgctgaaccctctgagccctctgccccactgcccgccggggtcccaccgctcgaggacttcgaggtactggatggggttgaggatgcagagggtgaggaggaagaggaggaggaagaggaggaagaggatgacctgagtgagctgccaccgctggaggacatgggacaacccccggcggaggaggctgagcagcctggggccctggcccgagagttccttgctgccatggagcccgagcccgccccagccccggccccagaagagtggctggacattctggggaacgggctgttgaggaagaagacgctggtcccagggccgccaggttcgagccgcccggtcaagggccaggtggtcaccgtacatctgcagacgtcgctggagaatggcacacgggtgcaggaggagccggagctggtgttcactctgggtgactgtgacgtcatccaggccctggatctcagtgtcccactcatggacgtgggggagacggccatggtcactgctgactccaagtactgctacggcccccaaggcagcaggagcccatacatccccccgcacgcggccctgtgcctggaggtgaccctgaagacggctgtggacgggcctgacctggagatgctcacggggcaggagcgcgtggccctggccaaccggaagcgggagtgcggcaacgcccactaccagcgggcggacttcgtcctggccgccaactcctacgacctcgccatcaaggctatcacctccagcgccaaagtggacatgacgttcgaggaggaggcacagctcctgcagttgaaggtgaagtgtctgaacaacctggcggcctcgcagctgaagctcgaccactaccgcgcagccctgcgctcctgcagccttgtgctggagcaccagccagacaacatcaaggctctcttccgcaagggcaaggtgctggcccagcagggggagtacagtgaggccatccccatcctgagggcagccctgaagctggaaccttccaacaagcttcccctgccttctgcagacgatccacgcagagctctcaaagctggtgaagaagcatgcggcgcagcggagcacggagaccgccttgtaccggaaaatgctgggcaaccccagccggctgcctgctaagtgccctggcaagggtgcctggtccatcccatggaagtggctgtttggggcgactgctgttgccttggggggtgtggcactctctgtggtcatcgctgccaggaactgaccacctaggtggctgccaccccctctgcacaccatggaccctgccctgcgctccccaactcccccaggctccctgtccactgccctccctggtctggccccctcctccgggttaggggagcaaggattgggggtcgtgcagcccagccagcaggagggactgaggccctctaggaggaaagcccagagggagggggccctcattccttcagacccagttttcccccaccctccttaccccgctgggctaggtctccgccagggctggcctcagtttctcctcaacaggcctgggggcagcccttcccctgcctagtccccgcctgagtgccagccccccaccccgcctgccgccccctgtccaggttccctccccgccacagtgaaataaagcatcccaccctgcagtttcaaaaaa

SEQ ID NO: 366013 - DNA, 1700 bp, Homo sapiens
atgggcacggcaggcgcggggccaagcggccgaacctggttcccgaggcgcggcggccgcggctgggggcggggaggggggcgcaggaccccaagtgggggtcccggagccagagggccaattcctgtccccccagcagcatggcatcgtgtgctgaaccctctgagccctctgccccactgcccgccggggtcccaccgctcgaggacttcgaggtactggatggggttgaggatgcagagggtgaggaggaagaggaggaggaagaggaggaagaggatgacctgagtgagctgccaccgctggaggacatgggacaacccccggcggaggaggctgagcagcctggggccctggcccgagagttccttgctgccatggagcccgagcccgccccagccccggccccagaagagtggctggacattctggggaacgggctgttgaggaagaagacgctggtcccagggccgccaggttcgagccgcccggtcaagggccaggtggtcaccgtacatctgcagacgtcgctggagaatggcacacgggtgcaggaggagccggagctggtgttcactctgggtgactgtgacgtcatccaggccctggatctcagtgtcccactcatggacgtgggggagacggccatggtcactgctgactccaagtactgctacggcccccaaggcagcaggagcccatacatccccccgcacgcggccctgtgcctggaggtgaccctgaagacggctgtggacgggcctgacctggagatgctcacggggcaggagcgcgtggccctggccaaccggaagcgggagtgcggcaacgcccactaccagcgggcggacttcgtcctggccgccaactcctacgacctcgccatcaaggctatcacctccagcgccaaagtggacatgacgttcgaggaggaggcacagctcctgcagttgaaggtgaagtgtctgaacaacctggcggcctcgcagctgaagctcgaccactaccgcgcagccctgcgctcctgcagccttgtgctggagcaccagccagacaacatcaaggctctcttccgcaagggcaaggtgctggcccagcagggggagtacagtgaggccatccccatcctgagggcagccctgaagctggaaccttccaacaagacgatccacgcagagctctcaaagctggtgaagaagcatgcggcgcagcggagcacggagaccgccttgtaccggaaaatgctgggcaaccccagccggctgcctgctaagtgccctggcaagggtgcctggtccatcccatggaagtggctgtttggggcgactgctgttgccttggggggtgtggcactctctgtggtcatcgctgccaggaactgaccacctaggtggctgccaccccctctgcacaccatggaccctgccctgcgctccccaactcccccaggctccctgtccactgccctccctgagggggccctcattccttcagacccagttttcccccaccctccttaccccgctgggctaggtctccgccagggctggcctcagtttctcctcaacaggcctgggggcagcccttcccctgcctagtccccgcctgagtgccagccccccaccccgcctgccgccccctgtccaggttccctccccgccacagtgaaataaagcatcccaccctgcagtttcaaaaaa

SEQ ID NO: 366014 - DNA, 1239 bp, Homo sapiens
  misc_feature (16)..(16): n is a, c, g, or t
  misc_feature (22)..(23): n is a, c, g, or t
agccggagctggtgtncctctnngtgactgtgacgtcatccaggccctggatctcagtgtcccactcatggacgtgggggagacggccatggtcactgctgactccaagtactgctacggcccccaaggcacaggagcccatacatccccccgcacgcggccctgtgcctggaggtgaccctgaagacggctgtggacgggcctgacctggagatgctcacggggcaggagcgcgtggccctggccaaccggaagcgggagtgcggcaacgcccactaccagcgggcggacttcgtcctggccgccaactcctacgacctcgccatcaaggctatcacctccagcgccaaagtggacatgacgttcgaggaggaggcacagctcctgcagttgaaggtgaagtgtctgaacaacctggcggcctcgcagctgaagctcgaccactaccgcgcagccctgcgctcctgcagccttgtgctggagcaccagccagacaacatcaaggctctcttccgcaagggcaaggtgctggcccagcagggggagtacagtgaggccatccccatcctgagggcagccctgaagctggaaccttccaacaagacgatccacgcagagctctcaaagctggtgaagaagcatgcggcgcagcggagcacggagaccgccttgtaccggaaaatgctgggcaaccccagccggctgcctgctaagtgccctggcaagggtgcctggtccatcccatggaagtggctgtttggggcgactgctgttgccttggggggtgtggcactctctgtggtcatcgctgccaggaactgaccacctaggtggctgccaccccctctgcacaccatggaccctgccctgcgctccccaactcccccaggctccctgtccactgccctccctggtctggccccctcctccgggttaggggagcaaggattgggggtcgtgcagcccagccagcaggagggactgaggccctctaggaggaaagcccagagggagggggccctcattccttcagacccagttttcccccaccctccttaccccgctgggctaggtctccgccagggctggcctcagtttctcctcaacaggcctgggggcagcccttcccctgcctagtccccgcctgagtgccagccccccaccccgcctgccgccccctgtccaggttccctccccgccacagtgaaataaagcatcccaccctgcagtttcaaaaaa

SEQ ID NO: 366015 - DNA, 1195 bp, Homo sapiens
tacgggtgaggtacagctacgggtgaggtacagctacgggtgaggtacagctacgggtgaggtacagctcctgcagttgaaggtgaagtgtctgaacaacctggcggcctcgcagctgaagctcgaccactaccgcgcagccctgcgctcctgcagccttgtgctggagatgctcacggggcaggagcgcgtggccctggccaaccggaagcgggagtgcggcaacgcccactaccagcgggcggacttcgtcctggccgccaactcctacgacctcgccatcaaggctatcacctccagcgccaaagtggacatgacgttcgaggaggaggcacagctcctgcagttgaaggtgaagtgtctgaacaacctggcggcctcgcagctgaagctcgaccactaccgcgcagccctgcgctcctgcagccttgtgctggagcaccagccagacaacatcaaggctctcttccgcaagggcaaggtgctggcccagcagggggagtacagtgaggccatccccatcctgagggcagccctgaagctggaaccttccaacaagacgatccacgcagagctctcaaagctggtgaagaagcatgcggcgcagcggagcacggagaccgccttgtaccggaaaatgctgggcaaccccagccggctgcctgctaagtgccctggcaagggtgcctggtccatcccatggaagtggctgtttggggcgactgctgttgccttggggggtgtggcactctctgtggtcatcgctgccaggaactgaccacctaggtggctgccaccccctctgcacaccatggaccctgccctgcgctccccaactcccccaggctccctgtccactgccctccctggtctggccccctcctccgggttaggggagcaaggattgggggtcgtgcagcccagccagcaggagggactgaggccctctaggaggaaagcccagagggagggggccctcattccttcagacccagttttcccccaccctccttaccccgctgggctaggtctccgccagggctggcctcagtttctcctcaacaggcctgggggcagcccttcccctgcctagtccccgcctgagtgccagccccccaccccgcctgccgccccctgtccaggttccctccccgccacagtgaaataaagcatcccaccctgcagtttcaaaaaa

SEQ ID NO: 366016 - DNA, 2183 bp, Homo sapiens
atgggcacggcaggcgcggggccaagcggccgaacctggttcccgaggcgcggcggccgcggctgggggcggggaggggggcgcaggaccccaagtgggggtcccggagccagagggccaattcctgtccccccagcagcatggcatcgtgtgctgaaccctctgagccctctgccccactgcccgccggggtcccaccgctcgaggacttcgaggtactggatggggttgaggatgcagagggtgaggaggaagaggaggaggaagaggaggaagaggatgacctgagtgagctgccaccgctggaggacatgggacaacccccggcggaggaggctgagcagcctggggccctggcccgagagttccttgctgccatggagcccgagcccgccccagccccggccccagaagagtggctggacattctggggaacgggctgttgaggaagaagacgctggtcccagggccgccaggttcgagccgcccggtcaagggccaggtggtcaccgtacatctgcagacgtcgctggagaatggcacacgggtgcaggaggagccggagctggtgttcactctgggtgactgtgacgtcatccaggccctggatctcagtgtcccactcatggacgtgggggagacggccatggtcactgctgactccaagtactgctacggcccccaaggcagcaggagcccatacatccccccgcacgcggccctgtgcctggaggtgaccctgaagacggctgtggacgggcctgacctggagatgctcacggggcaggagcgcgtggccctggccaaccggaagcgggagtgcggcaacgcccactaccagcgggcggacttcgtcctggccgccaactcctacgacctcgccatcaaggctatcacctccagcgccaaagtggacatgacgttcgaggaggaggcacagctcctgcagttgaaggtgaagtgtctgaacaacctggcggcctcgcagctgaagctcgaccactaccgcgcagccctgcgctcctgcagccttgtgctggagcaccagccagacaacatcaaggctctcttccgcaagggcaaggtgctggcccagcagggggagtacagtgagagggggccctcattccttcagacccagttttcccccaccctccttaccccgctgggctaggtctccgccagggctggcctcagtttctcctcaacaggcctgggggcagcccttcccctgccgcctcgcgcgacaaacgccgtagccgagaaagcgtagtccaagggtacaccatcacacgcagacacgtagaaataacagcatcaccaacccatgacaagacaaacaacaaaaaatagaaaacgcaaataacaacacaagtaatacaaacaaacccaacacgaaaccatactatataaataacaagcacaacacaacaacacaccctcacacacataaagacacaccactacccacaagagagtgagggggagaaaagaggggaagcgagaagaggagagaagaaggagcgagcgagggctgagtatactgacgaggagggcagcgaggaaggtagagggggaggcaccgcagccgtggggaagaaggagaggcgtcgcagggaccgaggccgccccagtatcaactaaactcacactcaacaacaaaacaaaaacaactccaacactaaacacaaaaaacaacaccaaatcataccatcaacacacaccaaacaatatacaaacacagagcgagaatatcaacacatcacaaagacacgaaaaactaaccccaacaatccctagaatcaaatacacctaacaaacaaccaacacaaacaaaataccagaacgactgtgtacagcaaagaaacacaaaacactacacatcacttatagcgccgcaccaaagccatcaaggaaatatatcaagtaaaagaataaataacgcactactgaacaacttcaagtaagaattacatacataaaatattaaatactatcctagaagcaatgcaacacacaatcatagcatgctacaaatcaatcgaacatacgaactaagcagtatacacaccacctcgacttgctaattactttgcgcccgaacgcagaagatacagaccgactgcgggtgtcgcaggaagtgcgaggtgacggagcagcgtacgacgagactgacgcagag

SEQ ID NO: 366017 - DNA, 696 bp, Homo sapiens
ccacgcgtcgcccacgcgtcgcccacgcgtcgagccctgaagctggaaccttccaacaagacgatccacgcagagctctcaaagctggtgaagaagcatgcggcgcagcggagcacggagaccgccttgtaccggaaaatgctgggcaaccccagccggctgcctgctaagtgccctggcaagggtgcctggtccatcccatggaagtggctgtttggggcgactgctgttgccttggggggtgtggcactctctgtggtcatcgctgccaggaactgaccacctaggtggctgccaccccctctgcacaccatggaccctgccctgcgctccccaactcccccaggctccctgtccactgccctccctggtctggccccctcctccgggttaggggagcaaggattgggggtcgtgcagcccagccagcaggagggactgaggccctctaggaggaaagcccagagggagggggccctcattccttcagacccagttttcccccaccctccttaccccgctgggctaggtctccgccagggctggcctcagtttctcctcaacaggcctgggggcagcccttcccctgcctagtccccgcctgagtgccagccccccaccccgcctgccgccccctgtccaggttccctccccgccacagtgaaataaagcatcccaccctgcagtttcaaaaaa

SEQ ID NO: 366018 - DNA, 1101 bp, Homo sapiens
atgggcacggcaggcgcggggccaagcggccgaacctggttcccgaggcgcggcggccgcggctgggggcggggaggggggcgcaggaccccaagtgggggtcccggagccagagggccaattcctgtccccccagcagcatggcatcgtgtgctgaaccctctgagccctctgccccactgcccgccggggtcccaccgctcgaggacttcgaggtactggatggggttgaggatgcagagggtgaggaggaagaggaggaggaagaggaggaagaggatgacctgagtgagctgccaccgctggaggacatgggacaacccccggcggaggaggctgagcagcctggggccctggcccgagagttccttgctgccatggagcccgagcccgccccagccccggccccagaagagtggctggacattctggggaacgggctgttgaggaagaagacgctggtcccagggccgccaggttcgagccgcccggtcaagggccaggtggtcaccgtacatctgcagacgtcgctggagaatggcacacgggtgcaggaggagccggagctggtgttcactctgggtgactgtgacgtcatccaggccctggatctcagtgtcccactcatggacgtgggggagacggccatggtcactgctgactccaagtactgctacggcccccaaggcagcaggagcccatacatccccccgcacgcggccctgtgcctggaggtgaccctgaagacggctgtggacgggcctgacctggagatgctcacggggcaggagcgcgtggccctggccaaccggaagcgggagtgcggcaacgcccactaccagcgggcggacttcgtcctggccgccaactcctacgacctcgccatcaaggctatcacctccagcgccaaagcctccttaccccgctgggctaggtctccgccagggctggcctcagtttctcctcaacaggcctgggggcagcccttcccctgcctagtccccgcctgagtgccagccccccaccccgcctgccgccccctgtccaggttccctccccgccacagtgaaataaagcatcccaccctgcagtttcaaaaaa

SEQ ID NO: 366019 - DNA, 489 bp, Homo sapiens
  misc_feature (279)..(279): n is a, c, g, or t
atgggcacggcaggcgcggggccaagcggccgaacctggttcccgaggcgcggcggccgcggctgggggcggggaggggggcgcaggaccccaagtgggggtcccggagccagagggccaattcctgtccccccagcagcatggcatcgtgtgctgaaccctctgagccctctgccccactgcccgccggggtcccaccgctcgaggacttcgaggtactggatggggttgaggatgcagagggtgaggaggaagaggaggaggaagaggaggaagagncctgggcatggggggcggggctgtgctaaacttcattactactgcaaaaccaccgtgtgctggaaactaaaggtactcatgggactgccttctctgcgcccacctgtgacctccaaaaactcaaacaggtccaaacctcactggctggcgtgatctttttatttgcttgggggtttggcttttactctgcaggccaaaaagcctttgcac

SEQ ID NO: 366020 - DNA, 413 bp, Homo sapiens
tacgggtgaggtacagctacgggtgaggtacagctacgggtgaggtacagctacgggtgaggtacagctcctgcagttgaaggtgaagtgtctgaacaacctggcggcctcgcagctgaagctcgaccactaccgcgcagccctgcgctcctgcagccttgtgctggagatgctcacggggcaggagcgcgtggccctggccaaccggaagcgggagtgcggcaacgcccactaccagcgggcggacttcgtcctggccgccaactcctacgacctcgccatcaaggctatcacctccagcgccaaagtagtccccgcctgagtgccagccccccaccccgcctgccgccccctgtccaggttccctccccgccacagtgaaataaagcatcccaccctgcagtttcaaaaaa

SEQ ID NO: 366021 - DNA, 1799 bp, Homo sapiens
atgggcacggcaggcgcggggccaagcggccgaacctggttcccgaggcgcggcggccgcggctgggggcggggaggggggcgcaggaccccaagtgggggtcccggagccagagggccaattcctgtccccccagcagcatggcatcgtgtgctgaaccctctgagccctctgccccactgcccgccggggtcccaccgctcgaggacttcgaggtactggatggggttgaggatgcagagggtgaggaggaagaggaggaggaagaggaggaagaggatgacctgagtgagctgccaccgctggaggacatgggacaacccccggcggaggaggctgagcagcctggggccctggcccgagagttccttgctgccatggagcccgagcccgccccagccccggccccagaagagtggctggacattctggggaacgggctgttgaggaagaagacgctggtcccagggccgccaggttcgagccgcccggtcaagggccaggtggtcaccgtacatctgcagacgtcgctggagaatggcacacgggtgcaggaggagccggagctggtgttcactctgggtgactgtgacgtcatccaggccctggatctcagtgtcccactcatggacgtgggggagacggccatggtcactgctgactccaagtactgctacggcccccaaggcagcaggagcccatacatccccccgcacgcggccctgtgcctggaggtgaccctgaagacggctgtggacgggcctgacctggagatgctcacggggcaggagcgcgtggccctggccaaccggaagcgggagtgcggcaacgcccactaccagcgggcggacttcgtcctggccgccaactcctacgacctcgccatcaaggctatcacctccagcgccaaagtggacatgacgttcgaggaggaggcacagctcctgcagttgaaggtgaagtgtctgaacaacctggcggcctcgcagctgaagctcgaccactaccgcgcagccctgcgctcctgcagccttgtgctggagcaccagccagacaacatcaaggctctcttccgcaagggcaaggtgctggcccagcagggggagtacagtgaggccatccccatcctgagggcagccctgaagctggaaccttccaacaagacgatccacgcagagctctcaaagctggtgaagaagcatgcggcgcagcggagcacggagaccgccttgtaccggaaaatgctgggcaaccccagccggctgcctgctaagtgccctggcaagggtgcctggtccatcccatggaagtggctgtttggggcgactgctgttgccttggggggtgtggcactctctgtggtcatcgctgccaggaactgaccacctaggtggctgccaccccctctgcacaccatggaccctgccctgcgctccccaactcccccaggctccctgtccactgccctccctggtctggccccctcctccgggttaggggagcaaggattgggggtcgtgcagcccagccagcaggagggactgaggccctctaggaggaaagcccagagggagggggccctcattccttcagacccagttttcccccaccctccttaccccgctgggctaggtctccgccagggctggcctcagtttctcctcaacaggcctgggggcagcccttcccctgcctagtccccgcctgagtgccagccccccaccccgcctgccgccccctgtccaggttccctccccgccacagtgaaataaagcatcccaccctgcagtttcaaaaaa

SEQ ID NO: 366022 - DNA, 1722 bp, Homo sapiens
gctggtacgcgccggaattaggggtcccggagccagagggccaattcctgtccccccagcagcatggcatcgtgtgctgaaccctctgagccctctgccccactgcccgccggggtcccaccgctcgaggacttcgaggtactggatggggttgaggatgcagagggtgaggaggaagaggaggaggaagaggaggaagaggatgacctgagtgagctgccaccgctggaggacatgggacaacccccggcggaggaggctgagcagcctggggccctggcccgagagttccttgctgccatggagcccgagcccgccccagccccggccccagaagagtggctggacattctggggaacgggctgttgaggaagaagacgctggtcccagggccgccaggttcgagccgcccggtcaagggccaggtggtcaccgtacatctgcagacgtcgctggagaatggcacacgggtgcaggaggagccggagctggtgttcactctgggtgactgtgacgtcatccaggccctggatctcagtgtcccactcatggacgtgggggagacggccatggtcactgctgactccaagtactgctacggcccccaaggcagcaggagcccatacatccccccgcacgcggccctgtgcctggaggtgaccctgaagacggctgtggacgggcctgacctggagatgctcacggggcaggagcgcgtggccctggccaaccggaagcgggagtgcggcaacgcccactaccagcgggcggacttcgtcctggccgccaactcctacgacctcgccatcaaggctatcacctccagcgccaaagtggacatgacgttcgaggaggaggcacagctcctgcagttgaaggtgaagtgtctgaacaacctggcggcctcgcagctgaagctcgaccactaccgcgcagccctgcgctcctgcagccttgtgctggagcaccagccagacaacatcaaggctctcttccgcaagggcaaggtgctggcccagcagggggagtacagtgaggccatccccatcctgagggcagccctgaagctggaaccttccaacaagacgatccacgcagagctctcaaagctggtgaagaagcatgcggcgcagcggagcacggagaccgccttgtaccggaaaatgctgggcaaccccagccggctgcctgctaagtgccctggcaagggtgcctggtccatcccatggaagtggctgtttggggcgactgctgttgccttggggggtgtggcactctctgtggtcatcgctgccaggaactgaccacctaggtggctgccaccccctctgcacaccatggaccctgccctgcgctccccaactcccccaggctccctgtccactgccctccctggtctggccccctcctccgggttaggggagcaaggattgggggtcgtgcagcccagccagcaggagggactgaggccctctaggaggaaagcccagagggagggggccctcattccttcagacccagttttcccccaccctccttaccccgctgggctaggtctccgccagggctggcctcagtttctcctcaacaggcctgggggcagcccttcccctgcctagtccccgcctgagtgccagccccccaccccgcctgccgccccctgtccaggttccctccccgccacagtgaaataaagcatcccaccctgcagtttcaaaaaa

SEQ ID NO: 366023 - DNA, 1706 bp, Homo sapiens
cgagcccgggaggagcaggcagggccaattcctgtccccccagcagcatggcatcgtgtgctgaaccctctgagccctctgccccactgcccgccggggtcccaccgctcgaggacttcgaggtactggatggggttgaggatgcagagggtgaggaggaagaggaggaggaagaggaggaagaggatgacctgagtgagctgccaccgctggaggacatgggacaacccccggcggaggaggctgagcagcctggggccctggcccgagagttccttgctgccatggagcccgagcccgccccagccccggccccagaagagtggctggacattctggggaacgggctgttgaggaagaagacgctggtcccagggccgccaggttcgagccgcccggtcaagggccaggtggtcaccgtacatctgcagacgtcgctggagaatggcacacgggtgcaggaggagccggagctggtgttcactctgggtgactgtgacgtcatccaggccctggatctcagtgtcccactcatggacgtgggggagacggccatggtcactgctgactccaagtactgctacggcccccaaggcagcaggagcccatacatccccccgcacgcggccctgtgcctggaggtgaccctgaagacggctgtggacgggcctgacctggagatgctcacggggcaggagcgcgtggccctggccaaccggaagcgggagtgcggcaacgcccactaccagcgggcggacttcgtcctggccgccaactcctacgacctcgccatcaaggctatcacctccagcgccaaagtggacatgacgttcgaggaggaggcacagctcctgcagttgaaggtgaagtgtctgaacaacctggcggcctcgcagctgaagctcgaccactaccgcgcagccctgcgctcctgcagccttgtgctggagcaccagccagacaacatcaaggctctcttccgcaagggcaaggtgctggcccagcagggggagtacagtgaggccatccccatcctgagggcagccctgaagctggaaccttccaacaagacgatccacgcagagctctcaaagctggtgaagaagcatgcggcgcagcggagcacggagaccgccttgtaccggaaaatgctgggcaaccccagccggctgcctgctaagtgccctggcaagggtgcctggtccatcccatggaagtggctgtttggggcgactgctgttgccttggggggtgtggcactctctgtggtcatcgctgccaggaactgaccacctaggtggctgccaccccctctgcacaccatggaccctgccctgcgctccccaactcccccaggctccctgtccactgccctccctggtctggccccctcctccgggttaggggagcaaggattgggggtcgtgcagcccagccagcaggagggactgaggccctctaggaggaaagcccagagggagggggccctcattccttcagacccagttttcccccaccctccttaccccgctgggctaggtctccgccagggctggcctcagtttctcctcaacaggcctgggggcagcccttcccctgcctagtccccgcctgagtgccagccccccaccccgcctgccgccccctgtccaggttccctccccgccacagtgaaataaagcatcccaccctgcagtttcaaaaaa

SEQ ID NO: 366024 - DNA, 1812 bp, Homo sapiens
ggcgtcactcctcctcaggccctcaggttcacttctgtaactaaggcttcaggatgggtcattcagcaaccccagagctgccctgcccgtcaagcttgaactctttaaggaaataacatttagagtggactgtgcccccagcagcccccaagcatggcatcgtgtgctgaaccctctgagccctctgccccactgcccgccggggtcccaccgctcgaggacttcgaggtactggatggggttgaggatgcagagggtgaggaggaagaggaggaggaagaggaggaagaggatgacctgagtgagctgccaccgctggaggacatgggacaacccccggcggaggaggctgagcagcctggggccctggcccgagagttccttgctgccatggagcccgagcccgccccagccccggccccagaagagtggctggacattctggggaacgggctgttgaggaagaagacgctggtcccagggccgccaggttcgagccgcccggtcaagggccaggtggtcaccgtacatctgcagacgtcgctggagaatggcacacgggtgcaggaggagccggagctggtgttcactctgggtgactgtgacgtcatccaggccctggatctcagtgtcccactcatggacgtgggggagacggccatggtcactgctgactccaagtactgctacggcccccaaggcagcaggagcccatacatccccccgcacgcggccctgtgcctggaggtgaccctgaagacggctgtggacgggcctgacctggagatgctcacggggcaggagcgcgtggccctggccaaccggaagcgggagtgcggcaacgcccactaccagcgggcggacttcgtcctggccgccaactcctacgacctcgccatcaaggctatcacctccagcgccaaagtggacatgacgttcgaggaggaggcacagctcctgcagttgaaggtgaagtgtctgaacaacctggcggcctcgcagctgaagctcgaccactaccgcgcagccctgcgctcctgcagccttgtgctggagcaccagccagacaacatcaaggctctcttccgcaagggcaaggtgctggcccagcagggggagtacagtgaggccatccccatcctgagggcagccctgaagctggaaccttccaacaagacgatccacgcagagctctcaaagctggtgaagaagcatgcggcgcagcggagcacggagaccgccttgtaccggaaaatgctgggcaaccccagccggctgcctgctaagtgccctggcaagggtgcctggtccatcccatggaagtggctgtttggggcgactgctgttgccttggggggtgtggcactctctgtggtcatcgctgccaggaactgaccacctaggtggctgccaccccctctgcacaccatggaccctgccctgcgctccccaactcccccaggctccctgtccactgccctccctggtctggccccctcctccgggttaggggagcaaggattgggggtcgtgcagcccagccagcaggagggactgaggccctctaggaggaaagcccagagggagggggccctcattccttcagacccagttttcccccaccctccttaccccgctgggctaggtctccgccagggctggcctcagtttctcctcaacaggcctgggggcagcccttcccctgcctagtccccgcctgagtgccagccccccaccccgcctgccgccccctgtccaggttccctccccgccacagtgaaataaagcatcccaccctgcagtttcaaaaaa

SEQ ID NO: 366025 - DNA, 2413 bp, Homo sapiens
gctgcagcggcagcagctgtcgcgccagtcgcaacagaagcaggtccgaggcacagcccgatcccgccatggagcagccgaggaaggcggtggtagtgacgggatttggcccttttggggaacacaccgtgaacgccagttggattgcagttcagagatgggatctcactatattgccctggctggtcttgaacttccgggctcaaatgatccttccacctcggcctcccaaagaagctgggattataggtgtgagccaccgagccctgccatcaggagctagaaaagctaggccttggcgacagcgtggacctgcatgtgtacgagattccggttgagtaccaaacagtccagagactcatccccgccctgtgggagaagcacagtccacagctggtggtgcatgtgggggtgtcaggcatggcgaccacagtcacactggagaaatgtggacacaacaagggctacaaggggctggacaactgccgcttttgccccggctcccagtgctgcgtggaggacgggcctgaaagcattgactccatcatcgacatggatgctgtgtgcaagcgagtcaccacgttgggcctggatgtgtcggtgaccatctcgcaggatgccggcagagtcacggtcgatcagccttcgtccacgtgcccccactggggaagccgtacaacgcggaccagctgggcagggcactgagagccatcattgaggagatgttggacctcctggagcagtcagagggcaaaatcaactattgccacaaacactgagggacgctcaggtctcctaagacctcatcctgctggggaccccacgaggggacatccaccctctggggtgtggccaggaaaagacaagctcttcagcttggggatccgatctggatgacctgagtgagctgccaccgctggaggacatgggacaacccccggcggaggaggctgagcagcctggggccctggcccgagagttccttgctgccatggagcccgagcccgccccagccccggccccagaagagtggctggacattctggggaacgggctgttgaggaagaagacgctggtcccagggccgccaggttcgagccgcccggtcaagggccaggtggtcaccgtacatctgcagacgtcgctggagaatggcacacgggtgcaggaggagccggagctggtgttcactctgggtgactgtgacgtcatccaggccctggatctcagtgtcccactcatggacgtgggggagacggccatggtcactgctgactccaagtactgctacggcccccaaggcagcaggagcccatacatccccccgcacgcggccctgtgcctggaggtgaccctgaagacggctgtggacgggcctgacctggagatgctcacggggcaggagcgcgtggccctggccaaccggaagcgggagtgcggcaacgcccactaccagcgggcggacttcgtcctggccgccaactcctacgacctcgccatcaaggctatcacctccagcgccaaagtggacatgacgttcgaggaggaggcacagctcctgcagttgaaggtgaagtgtctgaacaacctggcggcctcgcagctgaagctcgaccactaccgcgcagccctgcgctcctgcagccttgtgctggagcaccagccagacaacatcaaggctctcttccgcaagggcaaggtgctggcccagcagggggagtacagtgaggccatccccatcctgagggcagccctgaagctggaaccttccaacaagacgatccacgcagagctctcaaagctggtgaagaagcatgcggcgcagcggagcacggagaccgccttgtaccggaaaatgctgggcaaccccagccggctgcctgctaagtgccctggcaagggtgcctggtccatcccatggaagtggctgtttggggcgactgctgttgccttggggggtgtggcactctctgtggtcatcgctgccaggaactgaccacctaggtggctgccaccccctctgcacaccatggaccctgccctgcgctccccaactcccccaggctccctgtccactgccctccctggtctggccccctcctccgggttaggggagcaaggattgggggtcgtgcagcccagccagcaggagggactgaggccctctaggaggaaagcccagagggagggggccctcattccttcagacccagttttcccccaccctccttaccccgctgggctaggtctccgccagggctggcctcagtttctcctcaacaggcctgggggcagcccttcccctgcctagtccccgcctgagtgccagccccccaccccgcctgccgccccctgtccaggttccctccccgccacagtgaaataaagcatcccaccctgcagtttcaaaaaa

SEQ ID NO: 366026 - DNA, 1866 bp, Homo sapiens
atgggcacggcaggcgcggggccaagcggccgaacctggttcccgaggcgcggcggccgcggctgggggcggggaggggggcgcaggaccccaagtgggggtcccggagccagagggccaattcctgtccccccagcagcatggcatcgtgtgctgaaccctctgagccctctgccccactgcccgccggggtcccaccgctcgaggacttcgaggtactggatggggttgaggatgcagagggtgaggaggaagaggaggaggaagaggaggaagaggatgacctgagtgagctgccaccgctggaggacatgggacaacccccggcggaggaggctgagcagcctggggccctggcccgagagttccttgctgccatggagcccgagcccgccccagccccggccccagaagagtggctggacattctggggaacgggctgttgaggaagaagacgctggtcccagggccgccaggttcgagccgcccggtcaagggccaggtggtcaccgtacatctgcagacgtcgctggagaatggcacacgggtgcaggaggagccggagctggtgttcactctgggtgactgtgacgtcatccaggccctggatctcagtgtcccactcatggacgtgggggagacggccatggtcactgctgactccaagtactgctacggcccccaaggcagcaggagcccatacatccccccgcacgcggccctgtgcctggaggtgaccctgaagacggctgtggacgggcctgacctggagatgctcacggggcaggagcgcgtggccctggccaaccggaagcgggagtgcggcaacgcccactaccagcgggcggacttcgtcctggccgccaactcctacgacctcgccatcaaggctatcacctccagcgccaaagtggacatgacgttcgaggaggaggcacagctcctgcagttgaaggtgaagtgtctgaacaacctggcggcctcgcagctgaagctcgaccactaccgcgcagccctgcgctcctgcagccttgtgctggagcaccagccagacaacatcaaggctctcttccgcaagggcaaggtgctggcccagcagggggagtacagtgaggccatccccatcctgagggcagccctgaagctggaaccttccaacaagacgatccacgcagagctctcaaagctggtgaagaagcatgcggcgcagcggagcacggagaccgccttgtaccggaaaatgctgggcaaccccagccggctgcctgctaagtgccctggcaagggtgcctggtccatcccatggaagtggctgtttggggcgactgctgttgccttggggggtgtggcactctctgtggtcatcgctgccaggaactgaccacctaggtggctgccaccccctctgcacaccatggaccctgccctgcgctccccaactcccccaggctccctgtccactgccctccctggtctggccccctcctccgggttaggggagcaaggattgggggtcgtgcagcccagccagcaggagggactgaggccctctaggaggaaagcccagagggagggggccctcattccttcagacccagttttcccccaccctccttaccccgctgggctaggtctccgccagggctggcctcagtttctcctcaacaggcctgggggcagcccttcccctgcctagtccccgcctgagtgccagccccccaccccgcctgccgccccctgtccaggttccctccccgccacagtgaaataaagtatacctccttgtgaaggaaatgctttttttacaaaatacttcggggggtgcccgattccccatacgccctataaagaagctttttacaaat

SEQ ID NO: 366027 - DNA, 1766 bp, Homo sapiens
  misc_feature (1703)..(1703): n is a, c, g, or t
atgggcacggcaggcgcggggccaagcggccgaacctggttcccgaggcgcggcggccgcggctgggggcggggaggggggcgcaggaccccaagtgggggtcccggagccagagggccaattcctgtccccccagcagcatggcatcgtgtgctgaaccctctgagccctctgccccactgcccgccggggtcccaccgctcgaggacttcgaggtactggatggggttgaggatgcagagggtgaggaggaagaggaggaggaagaggaggaagaggatgacctgagtgagctgccaccgctggaggacatgggacaacccccggcggaggaggctgagcagcctggggccctggcccgagagttccttgctgccatggagcccgagcccgccccagccccggccccagaagagtggctggacattctggggaacgggctgttgaggaagaagacgctggtcccagggccgccaggttcgagccgcccggtcaagggccaggtggtcaccgtacatctgcagacgtcgctggagaatggcacacgggtgcaggaggagccggagctggtgttcactctgggtgactgtgacgtcatccaggccctggatctcagtgtcccactcatggacgtgggggagacggccatggtcactgctgactccaagtactgctacggcccccaaggcagcaggagcccatacatccccccgcacgcggccctgtgcctggaggtgaccctgaagacggctgtggacgggcctgacctggagatgctcacggggcaggagcgcgtggccctggccaaccggaagcgggagtgcggcaacgcccactaccagcgggcggacttcgtcctggccgccaactcctacgacctcgccatcaaggctatcacctccagcgccaaagtggacatgacgttcgaggaggaggcacagctcctgcagttgaaggtgaagtgtctgaacaacctggcggcctcgcagctgaagctcgaccactaccgcgcagccctgcgctcctgcagccttgtgctggagcaccagccagacaacatcaaggctctcttccgcaagggcaaggtgctggcccagcagggggagtacagtgaggccatccccatcctgagggcagccctgaagctggaaccttccaacaagacgatccacgcagagctctcaaagctggtgaagaagcatgcggcgcagcggagcacggagaccgccttgtaccggaaaatgctgggcaaccccagccggctgcctgctaagtgccctggcaagggtgcctggtccatcccatggaagtggctgtttggggcgactgctgttgccttggggggtgtggcactctctgtggtcatcgctgccaggaactgaccacctaggtggctgccaccccctctgcacaccatggaccctgccctgcgctccccaactcccccaggctccctgtccactgccctccctggtctggccccctcctccgggttaggggagcaaggattgggggtcgtgcagcccagccagcaggagggactgaggccctctaggaggaaagcccagagggagggggccctcattccttcagacccagttttcccccaccctccttaccccgctgggctaggtctccgccagggctggcctcagtttctcctcaacaggcctgggggcagcccttcccctgccgctgatgcngccaaagtgcgatgttaggtctcggaggaatactcactgaaaaaaaggcggcagcgcacccgg

SEQ ID NO: 366028 - DNA, 1715 bp, Homo sapiens
atgggcacggcaggcgcggggccaagcggccgaacctggttcccgaggcgcggcggccgcggctgggggcggggaggggggcgcaggaccccaagtgggggtcccggagccagagggccaattcctgtccccccagcagcatggcatcgtgtgctgaaccctctgagccctctgccccactgcccgccggggtcccaccgctcgaggacttcgaggtactggatggggttgaggatgcagagggtgaggaggaagaggaggaggaagaggaggaagaggatgacctgagtgagctgccaccgctggaggacatgggacaacccccggcggaggaggctgagcagcctggggccctggcccgagagttccttgctgccatggagcccgagcccgccccagccccggccccagaagagtggctggacattctggggaacgggctgttgaggaagaagacgctggtcccagggccgccaggttcgagccgcccggtcaagggccaggtggtcaccgtacatctgcagacgtcgctggagaatggcacacgggtgcaggaggagccggagctggtgttcactctgggtgactgtgacgtcatccaggccctggatctcagtgtcccactcatggacgtgggggagacggccatggtcactgctgactccaagtactgctacggcccccaaggcagcaggagcccatacatccccccgcacgcggccctgtgcctggaggtgaccctgaagacggctgtggacgggcctgacctggagatgctcacggggcaggagcgcgtggccctggccaaccggaagcgggagtgcggcaacgcccactaccagcgggcggacttcgtcctggccgccaactcctacgacctcgccatcaaggctatcacctccagcgccaaagtggacatgacgttcgaggaggaggcacagctcctgcagttgaaggtgaagtgtctgaacaacctggcggcctcgcagctgaagctcgaccactaccgcgcagccctgcgctcctgcagccttgtgctggagcaccagccagacaacatcaaggctctcttccgcaagggcaaggtgctggcccagcagggggagtacagtgaggccatccccatcctgagggcagccctgaagctggaaccttccaacaagacgatccacgcagagctctcaaagctggtgaagaagcatgcggcgcagcggagcacggagaccgccttgtaccggaaaatgctgggcaaccccagccggctgcctgctaagtgccctggcaagggtgcctggtccatcccatggaagtggctgtttggggcgactgctgttgccttggggggtgtggcactctctgtggtcatcgctgccaggaactgaccacctaggtggctgccaccccctctgcacaccatggaccctgccctgcgctccccaactcccccaggctccctgtccactgccctccctggtctggccccctcctccgggttaggggagcaaggattgggggtcgtgcagcccagccagcaggagggactgaggccctctaggaggaaagcccagagggagggggccctcattccttcagacccagttttcccccactagtccccgcctgagtgccagccccccaccccgcctgccgccccctgtccaggttccctccccgccacagtgaaataaagcatcccaccctgcagtttcaaaaaa

SEQ ID NO: 366029 - DNA, 1628 bp, Homo sapiens
atgggcacggcaggcgcggggccaagcggccgaacctggttcccgaggcgcggcggccgcggctgggggcggggaggggggcgcaggaccccaagtgggggtcccggagccagagggccaattcctgtccccccagcagcatggcatcgtgtgctgaaccctctgagccctctgccccactgcccgccggggtcccaccgctcgaggacttcgaggtactggatggggttgaggatgcagagggtgaggaggaagaggaggaggaagaggaggaagaggatgacctgagtgagctgccaccgctggaggacatgggacaacccccggcggaggaggctgagcagcctggggccctggcccgagagttccttgctgccatggagcccgagcccgccccagccccggccccagaagagtggctggacattctggggaacgggctgttgaggaagaagacgctggtcccagggccgccaggttcgagccgcccggtcaagggccaggtggtcaccgtacatctgcagacgtcgctggagaatggcacacgggtgcaggaggagccggagctggtgttcactctgggtgactgtgacgtcatccaggccctggatctcagtgtcccactcatggacgtgggggagacggccatggtcactgctgactccaagtactgctacggcccccaaggcagcaggagcccatacatccccccgcacgcggccctgtgcctggaggtgaccctgaagacggctgtggacgggcctgacctggagatgctcacggggcaggagcgcgtggccctggccaaccggaagcgggagtgcggcaacgcccactaccagcgggcggacttcgtcctggccgccaactcctacgacctcgccatcaaggctatcacctccagcgccaaagtggacatgacgttcgaggaggaggcacagctcctgcagttgaaggtgaagtgtctgaacaacctggcggcctcgcagctgaagctcgaccactaccgcgcagccctgcgctcctgcagccttgtgctggagcaccagccagacaacatcaaggctctcttccgcaagggcaaggtgctggcccagcagggggagtacagtgaggccatccccatcctgagggcagccctgaagctggaaccttccaacaagacgatccacgcagagctctcaaagctggtgaagaagcatgcggcgcagcggagcacggagaccgccttgtaccggaaaatgctgggcaaccccagccggctgcctgctaagtgccctggcaagggtgcctggtccatcccatggaagtggctgtttggggcgactgctgttgccttggggggtgtggcactctctgtggtcatcgctgccaggaactgaccacctaggtggctgccaccccctctgcacaccatggaccctgccctgcgctccccaactcccccaggctccctgtccactgccctccctggtctggccccctcctccgggttaggggagcaaggattgggggtcgtgcagtagtccccgcctgagtgccagccccccaccccgcctgccgccccctgtccaggttccctccccgccacagtgaaataaagcatcccaccctgcagtttcaaaaaa

SEQ ID NO: 366030 - DNA, 1679 bp, Homo sapiens
atgggcacggcaggcgcggggccaagcggccgaacctggttcccgaggcgcggcggccgcggctgggggcggggaggggggcgcaggaccccaagtgggggtcccggagccagagggccaattcctgtccccccagcagcatggcatcgtgtgctgaaccctctgagccctctgccccactgcccgccggggtcccaccgctcgaggacttcgaggtactggatggggttgaggatgcagagggtgaggaggaagaggaggaggaagaggaggaagaggatgacctgagtgagctgccaccgctggaggacatgggacaacccccggcggaggaggctgagcagcctggggccctggcccgagagttccttgctgccatggagcccgagcccgccccagccccggccccagaagagtggctggacattctggggaacgggctgttgaggaagaagacgctggtcccagggccgccaggttcgagccgcccggtcaagggccaggtggtcaccgtacatctgcagacgtcgctggagaatggcacacgggtgcaggaggagccggagctggtgttcactctgggtgactgtgacgtcatccaggccctggatctcagtgtcccactcatggacgtgggggagacggccatggtcactgctgactccaagtactgctacggcccccaaggcagcaggagcccatacatccccccgcacgcggccctgtgcctggaggtgaccctgaagacggctgtggacgggcctgacctggagatgctcacggggcaggagcgcgtggccctggccaaccggaagcgggagtgcggcaacgcccactaccagcgggcggacttcgtcctggccgccaactcctacgacctcgccatcaaggctatcacctccagcgccaaagtggacatgacgttcgaggaggaggcacagctcctgcagttgaaggtgaagtgtctgaacaacctggcggcctcgcagctgaagctcgaccactaccgcgcagccctgcgctcctgcagccttgtgctggagcaccagccagacaacatcaaggctctcttccgcaagggcaaggtgctggcccagcagggggagtacagtgaggccatccccatcctgagggcagcccggctgcctgctaagtgccctggcaagggtgcctggtccatcccatggaagtggctgtttggggcgactgctgttgccttggggggtgtggcactctctgtggtcatcgctgccaggaactgaccacctaggtggctgccaccccctctgcacaccatggaccctgccctgcgctccccaactcccccaggctccctgtccactgccctccctggtctggccccctcctccgggttaggggagcaaggattgggggtcgtgcagcccagccagcaggagggactgaggccctctaggaggaaagcccagagggagggggccctcattccttcagacccagttttcccccaccctccttaccccgctgggctaggtctccgccagggctggcctcagtttctcctcaacaggcctgggggcagcccttcccctgcctagtccccgcctgagtgccagccccccaccccgcctgccgccccctgtccaggttccctccccgccacagtgaaataaagcatcccaccctgcagtttcaaaaaa

SEQ ID NO: 366031 - DNA, 1342 bp, Homo sapiens
atgggcacggcaggcgcggggccaagcggccgaacctggttcccgaggcgcggcggccgcggctgggggcggggaggggggcgcaggaccccaagtgggggtcccggagccagagggccaattcctgtccccccagcagcatggcatcgtgtgctgaaccctctgagccctctgccccactgcccgccggggtcccaccgctcgaggacttcgaggtactggatggggttgaggatgcagagggtgaggaggaagaggaggaggaagaggaggaagaggatgacctgagtgagctgccaccgctggaggacatgggacaacccccggcggaggaggctgagcagcctggggccctggcccgagagttccttgctgccatggagcccgagcccgccccagccccggccccagaagagtggctggacattctggggaacgggctgttgaggaagaagacgctggtcccagggccgccaggttcgagccgcccggtcaagggccaggtggtcaccgtacatctgcagacgtcgctggagaatggcacacgggtgcaggaggagccggagctggtgttcactctgggtgactgtgacgtcatccaggccctggatctcagtgtcccactcatggacgtgggggagacggccatggtcactgctgactccaagtactgctacggcccccaaggcagcaggagcccatacatccccccgcacgcggccctgtgcctggaggtgaccctgaagacggctgtggacgggcctgacctggagatgctcacggggcaggagcgcgtggccctggccaaccggaagcgggagtgcggcaacgcccactaccagcgggcggacttcgtcctggccgccaactcctacgacctcgccatcaaggctatcacctccagcgccaaagtggacatgacgttcgaggaggaggcacagctcctgcagttgaaggtgaagtgtctgaacaacctggcggcctcgcagctgaagctcgaccactaccgcgcagccctgcgctcctgcagccttgtgctggagcaccagccagacaacatcaaggctctcttccgcaagggcaaggtgctggcccagcagggggagtacagtgagagggggccctcattccttcagacccagttttcccccaccctccttaccccgctgggctaggtctccgccagggctggcctcagtttctcctcaacaggcctgggggcagcccttcccctgcctagtccccgcctgagtgccagccccccaccccgcctgccgccccctgtccaggttccctccccgccacagtgaaataaagcatcccaccctgcagtttcaaaaaa

SEQ ID NO: 366032 - DNA, 1197 bp, Homo sapiens
  misc_feature (1090)..(1090): n is a, c, g, or t
  misc_feature (1092)..(1092): n is a, c, g, or t
  misc_feature (1097)..(1097): n is a, c, g, or t
  misc_feature (1103)..(1103): n is a, c, g, or t
atgggcacggcaggcgcggggccaagcggccgaacctggttcccgaggcgcggcggccgcggctgggggcggggaggggggcgcaggaccccaagtgggggtcccggagccagagggccaattcctgtccccccagcagcatggcatcgtgtgctgaaccctctgagccctctgccccactgcccgccggggtcccaccgctcgaggacttcgaggtactggatggggttgaggatgcagagggtgaggaggaagaggaggaggaagaggaggaagaggatgacctgagtgagctgccaccgctggaggacatgggacaacccccggcggaggaggctgagcagcctggggccctggcccgagagttccttgctgccatggagcccgagcccgccccagccccggccccagaagagtggctggacattctggggaacgggctgttgaggaagaagacgctggtcccagggccgccaggttcgagccgcccggtcaagggccaggtggtcaccgtacatctgcagacgtcgctggagaatggcacacgggtgcaggaggagccggagctggtgttcactctgggtgactgtgacgtcatccaggccctggatctcagtgtcccactcatggacgtgggggagacggccatggtcactgctgactccaagtactgctacggcccccaaggcagcaggagcccatacatccccccgcacgcggccctgtgcctggaggtgaccctgaagacggctgtggacgggcctgacctggagatgctcacggggcaggagcgcgtggccctggccaaccggaagcgggagtgcggcaacgcccactaccagcgggcggacttcgtcctggccgccaactcctacgacctcgccatcaaggctatcacctccagcgccaaagtggacatgacgttcgaggaggaggcacagctcctgcagttgaaggtgaagtgtctgaacaacctggcggcctcgcagctgaagctcgaccactaccgcgcagccctgcgctcctgcagccttgtgctggagcaccagccagacaacatcaaggctctcttccgcaagggcaaggggantnggagncatccnatctggggagctgagttgacttaaaagaaacaccaagctcaagcgtagactgcagaaggactttcaattgacagggttcgaggcgtgcccagta

SEQ ID NO: 366033 - DNA, 693 bp, Homo sapiens
  misc_feature (23)..(23): n is a, c, g, or t
  misc_feature (36)..(36): n is a, c, g, or t
cgtaccccaaaggaggctattgnagggcagccctgnaagctggaaccttccaacaagacgatccacgcagagctctcaaagctggtgaagaagcatgcggcgcagcggagcacggagaccgccttgtaccggaaaatgctgggcaaccccagccggctgcctgctaagtgccctggcaagggtgcctggtccatcccatggaagtggctgtttggggcgactgctgttgccttggggggtgtggcactctctgtggtcatcgctgccaggaactgaccacctaggtggctgccaccccctctgcacaccatggaccctgccctgcgctccccaactcccccaggctccctgtccactgccctccctggtctggccccctcctccgggttaggggagcaaggattgggggtcgtgcagcccagccagcaggagggactgaggccctctaggaggaaagcccagagggagggggccctcattccttcagacccagttttcccccaccctccttaccccgctgggctaggtctccgccagggctggcctcagtttctcctcaacaggcctgggggcagcccttcccctgcctagtccccgcctgagtgccagccccccaccccgcctgccgccccctgtccaggttccctccccgccacagtgaaataaagcatcccaccctgcagtttcaaaaaa

SEQ ID NO: 366034 - DNA, 505 bp, Homo sapiens
atgggcacggcaggcgcggggccaagcggccgaacctggttcccgaggcgcggcggccgcggctgggggcggggaggggggcgcaggaccccaagtgggggtcccggagccagagggccaattcctgtccccccagcagcatggcatcgtgtgctgaaccctctgagccctctgccccactgcccgccggggtcccaccgctcgaggacttcgaggtactggatggggttgaggatgcagagggtgaggaggaagaggaggaggaagaggaggaagagagggggccctcattccttcagacccagttttcccccaccctccttaccccgctgggctaggtctccgccagggctggcctcagtttctcctcaacaggcctgggggcagcccttcccctgcctagtccccgcctgagtgccagccccccaccccgcctgccgccccctgtccaggttccctccccgccacagtgaaataaagcatcccaccctgcagtttcaaaaaa

SEQ ID NO: 366035 - DNA, 444 bp, Homo sapiens
cttagtctagctaaaagtttcttgaatatttttatcttttctaaaatcaactctattttattgatcttttctattgttttcttgtctctatttatttctgttctgatctttgttatatcttcccttctgctaactctggcttagtttgttctttttctagtttcacgaggtgtaacattaggctgtttatctagaacctaattttttttttaatgtaggcatttatcattataaacgtacctcttagaactgcttttgctgcatcctgtaagttctgtggtgttgtgtttccattttcgtttatctcatgtattagtccattttcacactgctgataaagacatacccgagactgggaagaaaaagaggtttaattggacttacagttctacgtgactggggaggcctcagaatcatggggagaggtaatagacacttcctaca

SEQ ID NO: 366036 - DNA, 392 bp, Homo sapiens
gattgcatgtttgtgtccccccctaaattcgcacattgaaatcctaacctccaatatcatggtattaggaggtggggcctttgggaggtaattagaccatgagggtggagtcctcttgaatgggattagcacctttgtaaaagagactccacagggctctctagccttctttctgccaggtgagaatacaatgagaagcctgcaacctggaagagggccctcaccagaacctgaccacactggcaccctgatctcaaactttggcctccagaacagagataaataaattcctatggtttataaaccacgcagtctatggctcttggttatagcagcctacactgactataacatataccaatcaaaactaattgtaggctgggtgtggtggc

SEQ ID NO: 366037 - DNA, 3325 bp, Homo sapiens
ccacagcgctgtagactgcgccgcattagaagcctggcctcctgatgctgtgctcttcatctagacccaagccccaggtcgtgggacgatttctcccgtttttgactccctggaactgtattgcctgctttacctgcgtacatgttgattctttctcatggcaaccccgcaggaaaccatcaagatctcattttacagctgggattctctggttcacagaggtaacggagcttgcccgaggccagttaaacgagaagattcatcaccgctttgatggctgcctcacaaacttcacaaactgttgcatctcacgttccttttgcagatttgtgttcaactttagaacgaatacagaaaagtaaaggacgtgcagaaaaaatcagacacttcagggaatttttagattcttggagaaaatttcatgatgctcttcataagaaccacaaagatgtcacagactctttttatccagcaatgagactaattcttcctcagctagaaagagagagaatggcctatggaattaaagaaactatgcttgctaagctttatattgagttgcttaatttacctagagatggaaaagatgccctcaaacttttaaactacagaacacccactggaactcatggagatgctggagactttgcaatgattgcatattttgtgttgaagccaagatgtttacagaaaggaagtttaaccatacagcaagtaaacgaccttttagactcaattgccagcaataattctgctaaaagaaaagacctaataaaaaagagccttcttcaacttataactcagagttcagcacttgagcaaaagtggcttatacggatgatcataaaggatttaaagcttggtgttagtcagcaaactatcttttctgtttttcataatgatgctgctgagttgcataatgtcactacagatctggaaaaagtctgtaggcaactgcatgatccttctgtaggactcagtgatatttctatcactttattttctgcatttaaaccaatgctagctgctattgcagatattgagcacattgagaaggatatgaaacatcagagtttctacatagaaaccaagctagatggtgaacgtatgcaaatgcacaaagatggagatgtatataaatacttctctcgaaatggatataactacactgatcagtttggtgcttctcctactgaaggttctcttaccccattcattcataatgcattcaaagcagatatacaaatctgtattcttgatggtgagatgatggcctataatcctaatacacaaactttcatgcaaaagggaactaagtttgatattaaaagaatggtagaggattctgatctgcaaacttgttattgtgtttttgatgtattgatggttaataataaaaagctagggcatgagactctgagaaagaggtatgagattcttagtagtatttttacaccaattccaggtagaatagaaatagtgcagaaaacacaagctcatactaagaatgaagtaattgatgcattgaatgaagcaatagataaaagagaagagggaattatggtaaaacaacctctatccatctacaagccagacaaaagaggtgaagggtggttaaaaattaaaccagagtatgtcagtggactaatggatgaattggacattttaattgttggaggatattggggtaaaggatcacggggtggaatgatgtctcattttctgtgtgcagtagcagagaagccccctcctggtgagaagccatctgtgtttcatactctctctcgtgttgggtctggctgcaccatgaaagaactgtatgatctgggtttgaaattggccaagtattggaagccttttcatagaaaagctccaccaagcagcattttatgtggaacagagaagccagaagtatacattgaaccttgtaattctgtcattgttcagattaaagcagcagagatcgtacccagtgatatgtataaaactggctgcaccttgcgttttccacgaattgaaaagataagagatgacaaggagtggcatgagtgcatgaccctggacgacctagaacaacttagggggaaggcatctggtaagctcgcatctaaacacctttatataggtggtgatgatgaaccacaagaaaaaaagcggaaagctgccccaaagatgaagaaagttattggaattattgagcacttaaaagcacctaaccttactaacgttaacaaaatttctaatatatttgaagatgtagagttttgtgttatgagtggaacagatagccagccaaagcctgacctggagaacagaattgcagaatttggtggttatatagtacaaaatccaggcccagacacgtactgtgtaattgcagggtctgagaacatcagagtgaaaaacataattttgtcaaataaacatgatgttgtcaagcctgcatggcttttagaatgttttaagaccaaaagctttgtaccatggcagcctcgctttatgattcatatgtgcccatcaaccaaagaacattttgcccgtgaatatgattgctatggtgatagttatttcattgatacagacttgaaccaactgaaggaagtattctcaggaattaaaaattctaacgagcagactcctgaagaaatggcttctctgattgctgatttagaatatcggtattcctgggattgctctcctctcagtatgtttcgacgccacaccgtttatttggactcgtatgctgttattaatgacctgagtaccaaaaatgaggggacaaggttagctattaaagccttggagcttcggtttcatggagcaaaagtagtttcttgtttagctgagggagtgtctcatgtaataattggggaagatcatagtcgtgttgcagattttaaagcttttagaagaacttttaagagaaagtttaaaatcctaaaagaaagttgggtaactgattcaatagacaagtgtgaattacaagaagaaaaccagtatttgatttaaagctaggtttcctagtgaggaaagcctctgatctggcagactcattgcagcaggtggtaatgataaaatactaaactacattttatttttgtatcttaaaaatctatgcctaaaaagtatcattacatataggaaaacaataattttaacttttaaggttgaaaagacaatagcccaaagccaagaaagaaaaattatcttgaatgtagtattcaatgattttttatgatcaaggtgaaataaacagtctaaagaagaggtgtttttataatatccatatagaaatctagaatttttacttagatactaataaaat

SEQ ID NO: 366038 - DNA, 3161 bp, Homo sapiens
tgcgcggcgagcagctggcggaaccggcatcttctggcgccagcttccggcttagcggctgagcttcaggcttgacgtcagttaaacgagaagattcatcaccgctttgatggctgcctcacaaacttcacaaactgttgcatctcacgttccttttgcagatttgtgttcaactttagaacgaatacagaaaagtaaaggacgtgcagaaaaaatcagacacttcagggaatttttagattcttggagaaaatttcatgatgctcttcataagaaccacaaagatgtcacagactctttttatccagcaatgagactaattcttcctcagctagaaagagagagaatggcctatggaattaaagaaactatgcttgctaagctttatattgagttgcttaatttacctagagatggaaaagatgccctcaaacttttaaactacagaacacccactggaactcatggagatgctggagactttgcaatgattgcatattttgtgttgaagccaagatgtttacagaaaggaagtttaaccatacagcaagtaaacgaccttttagactcaattgccagcaataattctgctaaaagaaaagacctaataaaaaagagccttcttcaacttataactcagagttcagcacttgagcaaaagtggcttatacggatgatcataaaggatttaaagcttggtgttagtcagcaaactatcttttctgtttttcataatgatgctgctgagttgcataatgtcactacagatctggaaaaagtctgtaggcaactgcatgatccttctgtaggactcagtgatatttctatcactttattttctgcatttaaaccaatgctagctgctattgcagatattgagcacattgagaaggatatgaaacatcagagtttctacatagaaaccaagctagatggtgaacgtatgcaaatgcacaaagatggagatgtatataaatacttctctcgaaatggatataactacactgatcagtttggtgcttctcctactgaaggttctcttaccccattcattcataatgcattcaaagcagatatacaaatctgtattcttgatggtgagatgatggcctataatcctaatacacaaactttcatgcaaaagggaactaagtttgatattaaaagaatggtagaggattctgatctgcaaacttgttattgtgtttttgatgtattgatggttaataataaaaagctagggcatgagactctgagaaagaggtatgagattcttagtagtatttttacaccaattccaggtagaatagaaatagtgcagaaaacacaagctcatactaagaatgaagtaattgatgcattgaatgaagcaatagataaaagagaagagggaattatggtaaaacaacctctatccatctacaagccagacaaaagaggtgaagggtggttaaaaattaaaccagagtatgtcagtggactaatggatgaattggacattttaattgttggaggatattggggtaaaggatcacggggtggaatgatgtctcattttctgtgtgcagtagcagagaagccccctcctggtgagaagccatctgtgtttcatactctctctcgtgttgggtctggctgcaccatgaaagaactgtatgatctgggtttgaaattggccaagtattggaagccttttcatagaaaagctccaccaagcagcattttatgtggaacagagaagccagaagtatacattgaaccttgtaattctgtcattgttcagattaaagcagcagagatcgtacccagtgatatgtataaaactggctgcaccttgcgttttccacgaattgaaaagataagagatgacaaggagtggcatgagtgcatgaccctggacgacctagaacaacttagggggaaggcatctggtaagctcgcatctaaacacctttatataggtggtgatgatgaaccacaagaaaaaaagcggaaagctgccccaaagatgaagaaagttattggaattattgagcacttaaaagcacctaaccttactaacgttaacaaaatttctaatatatttgaagatgtagagttttgtgttatgagtggaacagatagccagccaaagcctgacctggagaacagaattgcagaatttggtggttatatagtacaaaatccaggcccagacacgtactgtgtaattgcagggtctgagaacatcagagtgaaaaacataattttgtcaaataaacatgatgttgtcaagcctgcatggcttttagaatgttttaagaccaaaagctttgtaccatggcagcctcgctttatgattcatatgtgcccatcaaccaaagaacattttgcccgtgaatatgattgctatggtgatagttatttcattgatacagacttgaaccaactgaaggaagtattctcaggaattaaaaattctaacgagcagactcctgaagaaatggcttctctgattgctgatttagaatatcggtattcctgggattgctctcctctcagtatgtttcgacgccacaccgtttatttggactcgtatgctgttattaatgacctgagtaccaaaaatgaggggacaaggttagctattaaagccttggagcttcggtttcatggagcaaaagtagtttcttgtttagctgagggagtgtctcatgtaataattggggaagatcatagtcgtgttgcagattttaaagcttttagaagaacttttaagagaaagtttaaaatcctaaaagaaagttgggtaactgattcaatagacaagtgtgaattacaagaagaaaaccagtatttgatttaaagctaggtttcctagtgaggaaagcctctgatctggcagactcattgcagcaggtggtaatgataaaatactaaactacattttatttttgtatcttaaaaatctatgcctaaaaagtatcattacatataggaaaacaataattttaacttttaaggttgaaaagacaatagcccaaagccaagaaagaaaaattatcttgaatgtagtattcaatgattttttatgatcaaggtgaaataaacagtctaaagaagaggtgtttttataatatccatatagaaatctagaatttttacttagatactaataaaat

SEQ ID NO: 366039 - DNA, 3234 bp, Homo sapiens
tgcgcggcgagcagctggcggaaccggcatcttctggcgccagcttccggcttagcggctgagcttcaggcttgacgtcaggaaaccatcaagatctcattttacagctgggattctctggttcacagaggtaacggagcttgcccgaggccagttaaacgagaagattcatcaccgctttgatggctgcctcacaaacttcacaaactgttgcatctcacgttccttttgcagatttgtgttcaactttagaacgaatacagaaaagtaaaggacgtgcagaaaaaatcagacacttcagggaatttttagattcttggagaaaatttcatgatgctcttcataagaaccacaaagatgtcacagactctttttatccagcaatgagactaattcttcctcagctagaaagagagagaatggcctatggaattaaagaaactatgcttgctaagctttatattgagttgcttaatttacctagagatggaaaagatgccctcaaacttttaaactacagaacacccactggaactcatggagatgctggagactttgcaatgattgcatattttgtgttgaagccaagatgtttacagaaaggaagtttaaccatacagcaagtaaacgaccttttagactcaattgccagcaataattctgctaaaagaaaagacctaataaaaaagagccttcttcaacttataactcagagttcagcacttgagcaaaagtggcttatacggatgatcataaaggatttaaagcttggtgttagtcagcaaactatcttttctgtttttcataatgatgctgctgagttgcataatgtcactacagatctggaaaaagtctgtaggcaactgcatgatccttctgtaggactcagtgatatttctatcactttattttctgcatttaaaccaatgctagctgctattgcagatattgagcacattgagaaggatatgaaacatcagagtttctacatagaaaccaagctagatggtgaacgtatgcaaatgcacaaagatggagatgtatataaatacttctctcgaaatggatataactacactgatcagtttggtgcttctcctactgaaggttctcttaccccattcattcataatgcattcaaagcagatatacaaatctgtattcttgatggtgagatgatggcctataatcctaatacacaaactttcatgcaaaagggaactaagtttgatattaaaagaatggtagaggattctgatctgcaaacttgttattgtgtttttgatgtattgatggttaataataaaaagctagggcatgagactctgagaaagaggtatgagattcttagtagtatttttacaccaattccaggtagaatagaaatagtgcagaaaacacaagctcatactaagaatgaagtaattgatgcattgaatgaagcaatagataaaagagaagagggaattatggtaaaacaacctctatccatctacaagccagacaaaagaggtgaagggtggttaaaaattaaaccagagtatgtcagtggactaatggatgaattggacattttaattgttggaggatattggggtaaaggatcacggggtggaatgatgtctcattttctgtgtgcagtagcagagaagccccctcctggtgagaagccatctgtgtttcatactctctctcgtgttgggtctggctgcaccatgaaagaactgtatgatctgggtttgaaattggccaagtattggaagccttttcatagaaaagctccaccaagcagcattttatgtggaacagagaagccagaagtatacattgaaccttgtaattctgtcattgttcagattaaagcagcagagatcgtacccagtgatatgtataaaactggctgcaccttgcgttttccacgaattgaaaagataagagatgacaaggagtggcatgagtgcatgaccctggacgacctagaacaacttagggggaaggcatctggtaagctcgcatctaaacacctttatataggtggtgatgatgaaccacaagaaaaaaagcggaaagctgccccaaagatgaagaaagttattggaattattgagcacttaaaagcacctaaccttactaacgttaacaaaatttctaatatatttgaagatgtagagttttgtgttatgagtggaacagatagccagccaaagcctgacctggagaacagaattgcagaatttggtggttatatagtacaaaatccaggcccagacacgtactgtgtaattgcagggtctgagaacatcagagtgaaaaacataattttgtcaaataaacatgatgttgtcaagcctgcatggcttttagaatgttttaagaccaaaagctttgtaccatggcagcctcgctttatgattcatatgtgcccatcaaccaaagaacattttgcccgtgaatatgattgctatggtgatagttatttcattgatacagacttgaaccaactgaaggaagtattctcaggaattaaaaattctaacgagcagactcctgaagaaatggcttctctgattgctgatttagaatatcggtattcctgggattgctctcctctcagtatgtttcgacgccacaccgtttatttggactcgtatgctgttattaatgacctgagtaccaaaaatgaggggacaaggttagctattaaagccttggagcttcggtttcatggagcaaaagtagtttcttgtttagctgagggagtgtctcatgtaataattggggaagatcatagtcgtgttgcagattttaaagcttttagaagaacttttaagagaaagtttaaaatcctaaaagaaagttgggtaactgattcaatagacaagtgtgaattacaagaagaaaaccagtatttgatttaaagctaggtttcctagtgaggaaagcctctgatctggcagactcattgcagcaggtggtaatgataaaatactaaactacattttatttttgtatcttaaaaatctatgcctaaaaagtatcattacatataggaaaacaataattttaacttttaaggttgaaaagacaatagcccaaagccaagaaagaaaaattatcttgaatgtagtattcaatgattttttatgatcaaggtgaaataaacagtctaaagaagaggtgtttttataatatccatatagaaatctagaatttttacttagatactaataaaat

SEQ ID NO: 366040 - DNA, 3180 bp, Homo sapiens
tgcgcggcgagcagctggcggaaccggcatcttctggcgccagcttccggcttagcggctgagcttcaggcttgacgtcaggaaaccatcaagatctcattttacagctgggattctctggttcacagaggtaacggagcttgcccgaggccagttaaacgagaagattcatcaccgctttgatggctgcctcacaaacttcacaaactgttgcatctcacgttccttttgcagatttgtgttcaactttagaacgaatacagaaaagtaaaggacgtgcagaaaaaatcagacacttcagggaatttttagattcttggagaaaatttcatgatgctcttcataagaaccacaaagatgtcacagactctttttatccagcaatgagactaattcttcctcagctagaaagagagagaatggcctatggaattaaagaaactatgcttgctaagctttatattgagttgcttaatttacctagagatggaaaagatgccctcaaacttttaaactacagaacacccactggaactcatggagatgctggagactttgcaatgattgcatattttgtgttgaagccaagatgtttacagaaaggaagtttaaccatacagcaagtaaacgaccttttagactcaattgccagcaataattctgctaaaagaaaagacctaataaaaaagagccttcttcaacttataactcagagttcagcacttgagcaaaagtggcttatacggatgatcataaaggatttaaagcttggtgttagtcagcaaactatcttttctgtttttcataatgatgctgctgagttgcataatgtcactacagatctggacactttattttctgcatttaaaccaatgctagctgctattgcagatattgagcacattgagaaggatatgaaacatcagagtttctacatagaaaccaagctagatggtgaacgtatgcaaatgcacaaagatggagatgtatataaatacttctctcgaaatggatataactacactgatcagtttggtgcttctcctactgaaggttctcttaccccattcattcataatgcattcaaagcagatatacaaatctgtattcttgatggtgagatgatggcctataatcctaatacacaaactttcatgcaaaagggaactaagtttgatattaaaagaatggtagaggattctgatctgcaaacttgttattgtgtttttgatgtattgatggttaataataaaaagctagggcatgagactctgagaaagaggtatgagattcttagtagtatttttacaccaattccaggtagaatagaaatagtgcagaaaacacaagctcatactaagaatgaagtaattgatgcattgaatgaagcaatagataaaagagaagagggaattatggtaaaacaacctctatccatctacaagccagacaaaagaggtgaagggtggttaaaaattaaaccagagtatgtcagtggactaatggatgaattggacattttaattgttggaggatattggggtaaaggatcacggggtggaatgatgtctcattttctgtgtgcagtagcagagaagccccctcctggtgagaagccatctgtgtttcatactctctctcgtgttgggtctggctgcaccatgaaagaactgtatgatctgggtttgaaattggccaagtattggaagccttttcatagaaaagctccaccaagcagcattttatgtggaacagagaagccagaagtatacattgaaccttgtaattctgtcattgttcagattaaagcagcagagatcgtacccagtgatatgtataaaactggctgcaccttgcgttttccacgaattgaaaagataagagatgacaaggagtggcatgagtgcatgaccctggacgacctagaacaacttagggggaaggcatctggtaagctcgcatctaaacacctttatataggtggtgatgatgaaccacaagaaaaaaagcggaaagctgccccaaagatgaagaaagttattggaattattgagcacttaaaagcacctaaccttactaacgttaacaaaatttctaatatatttgaagatgtagagttttgtgttatgagtggaacagatagccagccaaagcctgacctggagaacagaattgcagaatttggtggttatatagtacaaaatccaggcccagacacgtactgtgtaattgcagggtctgagaacatcagagtgaaaaacataattttgtcaaataaacatgatgttgtcaagcctgcatggcttttagaatgttttaagaccaaaagctttgtaccatggcagcctcgctttatgattcatatgtgcccatcaaccaaagaacattttgcccgtgaatatgattgctatggtgatagttatttcattgatacagacttgaaccaactgaaggaagtattctcaggaattaaaaattctaacgagcagactcctgaagaaatggcttctctgattgctgatttagaatatcggtattcctgggattgctctcctctcagtatgtttcgacgccacaccgtttatttggactcgtatgctgttattaatgacctgagtaccaaaaatgaggggacaaggttagctattaaagccttggagcttcggtttcatggagcaaaagtagtttcttgtttagctgagggagtgtctcatgtaataattggggaagatcatagtcgtgttgcagattttaaagcttttagaagaacttttaagagaaagtttaaaatcctaaaagaaagttgggtaactgattcaatagacaagtgtgaattacaagaagaaaaccagtatttgatttaaagctaggtttcctagtgaggaaagcctctgatctggcagactcattgcagcaggtggtaatgataaaatactaaactacattttatttttgtatcttaaaaatctatgcctaaaaagtatcattacatataggaaaacaataattttaacttttaaggttgaaaagacaatagcccaaagccaagaaagaaaaattatcttgaatgtagtattcaatgattttttatgatcaaggtgaaataaacagtctaaagaagaggtgtttttataatatccatatagaaatctagaatttttacttagatactaataaaat

SEQ ID NO: 366041 - DNA, 367 bp, Homo sapiens
tttggcatttaatatcagtaaagaattctgacagtgttgttgcctttggctgtgaccatcatcaagggccattggattatataagactgcaactgcacataccaaattagcctgaaaactttaaagggatcttctcaagtagaagatgaatatatggctgtgtctgaaccatcctcagtgacaaaaaggcaaagctgagacttaatgtgattcaaaggtgttaatctagatgtcgcttacctgaactgatggggaatctgtaagaaaaaagatgctggccgggtgcaggggctcacacctgtaatcctagcactttgggaggccgaggcgggtgggtcacctgaggtcaggagcttaggaccagcct

SEQ ID NO: 366042 - DNA, 509 bp, Homo sapiens
aagtccagcataaagtgttgctatttccttctctgtcttgggttaggctgatcacttgctattagtttcaagcacaatattaatttccctttgctccttttaggaatgtagcagaaccgttccccacactattcttctgccttatgacagtcacaaccaccatttgagtaacatgcttctcagctgacctagcctgtgtccaggtccaggtccacaatggccacattcttaggaaatacgtggttcacatctcattcggaaaatacttccttcctaggagagatacgtggagaaggatctcctgaggcccatctcagcaggcaatgcagggctgagaggctggatggtgcaggagaaagggaacaggggttcaatgcaaacattcttgggctttaatccatgctttgcttgataaacagagacttcattttcttatgtgcaagtgagtataatactaccatcactgggctgggtgctgtggctaacgcctgtaatcccagcactttagg

SEQ ID NO: 366043 - DNA, 476 bp, Homo sapiens
atcactatcctccttggccccatgggacagggaaatctgcacatagaggtggtcaaaaatgccaaataccatggggcagatctacacatagaggtggtcaaaaatgccaaataccatggggcagatctacaatagcatgcaggagagcagcgaaaaaaaaggagccctgagccctgggggtgcttgtcagagccaacaggtatttgaaggaagaggcaacactgttctggggcaaggagtcaaagtgggattacttcctagtaacaactgtctcctgcaggctagcctcttccacctcctccttccaccacctctcacacttctgggctgtgggaaataacatcatttcttggctgtgatcttccaacatacctatcttaaactgcttggtttgggtgcccataggggagaaaaagtacctgaattcaactggtagggtctgttagcttacaagtaggataaaattcacagatgtg

SEQ ID NO: 366044 - DNA, 369 bp, Homo sapiens
ggcaatgactttgtattactttcacaaatttttaaaatttttcatcagctttctcaggtttaattagtatgattcagaacagtgttggccaggcacagtggctcaggcctgtaatcccagcactttgggaggctgaggcaagcggattacctgaggttaggagttcaagaccagcctggccaacatggtgaaaccacatctctactaaaaatacaaaacttagccaggagtggtggcaggtgcctgtaatccctgctacttgggaggctggggtaggagaatcacttgaacctgggaggcgaaggttgccatgagccgagatcacaccattgcactccagcctgggcaacaagagtaaaacttggtctc

SEQ ID NO: 366045 - DNA, 523 bp, Homo sapiens
ttcaccaccggaccgtggaacacaaagagcctggaagagtctatcactttcaactgaaaccgcaagaagaactaagtaggttaagccctaagaatgttcctaggtaacctacttgagttgaaatttgactaaaaatccttacaccctacctaagagaggtaacgcctattaggatcggaagtgattggaagctttgtttcagatctcgtcccaaaagggagaacggtcaatgacaaagctgctgtgaatagtattctgggggcgtggtggaaccccgattcactgctatctcccgaatcagcaacttgacagagccgcgcctcccgggccttggaagccttccattccgagctggctgggtgggactcaggttttacggtatgctggactttttccccgtgagttaaaacacatttatagtaactaagtggttaatgatgagaaaaaaccccaaactactgtactaataatcaacctctgctatttggtttgtaaaaaacaaaaatacatctataaaaaggga

SEQ ID NO: 366046 - DNA, 1354 bp, Homo sapiens
  misc_feature (107)..(107): n is a, c, g, or t
ccacgcgtcgcggacgcgtgggtcggacgcgtgggtggatgatttcctgggcgattgtggtcggataccgggtggctattgccgcgtgctctacgcgtcctcgattngtggtgcgtagagagacaaataccgatactttgcttgtttgatgagagcccggtttgaagaacataagaatgaaaaggatatggcgaaggccacccagctgctgaaggaggccgaggaagaattctggtaccgtcagcatccacagccatacatcttccctgactctcctgggggcacctcctatgagagatacgattgctacaaggtcccagaatggtgcttagatgactggcatccttctgagaaggcaatgtatcctgattactttgccaagagagaacagtggaagaaactgcggagggaaagctgggaacgagaggttaagcagctgcaggaggaaacgccacctggtggtcctttaactgaagctttgccccctgcccgaaaggaaggtgatttgcccccactgtggtggtatattgtgaccagaccccgggagcggcccatgtagaaagagagagacctcatctttcatgcttgcaagtgaaatatgttacagaacatgcacttgccctaataaaaaatcagtgaaatggtctctggtatgactgacgttcttctaagaattactgtgatgccaagtgactgtgccactgtcattgttttatcaatcgtgcatgtaaagaaaatgacaggacatgtagtcagtcagctgtgttctctgcaataaatcactgatagcatatgttaccagtaaggaaaaactgaggcagaaccagattgaggcgaacaaactctcaagtcaaaggcctaattagctgtggtaactagaaggaataaacaaagccaagaacagaaatactgaggatttaaaaataacctttttggttttctaaagatttcactaatggaacttagtttttattagaagaacaactctccctaagaagtacatagtcaacaaataagcatggaatttgtggagttctgtcaggggtggaggtttgatggttggggttaaatggtccaatctgggataaaactttgtggcgcttattttagaagcagttttccagctttgcttctgctaccgtagcttggattgtctgcggactcaaaggtaagggaataacagaactccttaaatgtttcagaagctttgtttttgttttttaaagataaagcagtttttaaaactttcaacccaaaacagctgcttttagttcttgatccctcattagctagaactgttttcaaatagtttcaggcaactaatgatcttatagccatcacaaaaatattttgt

SEQ ID NO: 366047 - DNA, 1435 bp, Homo sapiens
ccgccggcaactccgcccttccggctggccccgctcagtcacccgcagcaggcgtgcagtttcccggctctccgcgcggccggggaaggtcagcgccgtaatggcgttcttggcgtcgggaccctacctgacccatcagcaaaaggtgttgcggctttataagcgggcgctacgccacctcgagtcgtggtgcgtccagagagacaaataccgatactttgcttgtttgatgagagcccggtttgaagaacataagaatgaaaaggatatggcgaaggccacccagctgctgaaggaggccgaggaagaattctggtaccgtcagcatccacagccatacatcttccctgactctcctgggggcacctcctatgagagatacgattgctacaaggtcccagaatggtgcttagatgactggcatccttctgagaaggcaatgtatcctgattactttgccaagagagaacagtggaagaaactgcggagggaaagctgggaacgagaggttaagcagctgcaggaggaaacgccacctggtggtcctttaactgaagctttgccccctgcccgaaaggaaggtgatttgcccccactgtggtggtatattgtgaccagaccccgggagcggcccatgtagaaagagagagacctcatctttcatgcttgcaagtgaaatatgttacagaacatgcacttgccctaataaaaaatcagtgaaatggtctctggtatgactgacgttcttctaagaattactgtgatgccaagtgactgtgccactgtcattgttttatcaatcgtgcatgtaaagaaaatgacaggacatgtagtcagtcagctgtgttctctgcaataaatcactgatagcatatgttaccagtaaggaaaaactgaggcagaaccagattgaggcgaacaaactctcaagtcaaaggcctaattagctgtggtaactagaaggaataaacaaagccaagaacagaaatactgaggatttaaaaataacctttttggttttctaaagatttcactaatggaacttagtttttattagaagaacaactctccctaagaagtacatagtcaacaaataagcatggaatttgtggagttctgtcaggggtggaggtttgatggttggggttaaatggtccaatctgggataaaactttgtggcgcttattttagaagcagttttccagctttgcttctgctaccgtagcttggattgtctgcggactcaaaggtaagggaataacagaactccttaaatgtttcagaagctttgtttttgttttttaaagataaagcagtttttaaaactttcaacccaaaacagctgcttttagttcttgatccctcattagctagaactgttttcaaatagtttcaggcaactaatgatcttatagccatcacaaaaatattttgt

SEQ ID NO: 366048 - DNA, 803 bp, Homo sapiens
ccgccggcaactccgcccttccggctggccccgctcagtcacccgcagcaggcgtgcagtttcccggctctccgcgcggccggggaaggtcagcgccgtaatggcgttcttggcgtcgggaccctacctgacccatcagcaaaaggtgttgcggctttataagcgggcgctacgccacctcgagtcgtggtgcgtccagagagacaaataccgatactttgcttgtttgatgagagcccggtttgaagaacataagaatgaaaaggatatggcgaaggccacccagctgctgaaggaggccgaggaagaattctggtaccgtcagcatccacagccatacatcttccctgactctcctgggggcacctcctatgagagatacgattgctacaaggtcccagaatggtgcttagatgactggcatccttctgagaaggcaatgtatcctgattactttgccaagagagaacagtggaagaaactgcggagggaaagctgggaacgagaggttaagcagctgcaggaggaaacgccacctggtggtcctttaactgaagctttgccccctgcccgaaaggaaggtgatttgcccccactgtggtggtatattgtgaccagaccccgggagcggcccatgtagaaagagagagacctcatctttcatgcttgcaagtgaaatatgttacagaacatgcacttgccctaataaaaaatcagtgaaatggtaacaaaaaaaaaaaaaaaaaaaaaaacccggggcataaacggggcggaaaaggtaaaaagcatgtccaatgttcgcc

SEQ ID NO: 366049 - DNA, 881 bp, Homo sapiens
ccgccggcaactccgcccttccggctggccccgctcagtcacccgcagcaggcgtgcagtttcccggctctccgcgcggccggggaaggtcagcgccgtaatggcgttcttggcgtcgggaccctacctgacccatcagcaaaaggtgttgcggctttataagcgggcgctacgccacctcgagtcgtggtgcgtccagagagacaaataccgatactttgcttgtttgatgagagcccggtttgaagaacataagaatgaaaaggatatggcgaaggccacccagctgctgaaggaggccgaggaagaattctggtaccgtcagcatccacagccatacatcttccctgactctcctgggggcacctcctatgagagatacgattgctacaaggtcccagaatggtgcttagatgactggcatccttctgagaaggcaatgtatcctgattactttgccaagagagaacagtggaagaaactgcggagggaaagctgggaacgagaggttaagcagctgcaggaggaaacgccacctggtggtcctttaactgaagctttgccccctgcccgaaaggaaggtgatttgcccccactgtggtggtatattgtgaccagaccccgggagcggcccatgtagaaagagagagacctcatctttcatgcttgcaagtgaaatatgttacagaacatgcacttgccctaataaaaaatcagtgaaatggtcaaaaacaaaaaaggaaaaaaaaatggggggcgccggcccgaaatttctaaccatgtgggggggggccgaggtaggaatgcctaggggtcaggaacggctgacaggtggttcccaaaaaaccggggcgggttgaaacagggcggtcggctaaggc

SEQ ID NO: 366050 - DNA, 782 bp, Homo sapiens
ccgccggcaactccgcccttccggctggccccgctcagtcacccgcagcaggcgtgcagtttcccggctctccgcgcggccggggaaggtcagcgccgtaatggcgttcttggcgtcgggaccctacctgacccatcagcaaaaggtgttgcggctttataagcgggcgctacgccacctcgagtcgtggtgcgtccagagagacaaataccgatactttgcttgtttgatgagagcccggtttgaagaacataagaatgaaaaggatatggcgaaggccacccagctgctgaaggaggccgaggaagaattctggtaccgtcagcatccacagccatacatcttccctgactctcctgggggcacctcctatgagagatacgattgctacaaggtcccagaatggtgcttagatgactggcatccttctgagaaggcaatgtatcctgattactttgccaagagagaacagtggaagaaactgcggagggaaagctgggaacgagaggttaagcagctgcaggaggaaacgccacctggtggtcctttaactgaagctttgccccctgcccgaaaggaaggtgatttgcccccactgtggtggtatattgtgaccagaccccgggagcggcccatgtagaaagagagagacctcatctttcatgcttgcaagtgaaatatgttacagaacatgctggtgctgccgctggcgcatgtgggttgtatgccggtggccataagcccgagtgagaggagaagcagttgtcttcggttcacggtga

SEQ ID NO: 366051 - DNA, 680 bp, Homo sapiens
ccgccggcaactccgcccttccggctggccccgctcagtcacccgcagcaggcgtgcagtttcccggctctccgcgcggccggggaaggtcagcgccgtaatggcgttcttggcgtcgggaccctacctgacccatcagcaaaaggtgttgcggctttataagcgggcgctacgccacctcgagtcgtggtgcgtccagaggaacataagaatgaaaaggatatggcgaaggccacccagctgctgaaggaggccgaggaagaattctggtaccgtcagcatccacagccatacatcttccctgactctcctgggggcacctcctatgagagatacgattgctacaaggtcccagaatggtgcttagatgactggcatccttctgagaaggcaatgtatcctgattactttgccaagagagaacagtggaagaaactgcggagggaaagctgggaacgagaggttaagcagctgcaggaggaaacgccacctggtggtcctttaactgaagctttgccccctgcccgaaaggaaggtgatttgcccccactgtggtggtatattgtgaccagaccccgggagcggcccatgtagaaagagagagacctcatctttcatgcttgcaagtgaaatatgttacagaacatgcacttgccctaataaaaaatcagtgaaatggt

SEQ ID NO: 366052 - DNA, 664 bp, Homo sapiens
ccgccggcaactccgcccttccggctggccccgctcagtcacccgcagcaggcgtgcagtttcccggctctccgcgcggccggggaaggtcagcgccgtaatggcgttcttggcgtcgggaccctacctgacccatcagcaaaaggtgttgcggctttataagcgggcgctacgccacctcgagtcgtggtgcgtccagagagacaaataccgatactttgcttgtttgatgagagcccggtttgaaattctggtaccgtcagcatccacagccatacatcttccctgactctcctgggggcacctcctatgagagatacgattgctacaaggtcccagaatggtgcttagatgactggcatccttctgagaaggcaatgtatcctgattactttgccaagagagaacagtggaagaaactgcggagggaaagctgggaacgagaggttaagcagctgcaggaggaaacgccacctggtggtcctttaactgaagctttgccccctgcccgaaaggaaggtgatttgcccccactgtggtggtatattgtgaccagaccccgggagcggcccatgtagaaagagagagacctcatctttcatgcttgcaagtgaaatatgttacagaacatgcacttgccctaataaaaaatcagtgaaatggt

SEQ ID NO: 366053 - DNA, 699 bp, Homo sapiens
  misc_feature (527)..(527): n is a, c, g, or t
ccgccggcaactccgcccttccggctggccccgctcagtcacccgcagcaggcgtgcagtttcccggctctccgcgcggccggggaaggtcagcgccgtaatggcgttcttggcgtcgggaccctacctgacccatcagcaaaaggtgttgcggctttataagcgggcgctacgccacctcgagtcgtggtgcgtccagagagacaaataccgatactttgcttgtttgatgagagcccggtttgaagaacataagaatgaaaaggatatggcgaaggccacccagctgctgaaggaggccgaggaagaattctggtaccgtcagcatccacagccatacatcttccctgactctcctgggggcacctcctatgagagatacgattgctacaaggtcccagaatggtgcttagatgactggcatccttctgagaaggcaatgtatcctgattactttgccaagagagaacagtggaagaaactgcggagggaaagctgggaacgagagtaagcagccgcaggagganacgctgcatagtgatcccctatactcaagctttgacccctgcagcgtcgacctggtatattaatcgcccgatgaagatgccgttttcgaagcccccatcgctggcctttttggacaggtggtgtgtggtggccctggtatcgaaaacgcatcttcattcggggacgcccgag

SEQ ID NO: 366054 - DNA, 1321 bp, Homo sapiens
ccgccggcaactccgcccttccggctggccccgctcagtcacccgcagcaggcgtgcagtttcccggctctccgcgcggccggggaaggtcagcgccgtaatggcgttcttggcgtcgggaccctacctgacccatcagcaaaaggtgttgcggctttataagcgggcgctacgccacctcgagtcgtggtgcgtccagagagacaaataccgatactttgcttgtttgatgagagcccggtttgaagaacataagaatgaaaaggatatggcgaaggccacccagctgctgaaggaggccgaggaagaattctggtaccgtcagcatccacagccatacatcttccctgactctcctgggggcacctcctatgagagatacgattgctacaaggttaagcagctgcaggaggaaacgccacctggtggtcctttaactgaagctttgccccctgcccgaaaggaaggtgatttgcccccactgtggtggtatattgtgaccagaccccgggagcggcccatgtagaaagagagagacctcatctttcatgcttgcaagtgaaatatgttacagaacatgcacttgccctaataaaaaatcagtgaaatggtctctggtatgactgacgttcttctaagaattactgtgatgccaagtgactgtgccactgtcattgttttatcaatcgtgcatgtaaagaaaatgacaggacatgtagtcagtcagctgtgttctctgcaataaatcactgatagcatatgttaccagtaaggaaaaactgaggcagaaccagattgaggcgaacaaactctcaagtcaaaggcctaattagctgtggtaactagaaggaataaacaaagccaagaacagaaatactgaggatttaaaaataacctttttggttttctaaagatttcactaatggaacttagtttttattagaagaacaactctccctaagaagtacatagtcaacaaataagcatggaatttgtggagttctgtcaggggtggaggtttgatggttggggttaaatggtccaatctgggataaaactttgtggcgcttattttagaagcagttttccagctttgcttctgctaccgtagcttggattgtctgcggactcaaaggtaagggaataacagaactccttaaatgtttcagaagctttgtttttgttttttaaagataaagcagtttttaaaactttcaacccaaaacagctgcttttagttcttgatccctcattagctagaactgttttcaaatagtttcaggcaactaatgatcttatagccatcacaaaaatattttgt

SEQ ID NO: 366055 - DNA, 352 bp, Homo sapiens
ctgtcagacagcaacactgaccacgtgagtaggtaacatttctaatcttcaaaatcattttggtttaagagacaaataccgatactttgcttgtttgatgagagcccggtttgaagaacataagaatgaaaaggatatggcgaaggccacccagctgctgaaggaggccgaggaagaattctggtaccgtcagcatccacagccatacatcttccctgactctcctgggggcacctcctatgagagatacgattgctacaaggtaggtgagaattatgatgactgccttctgagaaatagactttgtttcttcagtcccacacctcagcctcagaaatcacttgcccttcaa

SEQ ID NO: 366056 - DNA, 726 bp, Homo sapiens
ccgccggcaactccgcccttccggctggccccgctcagtcacccgcagcaggcgtgcagtttcccggctctccgcgcggccggggaaggtcagcgccgtaatggcgttcttggcgtcgggaccctacctgacccatcagcaaaaggtgttgcggctttataagcgggcgctacgccacctcgagtcgtggtgcgtccagagagacaaataccgatactttgcttgtttgatgagagcccggtttgaagaacataagaatgaaaaggatatggcgaaggccacccagctgctgaaggaggccgaggaagaattctggtaccgtcagcatccacagccatacatcttccctgactctcctgggggcacctcctatgagagatacgattgctacaaggtcccagaatggtgcttagatgactggcatccttctgagaaggcaatgtatcctgattactttgccaagagagaacagtggaagaaactgcggagggaaagctgggaacgagaggttaagcagctgcaggaggaaacgccacctggtggtcctttaactgaagctttgccccctgcccgaaaggaaggtgatttgcccccactgtggtggtatattgtgaccagaccccgggagcggcccatgtagaaagagagagacctcatctttcatgcttgcaagtgaaatatgttacagaacatgcacttgccctaataaaaaatcagtgaaatggt

SEQ ID NO: 366057 - DNA, 645 bp, Homo sapiens
  misc_feature (107)..(107): n is a, c, g, or t
ccacgcgtcgcggacgcgtgggtcggacgcgtgggtggatgatttcctgggcgattgtggtcggataccgggtggctattgccgcgtgctctacgcgtcctcgattngtggtgcgtagagagacaaataccgatactttgcttgtttgatgagagcccggtttgaagaacataagaatgaaaaggatatggcgaaggccacccagctgctgaaggaggccgaggaagaattctggtaccgtcagcatccacagccatacatcttccctgactctcctgggggcacctcctatgagagatacgattgctacaaggtcccagaatggtgcttagatgactggcatccttctgagaaggcaatgtatcctgattactttgccaagagagaacagtggaagaaactgcggagggaaagctgggaacgagaggttaagcagctgcaggaggaaacgccacctggtggtcctttaactgaagctttgccccctgcccgaaaggaaggtgatttgcccccactgtggtggtatattgtgaccagaccccgggagcggcccatgtagaaagagagagacctcatctttcatgcttgcaagtgaaatatgttacagaacatgcacttgccctaataaaaaatcagtgaaatggt

SEQ ID NO: 366058 - DNA, 1040 bp, Homo sapiens
ccgccggcaactccgcccttccggctggccccgctcagtcacccgcagcaggcgtgcagtttcccggctctccgcgcggccggggaaggtcagcgccgtaatggcgttcttggcgtcgggaccctacctgacccatcagcaaaaggtgttgcggctttataagcgggcgctacgccacctcgagtcgtggtgcgtccagagagacaaataccgatactttgcttgtttgatgagagcccggtttgaagaacataagaatgaaaaggatatggcgaaggccacccagctgctgaaggaggccgaggaagaattctggtaccgtcagcatccacagccatacatcttccctgactctcctgggggcacctcctatgagagatacgattgctacaaggtcccagaatggtgcttagatgactggcatccttctgagaaggcaatgtatcctgattactttgccaagagagaacagtggaagaaactgcggagggaaagctgggaacgagaggttaagcagctgcaggaggaaacgccacctggtggtcctttaactgaagctttgccccctgcccgaaaggaaggtgatttgcccccactgtggtggtatattgtgaccagaccccgggagcggcccatgtagaaagagagagacctcatctttcatgcttgcaagtgaaatatgttacagaacatgcacttgccctaataaaaaatcagtgaaatggtaacaaaaaaaaaaaaaaaaaaaaaaaaaaaaaaaaaaaaaaaaaaaacgaagaaagaacacacaccgggggggggaacaagagggcgacaggagggcgcgcggcggcggcacggggctccagacacgcgcagcgcgcacaaccgtcagcgcgcagaacacaacgcgaggagaacaacaccgacgcggcaacactccccccggaaatgcccaccaccagtgataacacgcagccaaagaaaccgagccccatacaccaagacatcaccacaactgtccgcacaagccgcacaagagaacgaaccaccatcccccc

SEQ ID NO: 366059 - DNA, 673 bp, Homo sapiens
ccgccggcaactccgcccttccggctggccccgctcagtcacccgcagcaggcgtgcagtttcccggctctccgcgcggccggggaaggtcagcgccgtaatggcgttcttggcgtcgggaccctacctgacccatcagcaaaaggtgttgcggctttataagcgggcgctacgccacctcgagtcgtggtgcgtccagagagacaaataccgatactttgcttgtttgatgagagcccggtttgaagaacataagaatgaaaaggatatggcgaaggccacccagctgctgaaggaggccgaggaagaattctggtaccgtcagcatccacagccatacatcttccctgactctcctgggggcacctcctatgagagatacgattgctacaaggtcccagaatggtgcttagatgactggcatccttctgagaaggcaatgtatcctgattactttgccaagagagaacagtggaagaaactgcggagggaaagctgggaacgagaggttaagcagctgcaggaggaaacgccacctggtggtcctttaactgaagctttgccccctgcccgaaaggaaggtgatttgcccccactgtggtggtatattgtgaccagaccccgggagcggcccatgtactcaggtagcgaccacagggatactctagagcgc

SEQ ID NO: 366060 - DNA, 508 bp, Homo sapiens
tgtattggtggtgctctctcttggcaatgtatcctgattactttgccaagagagaacagtggaagaaactgctgaaggaggccgaggaagaattctggtaccgtcagcatccacagccatacatcttccctgactctcctgggggcacctcctatgagagatacgattgctacaaggtcccagaatggtgcttagatgactggcatccttctgagaaggcaatgtatcctgattactttgccaagagagaacagtggaagaaactgcggagggaaagctgggaacgagaggttaagcagctgcaggaggaaacgccacctggtggtcctttaactgaagctttgccccctgcccgaaaggaaggtgatttgcccccactgtggtggtatattgtgaccagaccccgggagcggcccatgtagaaagagagagacctcatctttcatgcttgcaagtgaaatatgttacagaacatgcacttgccctaataaaaaatcagtgaaatggt

SEQ ID NO: 366061 - DNA, 508 bp, Homo sapiens
caacacagtgaaatccagtctctactaaaaatacaaaaattagttgggcatggtggcaggtgcctgtaatcccagctcttgggatgctgagattctggtaccgtcagcatccacagccatacatcttccctgactctcctgggggcacctcctatgagagatacgattgctacaaggtcccagaatggtgcttagatgactggcatccttctgagaaggcaatgtatcctgattactttgccaagagagaacagtggaagaaactgcggagggaaagctgggaacgagaggttaagcagctgcaggaggaaacgccacctggtggtcctttaactgaagctttgccccctgcccgaaaggaaggtgatttgcccccactgtggtggtatattgtgaccagaccccgggagcggcccatgtagaaagagagagacctcatctttcatgcttgcaagtgaaatatgttacagaacatgcacttgccctaataaaaaatcagtgaaatggt

SEQ ID NO: 366062 - DNA, 495 bp, Homo sapiens
ccgccggcaactccgcccttccggctggccccgctcagtcacccgcagcaggcgtgcagtttcccggctctccgcgcggccggggaaggtcagcgccgtaatggcgttcttggcgtcgggaccctacctgacccatcagcaaaaggtgttgcggctttataagcgggcgctacgccacctcgagtcgtggtgcgtccagagagacaaataccgatactttgcttgtttgatgagagcccggtttgaaaaactgcggagggaaagctgggaacgagaggttaagcagctgcaggaggaaacgccacctggtggtcctttaactgaagctttgccccctgcccgaaaggaaggtgatttgcccccactgtggtggtatattgtgaccagaccccgggagcggcccatgtagaaagagagagacctcatctttcatgcttgcaagtgaaatatgttacagaacatgcacttgccctaataaaaaatcagtgaaatggt

SEQ ID NO: 366063 - DNA, 752 bp, Homo sapiens
ggacttcgggccctctgtgagcctctgtccgccaaggcgatggagctgtgtttggagtccctcgtctttggcagcggctggggccaaagcccgggcaagaccaacgccttcggcacccggactcaggctccgtcctctctgccagcgtgcggctacaatgactcgacatggcaggccactgccttcagagaaggtgacagagggccatgtctgaaacattctcccacaaccaggaaccctcagcagccgctgaagaggaaaggcagttaaatggaaagacttctgagcaagtggaggaaaagtcacgtgtgacctagggaggggctcccacaggaaggggcaatgcccttgccctgttcacctagcctccaggtggctccccacttgaaatttcagaggatggcagaaacctacttacaaggaaatgaaagagggcacagcaaccttaagaccagagcagcccacgatattttttaatgagggcaaaaatagaagacttgcaaaagacccctgaaaataatgcctggaagctgcgaaacatcagactgacaccgcacaaaagaggtccagctgagcaggagaaaagcttgagaagcatccagaacaatgtaggtggagaggctaagaagaaagaggagcccacatggaatgaataaccaaggtcgggacagaggaaggttcgccagaactgggagggctgaaattggacattgagataaattaaagagtgttctttaaaactgtcaaaactt

SEQ ID NO: 366064 - DNA, 823 bp, Homo sapiens
ggacttcgggccctctgtgagcctctgtccgccaaggcgatggagctgtgtttggagtccctcgtctttggcagcggctggggccaaagcccgggcaagaccaacgccttcggcacccggactcaggctccgtcctctctgccagcgtgcggctacaatgactcgacatggcaggtgggcaagcacagcacgccccaacagacatgctttatttaatatgtactaaaaatacagcaggcctgtgaaacccacaggtgcaattgcttaaaatgaggctaaggtagacgtgtgaatggttaataatgagttgattaaaatattcagaaatcatctactggagacgggcaaactgcaaaatggtagcatgggagcaactgatgttcgagaaagcccaggctccggcaagccgtgggtttgaatttacacatgcgcacataatgggtatgaataaacctttcttcaaaaaaaccagatcaagtcaaggcagttatttgctgtgggcaggtgccaaggctggctgcttcagtccccacgcgagtcgcccccgagcctgcttctgcagcccagcctggaaagtgcaaggcacttggaaaggagccacgcccaacgccctgtaccagcggcctcccggacaccaacagcgtcctctgcgcctgctgcagcttgtcccttagtcctccctggacagagggcgtgaagttggctgcgccaacaggacgcggcccgctcacttcggggctcattgtcctggacacacagtcagggctggacgcctccagcagccccacgcttcaccccaaggtccgcaaacctgacaacttcg

SEQ ID NO: 366065 - DNA, 460 bp, Homo sapiens
agtaggggtcccaagtttttattttcctttcacatttctattttgcttttctatgatctgctgctgtaagcttccctatagcacattcccagttgaaatttcagaggatggcagaaacctacttacaaggaaatgaaagagggcacagcaaccttaagaccagagcagcccacgatattttttaatgagggcaaaaatagaagacttgcaaaagacccctgaaaataatgcctggaagctgcgaaacatcagactgacaccgcacaaaagaggtccagctgagcaggagaaaagcttgagaagcatccagaacaatgtaggtggagaggctaagaagaaagaggagcccacatggaatgaataaccaaggtcgggacagaggaaggttcgccagaactgggagggctgaaattggacattgagataaattaaagagtgttctttaaaactgtcaaaactt

SEQ ID NO: 366066 - DNA, 1061 bp, Homo sapiens
ttcttctgcccctactcccggctgtccgcttcctccccagccccctcctgtgagctctgggagctacagaataaggacactccttggccccaagccagccccagcttgctcgggagcctgggtttccccctccgtccccatcaccgcgagggtctgtgcatgggaatctgctccagaggctccctcaggcgccgcgccgcggggatacgcctttcaccgccccagcaattggagcgctgagtcgaagtcctgattccacgataggcggatgaagccctaacgctgaaattctttcctctaggtctttggcagcggctggggccaaagcccgggcaagaccaacgccttcggcacccggactcaggctccgtcctctctgccagcgtgcggctacaatgactcgacatggcaggtgggcaagcacagcacgccccaacagacatgctttatttaatatgtactaaaaatacagcaggcctgtgaaacccacaggtgcaattgcttaaaatgaggctaaggtagacgtgtgaatggttaataatgagttgattaaaatattcagaaatcatctactggagacgggcaaactgcaaaatggtagcatgggagcaactgatgttcgagaaagcccaggctccggcaagccgtgggtttgaatttacacatgcgcacataatgggtatgaataaacctttcttcaaaaaaaccagatcaagtcaaggcagttatttgctgtgggcaggtgccaaggctggctgcttcagtccccacgcgagtcgcccccgagcctgcttctgcagcccagcctggaaagtgcaaggcacttggaaaggagccacgcccaacgccctgtaccagcggcctcccggacaccaacagcgtcctctgcgcctgctgcagcttgtcccttagtcctccctggacagagggcgtgaagttggctgcgccaacaggacgcggcccgctcacttcggggctcattgtcctggacacacagtcagggctggacgcctccagcagccccacgcttcaccccaaggtccgcaaacctgacaacttcg

SEQ ID NO: 366067 - DNA, 811 bp, Homo sapiens
gggagagggaatgagtgtgagctcgtgagtgggcgccgccgccaccgcccccgccgccgtcgtctcggtagcagccttcgccacgccggggtcttcagctccactggggccatgtcagagcgagaagagcggcggtttgtggagatccctcgggagtctgtccggctcatggcggagagcacgggcctggagctgagcgatgaggtggcggcgctgctcgcagaggacgtgtgctatcgtctgagagaggccacgcagaatagctctcagttcatgaagcacaccaaacgccggaagctgacggttgaggacttcaacagggccctcagatggagcagcgtggaggctgtgtgtggttacggatcacaggaggcactgcccatgcgccccgccagggagggtgaactctactttcctgaggatcgagaggtgaacctggtggagctggccctggctaccaacatccccaaaggctgtgctgagacagctgtcagagttcatgtctcctacctggatggcaaagggaacctggcacctcaaggatcgggtaaggggtgatgtaggaaacaggctctttggatgaattttctcccttaggttctgagggtggtgcctatgtgcccccgagtctgcgtctaacatgtgtttacccatgcctgccttgtgccatggtctgagtgggcgctgggctctgcatggagggctcagagttggagatgggggcccagacctgtaactagtcataatgcagcatgttggatgctaagacagaagtctgggcagcatgctggggcggtgtttcacccccagg

SEQ ID NO: 366068 - DNA, 249 bp, Homo sapiens
gtctttgagactgtttatttcctcgttactattgtggtggtaaaaaaaataaaatatgcttattaaacgtgtgttaaaacaatacacacctactcgcaaacgtagcaagagaggttgctttaagaagcgggaatcttcagcgtcacgtgaccgccggtctctacagtctgttcacactggccaatcaagagccaggaagcctcctggagggccggaaactttccaaggcgcccgccgactggctgtatt

SEQ ID NO: 366069 - DNA, 2513 bp, Homo sapiens
gggagagggaatgagtgtgagctcgtgagtgggcgccgccgccaccgcccccgccgccgtcgtctcggtagcagccttcgccacgccggggtcttcagctccactggggccatgtcagagcgagaagagcggcggtttgtggagatccctcgggagtctgtccggctcatggcggagagcacgggcctggagctgagcgatgaggtggcggcgctgctcgcagaggacgtgtgctatcgtctgagagaggccacgcagaatagctctcagttcatgaagcacaccaaacgccggaagctgacggttgaggacttcaacagggccctcagatggagcagcgtggaggctgtgtgtggttacggatcacaggaggcactgcccatgcgccccgccagggagggtgaactctactttcctgaggatcgagaggtgaacctggtggagctggccctggctaccaacatccccaaaggctgtgctgagacagctgtcagagttcatgtctcctacctggatggcaaagggaacctggcacctcaaggatcggtgcccagtgctgtgtcttcactgacagatgaccttctcaagtactatcaccaggtgactcgtgctgtgctaggggatgatccgcaactgatgaaggttgcactccaggacttgcagacgaactccaagattggggcactcctgccttactttgtttatgtggtcagtggggtgaaatctgtaagccatgacctggagcaactgcaccggctgctgcaggtggcacggagcctatttcgtaatccgcacctgtgcttggggccctatgtccgctgtctggtgggcagtgtcctctactgtgtcctggagccactggctgcctccatcaaccccctgaatgaccactggactctgcgggatggggctgccctcctgctcagccacatcttctggtagccactgggcctaaacctgcgggtgggattgctgcagagccaagtgggttggggtaaggaaatggggcgaagcctctggctttgagagtctatgagaagatggggaaccttttccctaggagcgtcctagctggtgtgctgtgacacactgggattctgaaaatggattacaaatacgccaaggtattggttcttcagccctcaggtcctaggccagtcacccctggcagccttcttcacttaaccccagcactcccgagtgtgctgtacagatgctattctctttgtgttgtcttgtgccctgttgggtggcaccatgcctcattcccctccctaactgaatggtgctcccacaggactcatggggaccttgtaagtggcctctatcagcatatcctgctatccctgcagaagatcctggcagatcctgtgcggccgctctgctgccactatggagccgtggtggggctgcatgctcttggctggaaggcagtagaacgagtcctgtacccacacctgtccacctactggacaaacttgcaggctgtgctggatgattattcagtatctaatgcccaggtcaaagcagatggacacaaagtctatggagccattctggtgagtaccgtccccttccagcctcccttccctgcatgagcttagcagccaagcaggcttactttggaatatttgatgggcccaggttcctcgaattttttgcctatcttagtccttggctcttacaggtggcggtagagcgactgctgaagatgaaggcccaggcagcagagcccaacaggggtggcccaggtggcagggggtgccggcgcctggacgacctgccatgggacagccttctctttcaagagtcgtcctccgggggcggtgcagaacccagctttgggtccggcctcccgctgccgccagggggcgcggggccggaggacccttctctttcggtgaccctggccgacatctaccgggagctctacgccttcttcggtgacagcttggccacacgctttggcaccggccagcctgcacccacggctccgcggccgcccggggacaagaaggagccggcggcagccccggactcggtgcggaagatgccgcagctgacggcaagcgccatagtcagcccgcacggcgacgagagcccccggggcagcggcggaggcggccccgcgtcggcctctgggcccgccgcctctgagagcaggcccttgccgcgcgtgcatcgggcgcgcggggcaccccggcagcagggccccgggaccggcacccgcgacgttttccagaagagccgtttcgccccgcgcggcgccccgcactttcgtttcatcatagccgggcggcaggctgggaggcgctgccgcgggcgccttttccagactgccttccccgcgccgtacgggcctagcccggcctcgcgctacgtgcagaaactgcccatgatcggccgtaccagccgccccgcccgccggtgggcgctctcggactactcgctgtacttgccgctctgagtcagtggccccttcgttccttgtaaataaatcccgcccccggaaa

SEQ ID NO: 366070 - DNA, 2073 bp, Homo sapiens
catcaatatggtgacctcccgggagcgggggaccaccaggttgcctaaggaggggtgaaccggcccaggtcggaaacggagcaggtcaaaactcccgtgctgatcagtgcccagtgctgtgtcttcactgacagatgaccttctcaagtactatcaccaggtgactcgtgctgtgctaggggatgatccgcaactgatgaaggttgcactccaggacttgcagacgaactccaagattggggcactcctgccttactttgtttatgtggtcagtggggtgaaatctgtaagccatgacctggagcaactgcaccggctgctgcaggtggcacggagcctatttcgtaatccgcacctgtgcttggggccctatgtccgctgtctggtgggcagtgtcctctactgtgtcctggagccactggctgcctccatcaaccccctgaatgaccactggactctgcgggatggggctgccctcctgctcagccacatcttctggtagccactgggcctaaacctgcgggtgggattgctgcagagccaagtgggttggggtaaggaaatggggcgaagcctctggctttgagagtctatgagaagatggggaaccttttccctaggagcgtcctagctggtgtgctgtgacacactgggattctgaaaatggattacaaatacgccaaggtattggttcttcagccctcaggtcctaggccagtcacccctggcagccttcttcacttaaccccagcactcccgagtgtgctgtacagatgctattctctttgtgttgtcttgtgccctgttgggtggcaccatgcctcattcccctccctaactgaatggtgctcccacaggactcatggggaccttgtaagtggcctctatcagcatatcctgctatccctgcagaagatcctggcagatcctgtgcggccgctctgctgccactatggagccgtggtggggctgcatgctcttggctggaaggcagtagaacgagtcctgtacccacacctgtccacctactggacaaacttgcaggctgtgctggatgattattcagtatctaatgcccaggtcaaagcagatggacacaaagtctatggagccattctggtgagtaccgtccccttccagcctcccttccctgcatgagcttagcagccaagcaggcttactttggaatatttgatgggcccaggttcctcgaattttttgcctatcttagtccttggctcttacaggtggcggtagagcgactgctgaagatgaaggcccaggcagcagagcccaacaggggtggcccaggtggcagggggtgccggcgcctggacgacctgccatgggacagccttctctttcaagagtcgtcctccgggggcggtgcagaacccagctttgggtccggcctcccgctgccgccagggggcgcggggccggaggacccttctctttcggtgaccctggccgacatctaccgggagctctacgccttcttcggtgacagcttggccacacgctttggcaccggccagcctgcacccacggctccgcggccgcccggggacaagaaggagccggcggcagccccggactcggtgcggaagatgccgcagctgacggcaagcgccatagtcagcccgcacggcgacgagagcccccggggcagcggcggaggcggccccgcgtcggcctctgggcccgccgcctctgagagcaggcccttgccgcgcgtgcatcgggcgcgcggggcaccccggcagcagggccccgggaccggcacccgcgacgttttccagaagagccgtttcgccccgcgcggcgccccgcactttcgtttcatcatagccgggcggcaggctgggaggcgctgccgcgggcgccttttccagactgccttccccgcgccgtacgggcctagcccggcctcgcgctacgtgcagaaactgcccatgatcggccgtaccagccgccccgcccgccggtgggcgctctcggactactcgctgtacttgccgctctgagtcagtggccccttcgttccttgtaaataaatcccgcccccggaaa

SEQ ID NO: 366071 - DNA, 2148 bp, Homo sapiens
tgtgcagagcctagatggtcagggctgagcaggctctaagagcagtctcttgccctggttgtcctgtcagaaaggcttcttgtggatgtgtgtggggatggtggttgagggggaggaggctggagaggccaggagagggccagctctccacctgtccctgcttcctgcctgtcctctggcagtgcccagtgctgtgtcttcactgacagatgaccttctcaagtactatcaccaggtgactcgtgctgtgctaggggatgatccgcaactgatgaaggttgcactccaggacttgcagacgaactccaagattggggcactcctgccttactttgtttatgtggtcagtggggtgaaatctgtaagccatgacctggagcaactgcaccggctgctgcaggtggcacggagcctatttcgtaatccgcacctgtgcttggggccctatgtccgctgtctggtgggcagtgtcctctactgtgtcctggagccactggctgcctccatcaaccccctgaatgaccactggactctgcgggatggggctgccctcctgctcagccacatcttctggtagccactgggcctaaacctgcgggtgggattgctgcagagccaagtgggttggggtaaggaaatggggcgaagcctctggctttgagagtctatgagaagatggggaaccttttccctaggagcgtcctagctggtgtgctgtgacacactgggattctgaaaatggattacaaatacgccaaggtattggttcttcagccctcaggtcctaggccagtcacccctggcagccttcttcacttaaccccagcactcccgagtgtgctgtacagatgctattctctttgtgttgtcttgtgccctgttgggtggcaccatgcctcattcccctccctaactgaatggtgctcccacaggactcatggggaccttgtaagtggcctctatcagcatatcctgctatccctgcagaagatcctggcagatcctgtgcggccgctctgctgccactatggagccgtggtggggctgcatgctcttggctggaaggcagtagaacgagtcctgtacccacacctgtccacctactggacaaacttgcaggctgtgctggatgattattcagtatctaatgcccaggtcaaagcagatggacacaaagtctatggagccattctggtgagtaccgtccccttccagcctcccttccctgcatgagcttagcagccaagcaggcttactttggaatatttgatgggcccaggttcctcgaattttttgcctatcttagtccttggctcttacaggtggcggtagagcgactgctgaagatgaaggcccaggcagcagagcccaacaggggtggcccaggtggcagggggtgccggcgcctggacgacctgccatgggacagccttctctttcaagagtcgtcctccgggggcggtgcagaacccagctttgggtccggcctcccgctgccgccagggggcgcggggccggaggacccttctctttcggtgaccctggccgacatctaccgggagctctacgccttcttcggtgacagcttggccacacgctttggcaccggccagcctgcacccacggctccgcggccgcccggggacaagaaggagccggcggcagccccggactcggtgcggaagatgccgcagctgacggcaagcgccatagtcagcccgcacggcgacgagagcccccggggcagcggcggaggcggccccgcgtcggcctctgggcccgccgcctctgagagcaggcccttgccgcgcgtgcatcgggcgcgcggggcaccccggcagcagggccccgggaccggcacccgcgacgttttccagaagagccgtttcgccccgcgcggcgccccgcactttcgtttcatcatagccgggcggcaggctgggaggcgctgccgcgggcgccttttccagactgccttccccgcgccgtacgggcctagcccggcctcgcgctacgtgcagaaactgcccatgatcggccgtaccagccgccccgcccgccggtgggcgctctcggactactcgctgtacttgccgctctgagtcagtggccccttcgttccttgtaaataaatcccgcccccggaaa

SEQ ID NO: 366072 - DNA, 2041 bp, Homo sapiens
aatgagtttctgtaggttacatttatagaaatagaattgctagatcaaagaatatgaacattaaaattgtaaaacatgaataaggtgatacactgtcttccagaagaataccgcattcatgttttacaattttctggtggatccaatgcagtctgggcccttccttttaggttgcactccaggacttgcagacgaactccaagattggggcactcctgccttactttgtttatgtggtcagtggggtgaaatctgtaagccatgacctggagcaactgcaccggctgctgcaggtggcacggagcctatttcgtaatccgcacctgtgcttggggccctatgtccgctgtctggtgggcagtgtcctctactgtgtcctggagccactggctgcctccatcaaccccctgaatgaccactggactctgcgggatggggctgccctcctgctcagccacatcttctggtagccactgggcctaaacctgcgggtgggattgctgcagagccaagtgggttggggtaaggaaatggggcgaagcctctggctttgagagtctatgagaagatggggaaccttttccctaggagcgtcctagctggtgtgctgtgacacactgggattctgaaaatggattacaaatacgccaaggtattggttcttcagccctcaggtcctaggccagtcacccctggcagccttcttcacttaaccccagcactcccgagtgtgctgtacagatgctattctctttgtgttgtcttgtgccctgttgggtggcaccatgcctcattcccctccctaactgaatggtgctcccacaggactcatggggaccttgtaagtggcctctatcagcatatcctgctatccctgcagaagatcctggcagatcctgtgcggccgctctgctgccactatggagccgtggtggggctgcatgctcttggctggaaggcagtagaacgagtcctgtacccacacctgtccacctactggacaaacttgcaggctgtgctggatgattattcagtatctaatgcccaggtcaaagcagatggacacaaagtctatggagccattctggtgagtaccgtccccttccagcctcccttccctgcatgagcttagcagccaagcaggcttactttggaatatttgatgggcccaggttcctcgaattttttgcctatcttagtccttggctcttacaggtggcggtagagcgactgctgaagatgaaggcccaggcagcagagcccaacaggggtggcccaggtggcagggggtgccggcgcctggacgacctgccatgggacagccttctctttcaagagtcgtcctccgggggcggtgcagaacccagctttgggtccggcctcccgctgccgccagggggcgcggggccggaggacccttctctttcggtgaccctggccgacatctaccgggagctctacgccttcttcggtgacagcttggccacacgctttggcaccggccagcctgcacccacggctccgcggccgcccggggacaagaaggagccggcggcagccccggactcggtgcggaagatgccgcagctgacggcaagcgccatagtcagcccgcacggcgacgagagcccccggggcagcggcggaggcggccccgcgtcggcctctgggcccgccgcctctgagagcaggcccttgccgcgcgtgcatcgggcgcgcggggcaccccggcagcagggccccgggaccggcacccgcgacgttttccagaagagccgtttcgccccgcgcggcgccccgcactttcgtttcatcatagccgggcggcaggctgggaggcgctgccgcgggcgccttttccagactgccttccccgcgccgtacgggcctagcccggcctcgcgctacgtgcagaaactgcccatgatcggccgtaccagccgccccgcccgccggtgggcgctctcggactactcgctgtacttgccgctctgagtcagtggccccttcgttccttgtaaataaatcccgcccccggaaa

SEQ ID NO: 366073 - DNA, 1789 bp, Homo sapiens
tgtgcagagcctagatggtcagggctgagcaggctctaagagcagtctcttgccctggttgtcctgtcagaaaggcttcttgtggatgtgtgtggggatggtggttgagggggaggaggctggagaggccaggagagggccagctctccacctgtccctgcttcctgcctgtcctctggcagtgcccagtgctgtgtcttcactgacagatgaccttctcaagtactatcaccaggtgactcgtgctgtgctaggggatgatccgcaactgatgaaggttgcactccaggacttgcagacgaactccaagattggggcactcctgccttactttgtttatgtggtcagtggggtgaaatctgtaagccatgacctggagcaactgcaccggctgctgcaggtggcacggagcctatttcgtaatccgcacctgtgcttggggccctatgtccgctgtctggtgggcagtgtcctctactgtgtcctggagccactggctgcctccatcaaccccctgaatgaccactggactctgcgggatggggctgccctcctgctcagccacatcttctggactcatggggaccttgtaagtggcctctatcagcatatcctgctatccctgcagaagatcctggcagatcctgtgcggccgctctgctgccactatggagccgtggtggggctgcatgctcttggctggaaggcagtagaacgagtcctgtacccacacctgtccacctactggacaaacttgcaggctgtgctggatgattattcagtatctaatgcccaggtcaaagcagatggacacaaagtctatggagccattctggtgagtaccgtccccttccagcctcccttccctgcatgagcttagcagccaagcaggcttactttggaatatttgatgggcccaggttcctcgaattttttgcctatcttagtccttggctcttacaggtggcggtagagcgactgctgaagatgaaggcccaggcagcagagcccaacaggggtggcccaggtggcagggggtgccggcgcctggacgacctgccatgggacagccttctctttcaagagtcgtcctccgggggcggtgcagaacccagctttgggtccggcctcccgctgccgccagggggcgcggggccggaggacccttctctttcggtgaccctggccgacatctaccgggagctctacgccttcttcggtgacagcttggccacacgctttggcaccggccagcctgcacccacggctccgcggccgcccggggacaagaaggagccggcggcagccccggactcggtgcggaagatgccgcagctgacggcaagcgccatagtcagcccgcacggcgacgagagcccccggggcagcggcggaggcggccccgcgtcggcctctgggcccgccgcctctgagagcaggcccttgccgcgcgtgcatcgggcgcgcggggcaccccggcagcagggccccgggaccggcacccgcgacgttttccagaagagccgtttcgccccgcgcggcgccccgcactttcgtttcatcatagccgggcggcaggctgggaggcgctgccgcgggcgccttttccagactgccttccccgcgccgtacgggcctagcccggcctcgcgctacgtgcagaaactgcccatgatcggccgtaccagccgccccgcccgccggtgggcgctctcggactactcgctgtacttgccgctctgagtcagtggccccttcgttccttgtaaataaatcccgcccccggaaa

SEQ ID NO: 366074 - DNA, 1917 bp, Homo sapiens
gatcccaatggcagccgtggtggggctgcatgctcttggctggaaggttgcactccaggacttgcagacgaactccaagattggggcactcctgccttactttgtttatgtggtcagtggggtgaaatctgtaagccatgacctggagcaactgcaccggctgctgcaggtggcacggagcctatttcgtaatccgcacctgtgcttggggccctatgtccgctgtctggtgggcagtgtcctctactgtgtcctggagccactggctgcctccatcaaccccctgaatgaccactggactctgcgggatggggctgccctcctgctcagccacatcttctggtagccactgggcctaaacctgcgggtgggattgctgcagagccaagtgggttggggtaaggaaatggggcgaagcctctggctttgagagtctatgagaagatggggaaccttttccctaggagcgtcctagctggtgtgctgtgacacactgggattctgaaaatggattacaaatacgccaaggtattggttcttcagccctcaggtcctaggccagtcacccctggcagccttcttcacttaaccccagcactcccgagtgtgctgtacagatgctattctctttgtgttgtcttgtgccctgttgggtggcaccatgcctcattcccctccctaactgaatggtgctcccacaggactcatggggaccttgtaagtggcctctatcagcatatcctgctatccctgcagaagatcctggcagatcctgtgcggccgctctgctgccactatggagccgtggtggggctgcatgctcttggctggaaggcagtagaacgagtcctgtacccacacctgtccacctactggacaaacttgcaggctgtgctggatgattattcagtatctaatgcccaggtcaaagcagatggacacaaagtctatggagccattctggtgagtaccgtccccttccagcctcccttccctgcatgagcttagcagccaagcaggcttactttggaatatttgatgggcccaggttcctcgaattttttgcctatcttagtccttggctcttacaggtggcggtagagcgactgctgaagatgaaggcccaggcagcagagcccaacaggggtggcccaggtggcagggggtgccggcgcctggacgacctgccatgggacagccttctctttcaagagtcgtcctccgggggcggtgcagaacccagctttgggtccggcctcccgctgccgccagggggcgcggggccggaggacccttctctttcggtgaccctggccgacatctaccgggagctctacgccttcttcggtgacagcttggccacacgctttggcaccggccagcctgcacccacggctccgcggccgcccggggacaagaaggagccggcggcagccccggactcggtgcggaagatgccgcagctgacggcaagcgccatagtcagcccgcacggcgacgagagcccccggggcagcggcggaggcggccccgcgtcggcctctgggcccgccgcctctgagagcaggcccttgccgcgcgtgcatcgggcgcgcggggcaccccggcagcagggccccgggaccggcacccgcgacgttttccagaagagccgtttcgccccgcgcggcgccccgcactttcgtttcatcatagccgggcggcaggctgggaggcgctgccgcgggcgccttttccagactgccttccccgcgccgtacgggcctagcccggcctcgcgctacgtgcagaaactgcccatgatcggccgtaccagccgccccgcccgccggtgggcgctctcggactactcgctgtacttgccgctctgagtcagtggccccttcgttccttgtaaataaatcccgcccccggaaa

SEQ ID NO: 366075 - DNA, 1029 bp, Homo sapiens
  misc_feature (336)..(336): n is a, c, g, or t
gggagagggaatgagtgtgagctcgtgagtgggcgccgccgccaccgcccccgccgccgtcgtctcggtagcagccttcgccacgccggggtcttcagctccactggggccatgtcagagcgagaagagcggcggtttgtggagatccctcgggagtctgtccggctcatggcggagagcacgggcctggagctgagcgatgaggtggcggcgctgctcgcagaggacgtgtgctatcgtctgagagaggccacgcagaatagctctcagttcatgaagcacaccaaacgccggaagctgacggttgagaaccatgtcagagcgagaagagcggcngtttgtggagatccctcgggagtctgtccggcctcccgctgccgccagggggcgcggggccggaggacccttctctttcggtgaccctggccgacatctaccgggagctctacgccttcttcggtgacagcttggccacacgctttggcaccggccagcctgcacccacggctccgcggccgcccggggacaagaaggagccggcggcagccccggactcggtgcggaagatgccgcagctgacggcaagcgccatagtcagcccgcacggcgacgagagcccccggggcagcggcggaggcggccccgcgtcggcctctgggcccgccgcctctgagagcaggcccttgccgcgcgtgcatcgggcgcgcggggcaccccggcagcagggccccgggaccggcacccgcgacgttttccagaagagccgtttcgccccgcgcggcgccccgcactttcgtttcatcatagccgggcggcaggctgggaggcgctgccgcgggcgccttttccagactgccttccccgcgccgtacgggcctagcccggcctcgcgctacgtgcagaaactgcccatgatcggccgtaccagccgccccgcccgccggtgggcgctctcggactactcgctgtacttgccgctctgagtcagtggccccttcgttccttgtaaataaatcccgcccccggaaa

SEQ ID NO: 366076 - DNA, 447 bp, Homo sapiens
cgctgtctttgagactgtttatttcctcgttactattgtggtggtaaaaaaaataaaatatgcttattaaacgtgtgttaaaacaatacacacctactcgcaaacgtagcaagagaggttgctttaagaagcgggaatcttcagcgtcacgtgaccgccggtctctacagtctgttcacactggccaatcaagagccaggaagcctcctggagggccggaaactttccaaggcgcccgccgactggctgtattggggagggcggggccggggccccgggagagggaatgagtgtgagctcgtgagtgggcgccgccgccaccgcccccgccgccgtcgtctcggtagcagccttcgccacgccggggtcttcaggtgagcaggccttgctctggtccaaggactccccattcccgacgccgactgcttactcaccagtcttggagcc

SEQ ID NO: 366077 - DNA, 2026 bp, Homo sapiens
gggagagggaatgagtgtgagctcgtgagtgggcgccgccgccaccgcccccgccgccgtcgtctcggtagcagccttcgccacgccggggtcttcagctccactggggccatgtcagagcgagaagagcggcggtttgtggagatccctcgggagtctgtccggctcatggcggagagcacgggcctggagctgagcgatgaggtggcggcgctgctcgcagaggacgtgtgctatcgtctgagagaggccacgcagaatagctctcagttcatgaagcacaccaaacgccggaagctgacggttgaggacttcaacagggccctcagatggagcagcgtggaggctgtgtgtggttacggatcacaggaggcactgcccatgcgccccgccagggagggtgaactctactttcctgaggatcgagaggtgaacctggtggagctggccctggctaccaacatccccaaaggctgtgctgagacagctgtcagagttcatgtctcctacctggatggcaaagggaacctggcacctcaaggatcggtgcccagtgctgtgtcttcactgacagatgaccttctcaagtactatcaccaggtgactcgtgctgtgctaggggatgatccgcaactgatgaaggttgcactccaggacttgcagacgaactccaagattggggcactcctgccttactttgtttatgtggtcagtggggtgaaatctgtaagccatgacctggagcaactgcaccggctgctgcaggtggcacggagcctatttcgtaatccgcacctgtgcttggggccctatgtccgctgtctggtgggcagtgtcctctactgtgtcctggagccactggctgcctccatcaaccccctgaatgaccactggactctgcgggatggggctgccctcctgctcagccacatcttctggactcatggggaccttgtaagtggcctctatcagcatatcctgctatccctgcagaagatcctggcagatcctgtgcggccgctctgctgccactatggagccgtggtggggctgcatgctcttggctggaaggcagtagaacgagtcctgtacccacacctgtccacctactggacaaacttgcaggctgtgctggatgattattcagtatctaatgcccaggtcaaagcagatggacacaaagtctatggagccattctggtggcggtagagcgactgctgaagatgaaggcccaggcagcagagcccaacaggggtggcccaggtggcagggggtgccggcgcctggacgacctgccatgggacagccttctctttcaagagtcgtcctccgggggcggtgcagaacccagctttgggtccggcctcccgctgccgccagggggcgcggggccggaggacccttctctttcggtgaccctggccgacatctaccgggagctctacgccttcttcggtgacagcttggccacacgctttggcaccggccagcctgcacccacggctccgcggccgcccggggacaagaaggagccggcggcagccccggactcggtgcggaagatgccgcagctgacggcaagcgccatagtcagcccgcacggcgacgagagcccccggggcagcggcggaggcggccccgcgtcggcctctgggcccgccgcctctgagagcaggcccttgccgcgcgtgcatcgggcgcgcggggcaccccggcagcagggccccgggaccggcacccgcgacgttttccagaagagccgtttcgccccgcgcggcgccccgcactttcgtttcatcatagccgggcggcaggctgggaggcgctgccgcgggcgccttttccagactgccttccccgcgccgtacgggcctagcccggcctcgcgctacgtgcagaaactgcccatgatcggccgtaccagccgccccgcccgccggtgggcgctctcggactactcgctgtacttgccgctctgagtcagtggccccttcgttccttgtaaataaatcccgcccccggaaa

SEQ ID NO: 366078 - DNA, 2154 bp, Homo sapiens
gggagagggaatgagtgtgagctcgtgagtgggcgccgccgccaccgcccccgccgccgtcgtctcggtagcagccttcgccacgccggggtcttcagctccactggggccatgtcagagcgagaagagcggcggtttgtggagatccctcgggagtctgtccggctcatggcggagagcacgggcctggagctgagcgatgaggtggcggcgctgctcgcagaggacgtgtgctatcgtctgagagaggccacgcagaatagctctcagttcatgaagcacaccaaacgccggaagctgacggttgaggacttcaacagggccctcagatggagcagcgtggaggctgtgtgtggttacggatcacaggaggcactgcccatgcgccccgccagggagggtgaactctactttcctgaggatcgagaggtgaacctggtggagctggccctggctaccaacatccccaaaggctgtgctgagacagctgtcagagttcatgtctcctacctggatggcaaagggaacctggcacctcaaggatcggtgcccagtgctgtgtcttcactgacagatgaccttctcaagtactatcaccaggtgactcgtgctgtgctaggggatgatccgcaactgatgaaggttgcactccaggacttgcagacgaactccaagattggggcactcctgccttactttgtttatgtggtcagtggggtgaaatctgtaagccatgacctggagcaactgcaccggctgctgcaggtggcacggagcctatttcgtaatccgcacctgtgcttggggccctatgtccgctgtctggtgggcagtgtcctctactgtgtcctggagccactggctgcctccatcaaccccctgaatgaccactggactctgcgggatggggctgccctcctgctcagccacatcttctggactcatggggaccttgtaagtggcctctatcagcatatcctgctatccctgcagaagatcctggcagatcctgtgcggccgctctgctgccactatggagccgtggtggggctgcatgctcttggctggaaggcagtagaacgagtcctgtacccacacctgtccacctactggacaaacttgcaggctgtgctggatgattattcagtatctaatgcccaggtcaaagcagatggacacaaagtctatggagccattctggtgagtaccgtccccttccagcctcccttccctgcatgagcttagcagccaagcaggcttactttggaatatttgatgggcccaggttcctcgaattttttgcctatcttagtccttggctcttacaggtggcggtagagcgactgctgaagatgaaggcccaggcagcagagcccaacaggggtggcccaggtggcagggggtgccggcgcctggacgacctgccatgggacagccttctctttcaagagtcgtcctccgggggcggtgcagaacccagctttgggtccggcctcccgctgccgccagggggcgcggggccggaggacccttctctttcggtgaccctggccgacatctaccgggagctctacgccttcttcggtgacagcttggccacacgctttggcaccggccagcctgcacccacggctccgcggccgcccggggacaagaaggagccggcggcagccccggactcggtgcggaagatgccgcagctgacggcaagcgccatagtcagcccgcacggcgacgagagcccccggggcagcggcggaggcggccccgcgtcggcctctgggcccgccgcctctgagagcaggcccttgccgcgcgtgcatcgggcgcgcggggcaccccggcagcagggccccgggaccggcacccgcgacgttttccagaagagccgtttcgccccgcgcggcgccccgcactttcgtttcatcatagccgggcggcaggctgggaggcgctgccgcgggcgccttttccagactgccttccccgcgccgtacgggcctagcccggcctcgcgctacgtgcagaaactgcccatgatcggccgtaccagccgccccgcccgccggtgggcgctctcggactactcgctgtacttgccgctctgagtcagtggccccttcgttccttgtaaataaatcccgcccccggaaa

SEQ ID NO: 366079 - DNA, 1682 bp, Homo sapiens
aatgagtttctgtaggttacatttatagaaatagaattgctagatcaaagaatatgaacattaaaattgtaaaacatgaataaggtgatacactgtcttccagaagaataccgcattcatgttttacaattttctggtggatccaatgcagtctgggcccttccttttaggttgcactccaggacttgcagacgaactccaagattggggcactcctgccttactttgtttatgtggtcagtggggtgaaatctgtaagccatgacctggagcaactgcaccggctgctgcaggtggcacggagcctatttcgtaatccgcacctgtgcttggggccctatgtccgctgtctggtgggcagtgtcctctactgtgtcctggagccactggctgcctccatcaaccccctgaatgaccactggactctgcgggatggggctgccctcctgctcagccacatcttctggactcatggggaccttgtaagtggcctctatcagcatatcctgctatccctgcagaagatcctggcagatcctgtgcggccgctctgctgccactatggagccgtggtggggctgcatgctcttggctggaaggcagtagaacgagtcctgtacccacacctgtccacctactggacaaacttgcaggctgtgctggatgattattcagtatctaatgcccaggtcaaagcagatggacacaaagtctatggagccattctggtgagtaccgtccccttccagcctcccttccctgcatgagcttagcagccaagcaggcttactttggaatatttgatgggcccaggttcctcgaattttttgcctatcttagtccttggctcttacaggtggcggtagagcgactgctgaagatgaaggcccaggcagcagagcccaacaggggtggcccaggtggcagggggtgccggcgcctggacgacctgccatgggacagccttctctttcaagagtcgtcctccgggggcggtgcagaacccagctttgggtccggcctcccgctgccgccagggggcgcggggccggaggacccttctctttcggtgaccctggccgacatctaccgggagctctacgccttcttcggtgacagcttggccacacgctttggcaccggccagcctgcacccacggctccgcggccgcccggggacaagaaggagccggcggcagccccggactcggtgcggaagatgccgcagctgacggcaagcgccatagtcagcccgcacggcgacgagagcccccggggcagcggcggaggcggccccgcgtcggcctctgggcccgccgcctctgagagcaggcccttgccgcgcgtgcatcgggcgcgcggggcaccccggcagcagggccccgggaccggcacccgcgacgttttccagaagagccgtttcgccccgcgcggcgccccgcactttcgtttcatcatagccgggcggcaggctgggaggcgctgccgcgggcgccttttccagactgccttccccgcgccgtacgggcctagcccggcctcgcgctacgtgcagaaactgcccatgatcggccgtaccagccgccccgcccgccggtgggcgctctcggactactcgctgtacttgccgctctgagtcagtggccccttcgttccttgtaaataaatcccgcccccggaaa

SEQ ID NO: 366080 - DNA, 5720 bp, Homo sapiens
acgtcagagtttcctgcccaccatctttgtccctggcaaagtgggttttgcgcagtggcttagacctagaaaagaatcgtgacgggcaggaaaccattacaccaccacctgggctgtgctctccggctcccgccgccacccccgccctcgccttcgcctccgcctccggtgcacattaaagatccaaagtcatgactgactccaagtatttcacaaccaataaaaaaggagaaatatttgaactaaaagctgaactcaacaatgaaaagaaagaaaagagaaaggaggctgtgaagaaagtgattgctgctatgaccgtggggaaggatgttagttctctctttccagacgtagtgaactgtatgcagactgacaatctggaactaaagaagcttgtgtatctctacttgatgaactacgccaagagtcagccagacatggccatcatggctgtaaacagctttgtgaaggactgtgaagatcctaatcctttgattcgagccttggcagtcagaaccatggggtgcatccgggtagacaaaattacagaatatctctgtgagccgctccgcaagtgcttgaaggatgaggatccctatgttcggaaaacagcagcagtctgcgtggcaaaactccatgatatcaatgcccaaatggtggaagatcagggatttctggattctctacgggatctcatagcagattcaaatccaatggtggtggctaatgccgtagcggcattatctgaaatcagtgagtctcacccaaacagcaacttacttgatctgaacccacagaacattaataagctgctgacagccctgaatgaatgcactgaatggggccagattttcatcctggactgcctgtctaattacaaccctaaagatgatcgggaggctcagagcatctgtgagcgggtaactccccggctatcccatgccaactcagcagtggtgctttcagcggtaaaagtcctaatgaagtttctagaattgttacctaaggattctgactactacaatatgctgctgaagaagttagcccctccacttgtcactttgctgtctggggagccagaagtgcagtatgtcgccctgaggaacatcaacttaattgtccagaaaaggcctgaaatcttgaagcaggaaatcaaagtcttctttgtgaagtacaatgatcccatctatgttaaactagagaagttggacatcatgattcgtttggcatctcaagccaacattgctcaggttctggcagaactgaaagaatatgctacagaggtggatgttgactttgttcgaaaagctgtgcgggccattggacggtgtgccatcaaggtggagcaatctgcagagcgctgtgtaagcacattgcttgatctaatccagaccaaagtgaattatgtggtccaagaagcaattgttgtcatcagggacatcttccgcaaataccccaacaagtatgaaagtatcatcgccactctgtgtgagaacttagactcgctggatgagccagatgctcgagcagctatgatttggattgtgggagaatatgctgaaagaattgacaatgcagatgagttactagaaagcttcctggagggttttcacgatgaaagcacccaggtgcagctcactctgcttactgccatagtgaagctgtttctcaagaaaccatcagaaacacaggagctagtccagcaggtcttgagtttggcaacacaggattctgataatcctgaccttcgagaccggggctatatttattggcgccttctctcaactgaccctgttacagctaaagaagtagtcttgtctgagaagccactgatctctgaggagacggaccttattgagccaactctgctggatgagctaatctgccacattggttctttggcctctgtgtatcataagcctcccaatgcttttgtggaaggaagtcatggaattcatcgtaaacacttgccaattcatcatgggagcactgatgcaggtgacagccctgttggcactaccactgcaacgaacctggaacagcctcaggttatcccctctcaaggtgatcttctaggggatcttttaaaccttgacctcggtcccccagtcaatgtgccacaggtgtcctccatgcagatgggagcagtggatctcctaggaggaggactagatagtctggtgggacaatccttcatcccatcatcggtgcctgcaacctttgctccttcacctacacctgctgtggtcagcagtggactgaatgacctgtttgaactctccacagggataggcatggcacctggtggatatgtggctcctaaggctgtctggctacctgcagtaaaggctaaaggcttggagatttccggaacatttactcaccgccaagggcacatctatatggaaatgaacttcaccaataaagctctgcagcacatgacagattttgcaatccagtttaacaaaaatagctttggtgtcatccccagcactcctctggccatccatacaccactgatgccaaaccagagcattgatgtctccctgcctctcaataccttgggcccagtcatgaagatggaacctctgaataacctccaggtggctgtgaaaaacaatatcgatgtcttctacttcagctgcctcatcccactcaatgtgctttttgtagaagatggcaaaatggagcgccaggtcttccttgcaacatggaaggatattcccaatgaaaatgaacttcagtttcagattaaggaatgtcatttaaatgctgacactgtttccagcaagttgcaaaacaacaatgtttatactattgccaagaggaatgtggaagggcaggacatgctgtaccaatccctgaagctcactaatggcatttggattttggccgaactacgtatccagccaggaaaccccaattacacgctgtcactgaagtgtagagctcctgaagtctctcaatacatctatcaggtctacgacagcattttgaaaaactaacaagactggtccagtacccttcaaccatgctgtgatcggtgcaagtcaagaactcttaactggaagaaattgtattgctgcgtagaatctgaacacactgaggccacctagcaaggtagtaactagtctaacctgtgctaacattagggcacaacctgttggatagttttagcttcctgtgaacatttgtaaccactgcttcagtcacctcccacctcttgccacctgctgctgctatctgtccttacttgtgggcttctccatgctgtgccaatggctggctttttctacaccctcttttgagtgtagtttggtattttgtaattgagagctcatttcaaaagcagaaaaagacaacaaatattaaagcaaggaaaagtgtaactgaaacactgcactttactgttttatacttttgtacatatgagaaatcaagggattagtgcaaccagtagaaagcattgaaatgactgtcattaaccacacagtcctggaggcagagatgcagttacctaccctagcttttgatgggttctcttacctgtagtagccttatccctggtcatttggattttcagtttgcttttttctttttttcccctccaaactccttttccttggccaagccttcatgcttccccctttccatattataatctcatttgattgctctgcagttgggaacggtgatcttcttgaatgatgtttcagtgtgcaaaaactatagagcctgtcagcaccaaagctgacagaagttataccttactcctttcctttcccctgaacaaacctgctaatcccactaattcaggaatttgagtagagatggggaacaagaacccagatgctgtcccctcaccccctctcctgtatttctcaggtccagttcaaatctaaaattctacttttagagttgaaacagagtaataacttatctaaccctcttttcctacaaaggagaaagataaaaggcacaaaggttaccgccaaggcccgtcagctgtgtagtggcaaagccgagaccgagtctcctaagtccccgtcagtgtggttttcaccacaggactgtctcttgtcgttttcccctaatgccttctcctgccttttctgtgcctagtttttggctcttcacatattccatattgattttgacgctctgtatattggcatcaggtggcagctgaatatcttttgaattactcgaaggtaaagccagatgccagaatgaaggtgtagccagtgtttcccatatgcccctggagccccacttattgaggccagcagaataggtgcagagatgaagtgagcttagagatgttgcaaatgctctttatcccttcagctctctgatctgctctttcttcatgatacttagtctgcagggcatattaagatcatcccagaggttcaggcagttcctgtcatctctgaaaagactgggggatatgaaatcttccccctaccccacttaatgcgttggatatgatttttcaaagaatgcttcatgcccaaaataccagcctgtttagcagtgttacactgtttgatctgcgggcacttgttgcattgcctggcacccaatattcagggtccatgactaagactggtcttctcagatgccctgcttaaatcaggggcacttcaggctccacaggcgtcatgttggactgagacctaactcactggactcagaggaggaatcgtggaaaacaagagcaaaactaccccacacccctatttcatgtctgaaataaccctgtttcataccagttgcaaagcttgtggggagcggtcccacaaagcactttcttaaaccttgagaatctccaagagaaaaatatttggggaaggagggaggaaatatgtcccttgcacaccacccctgaagcacatggcagtagggaaacagcataggattgtatgtgggaggtggataggtcggtgatgtgtggagcggaaaagcaggttggtaaagttcccttcttgggacttattcctggagtcagtggatacaagtagtgcagaaggttcacactgcaaatagtgttctcatctcaaagcaaactatcattccagaaggaaaagtgtgtcagggcaagcagacaacacaatttcctatcagaatatgtccctcaacccccgaaacaaggcttctctcagcctccccaccagtgatggataacagctcctattctcagctgacctgactgagccaacccatgaactcttcactccttggggaagccacctcccatcacacccctgagcagagttagggaggaattctacttcccataaaaggacctctcctgagaggcaaaacctgttgcctccaccacggcttccctcttggctcattccaagcttggccaaattggggaagtgggatggaggttgccctgcatcccccctcctctgcctgagtgtgtctttgtaatgtcagctggcatcatacaaagagcaggagaagcaaacacccagaactcttttgctggtcagagattccctgagtgtctgtcctcacccaagcctgctctgtgtctgtgttgtgaagcttgagactctggaaagaaatggggagggggggcaggggaaatgttgccctaagaatgcttctcattcctctgttcttattgggtcctgtttttcgggagggtgggggttgggggaagcttgaccttgtgtcttcgtcaataaactcacatttacacaaaa

SEQ ID NO: 366081 - DNA, 426 bp, Homo sapiens
ggcggttgcctttagggtgtgtccctaattgacggggtcggggacggagagaagggtaacaccaggctgggtcggagaccggcggaggcgaggaaatcctaagagcgtgaccgttgatgatgcagggaaccgtcgggtgtgaccattgagagggaaaaggtgcacattaaagatccaaagtcatgactgactccaagtatttcacaaccaataaaaaaggagaaatatttgaactaaaagctgaactcaacaatgaaaagaaagaaaagagaaaggaggctgtgaagaaagtgattgctgctatgaccgtggggaaggatgttaggtgctgctcttctgaggtgaatttttgttatttttcttttgtttgttagcacataaagcacatttggtttttaaattgctgtcctgtgaccatctatctaa

SEQ ID NO: 366082 - DNA, 5753 bp, Homo sapiens
ggcggttgcctttagggtgtgtccctaattgacggggtcggggacggagagaagggtaacaccaggctgggtcggagaccggcggaggcgaggaaatcctaagagcgtgaccgttgatgatgcagggaaccgtcgggtgtgaccattgagagggaaaaggtgcacattaaagatccaaagtcatgactgactccaagtatttcacaaccaataaaaaaggagaaatatttgaactaaaagctgaactcaacaatgaaaagaaagaaaagagaaaggaggctgtgaagaaagtgattgctgctatgaccgtggggaaggatgttagttctctctttccagacgtagtgaactgtatgcagactgacaatctggaactaaagaagcttgtgtatctctacttgatgaactacgccaagagtcagccagacatggccatcatggctgtaaacagctttgtgaaggactgtgaagatcctaatcctttgattcgagccttggcagtcagaaccatggggtgcatccgggtagacaaaattacagaatatctctgtgagccgctccgcaagtgcttgaaggatgaggatccctatgttcggaaaacagcagcagtctgcgtggcaaaactccatgatatcaatgcccaaatggtggaagatcagggatttctggattctctacgggatctcatagcagattcaaatccaatggtggtggctaatgccgtagcggcattatctgaaatcagtgagtctcacccaaacagcaacttacttgatctgaacccacagaacattaataagctgctgacagccctgaatgaatgcactgaatggggccagattttcatcctggactgcctgtctaattacaaccctaaagatgatcgggaggctcagagcatctgtgagcgggtaactccccggctatcccatgccaactcagcagtggtgctttcagcggtaaaagtcctaatgaagtttctagaattgttacctaaggattctgactactacaatatgctgctgaagaagttagcccctccacttgtcactttgctgtctggggagccagaagtgcagtatgtcgccctgaggaacatcaacttaattgtccagaaaaggcctgaaatcttgaagcaggaaatcaaagtcttctttgtgaagtacaatgatcccatctatgttaaactagagaagttggacatcatgattcgtttggcatctcaagccaacattgctcaggttctggcagaactgaaagaatatgctacagaggtggatgttgactttgttcgaaaagctgtgcgggccattggacggtgtgccatcaaggtggagcaatctgcagagcgctgtgtaagcacattgcttgatctaatccagaccaaagtgaattatgtggtccaagaagcaattgttgtcatcagggacatcttccgcaaataccccaacaagtatgaaagtatcatcgccactctgtgtgagaacttagactcgctggatgagccagatgctcgagcagctatgatttggattgtgggagaatatgctgaaagaattgacaatgcagatgagttactagaaagcttcctggagggttttcacgatgaaagcacccaggtgcagctcactctgcttactgccatagtgaagctgtttctcaagaaaccatcagaaacacaggagctagtccagcaggtcttgagtttggcaacacaggattctgataatcctgaccttcgagaccggggctatatttattggcgccttctctcaactgaccctgttacagctaaagaagtagtcttgtctgagaagccactgatctctgaggagacggaccttattgagccaactctgctggatgagctaatctgccacattggttctttggcctctgtgtatcataagcctcccaatgcttttgtggaaggaagtcatggaattcatcgtaaacacttgccaattcatcatgggagcactgatgcaggtgacagccctgttggcactaccactgcaacgaacctggaacagcctcaggttatcccctctcaaggtgatcttctaggggatcttttaaaccttgacctcggtcccccagtcaatgtgccacaggtgtcctccatgcagatgggagcagtggatctcctaggaggaggactagatagtctgcttggcagtgaccttggcgggggcattggaggaagtccggcagtgggacaatccttcatcccatcatcggtgcctgcaacctttgctccttcacctacacctgctgtggtcagcagtggactgaatgacctgtttgaactctccacagggataggcatggcacctggtggatatgtggctcctaaggctgtctggctacctgcagtaaaggctaaaggcttggagatttccggaacatttactcaccgccaagggcacatctatatggaaatgaacttcaccaataaagctctgcagcacatgacagattttgcaatccagtttaacaaaaatagctttggtgtcatccccagcactcctctggccatccatacaccactgatgccaaaccagagcattgatgtctccctgcctctcaataccttgggcccagtcatgaagatggaacctctgaataacctccaggtggctgtgaaaaacaatatcgatgtcttctacttcagctgcctcatcccactcaatgtgctttttgtagaagatggcaaaatggagcgccaggtcttccttgcaacatggaaggatattcccaatgaaaatgaacttcagtttcagattaaggaatgtcatttaaatgctgacactgtttccagcaagttgcaaaacaacaatgtttatactattgccaagaggaatgtggaagggcaggacatgctgtaccaatccctgaagctcactaatggcatttggattttggccgaactacgtatccagccaggaaaccccaattacacgctgtcactgaagtgtagagctcctgaagtctctcaatacatctatcaggtctacgacagcattttgaaaaactaacaagactggtccagtacccttcaaccatgctgtgatcggtgcaagtcaagaactcttaactggaagaaattgtattgctgcgtagaatctgaacacactgaggccacctagcaaggtagtaactagtctaacctgtgctaacattagggcacaacctgttggatagttttagcttcctgtgaacatttgtaaccactgcttcagtcacctcccacctcttgccacctgctgctgctatctgtccttacttgtgggcttctccatgctgtgccaatggctggctttttctacaccctcttttgagtgtagtttggtattttgtaattgagagctcatttcaaaagcagaaaaagacaacaaatattaaagcaaggaaaagtgtaactgaaacactgcactttactgttttatacttttgtacatatgagaaatcaagggattagtgcaaccagtagaaagcattgaaatgactgtcattaaccacacagtcctggaggcagagatgcagttacctaccctagcttttgatgggttctcttacctgtagtagccttatccctggtcatttggattttcagtttgcttttttctttttttcccctccaaactccttttccttggccaagccttcatgcttccccctttccatattataatctcatttgattgctctgcagttgggaacggtgatcttcttgaatgatgtttcagtgtgcaaaaactatagagcctgtcagcaccaaagctgacagaagttataccttactcctttcctttcccctgaacaaacctgctaatcccactaattcaggaatttgagtagagatggggaacaagaacccagatgctgtcccctcaccccctctcctgtatttctcaggtccagttcaaatctaaaattctacttttagagttgaaacagagtaataacttatctaaccctcttttcctacaaaggagaaagataaaaggcacaaaggttaccgccaaggcccgtcagctgtgtagtggcaaagccgagaccgagtctcctaagtccccgtcagtgtggttttcaccacaggactgtctcttgtcgttttcccctaatgccttctcctgccttttctgtgcctagtttttggctcttcacatattccatattgattttgacgctctgtatattggcatcaggtggcagctgaatatcttttgaattactcgaaggtaaagccagatgccagaatgaaggtgtagccagtgtttcccatatgcccctggagccccacttattgaggccagcagaataggtgcagagatgaagtgagcttagagatgttgcaaatgctctttatcccttcagctctctgatctgctctttcttcatgatacttagtctgcagggcatattaagatcatcccagaggttcaggcagttcctgtcatctctgaaaagactgggggatatgaaatcttccccctaccccacttaatgcgttggatatgatttttcaaagaatgcttcatgcccaaaataccagcctgtttagcagtgttacactgtttgatctgcgggcacttgttgcattgcctggcacccaatattcagggtccatgactaagactggtcttctcagatgccctgcttaaatcaggggcacttcaggctccacaggcgtcatgttggactgagacctaactcactggactcagaggaggaatcgtggaaaacaagagcaaaactaccccacacccctatttcatgtctgaaataaccctgtttcataccagttgcaaagcttgtggggagcggtcccacaaagcactttcttaaaccttgagaatctccaagagaaaaatatttggggaaggagggaggaaatatgtcccttgcacaccacccctgaagcacatggcagtagggaaacagcataggattgtatgtgggaggtggataggtcggtgatgtgtggagcggaaaagcaggttggtaaagttcccttcttgggacttattcctggagtcagtggatacaagtagtgcagaaggttcacactgcaaatagtgttctcatctcaaagcaaactatcattccagaaggaaaagtgtgtcagggcaagcagacaacacaatttcctatcagaatatgtccctcaacccccgaaacaaggcttctctcagcctccccaccagtgatggataacagctcctattctcagctgacctgactgagccaacccatgaactcttcactccttggggaagccacctcccatcacacccctgagcagagttagggaggaattctacttcccataaaaggacctctcctgagaggcaaaacctgttgcctccaccacggcttccctcttggctcattccaagcttggccaaattggggaagtgggatggaggttgccctgcatcccccctcctctgcctgagtgtgtctttgtaatgtcagctggcatcatacaaagagcaggagaagcaaacacccagaactcttttgctggtcagagattccctgagtgtctgtcctcacccaagcctgctctgtgtctgtgttgtgaagcttgagactctggaaagaaatggggagggggggcaggggaaatgttgccctaagaatgcttctcattcctctgttcttattgggtcctgtttttcgggagggtgggggttgggggaagcttgaccttgtgtcttcgtcaataaactcacatttacacaaaa

SEQ ID NO: 366083 - DNA, 5617 bp, Homo sapiens
ggaattcttttctcttgctataggtgcacattaaagatccaaagtcatgactgactccaagtatttcacaaccaataaaaaaggagaaatatttgaactaaaagctgaactcaacaatgaaaagaaagaaaagagaaaggaggctgtgaagaaagtgattgctgctatgaccgtggggaaggatgttagttctctctttccagacgtagtgaactgtatgcagactgacaatctggaactaaagaagcttgtgtatctctacttgatgaactacgccaagagtcagccagacatggccatcatggctgtaaacagctttgtgaaggactgtgaagatcctaatcctttgattcgagccttggcagtcagaaccatggggtgcatccgggtagacaaaattacagaatatctctgtgagccgctccgcaagtgcttgaaggatgaggatccctatgttcggaaaacagcagcagtctgcgtggcaaaactccatgatatcaatgcccaaatggtggaagatcagggatttctggattctctacgggatctcatagcagattcaaatccaatggtggtggctaatgccgtagcggcattatctgaaatcagtgagtctcacccaaacagcaacttacttgatctgaacccacagaacattaataagctgctgacagccctgaatgaatgcactgaatggggccagattttcatcctggactgcctgtctaattacaaccctaaagatgatcgggaggctcagagcatctgtgagcgggtaactccccggctatcccatgccaactcagcagtggtgctttcagcggtaaaagtcctaatgaagtttctagaattgttacctaaggattctgactactacaatatgctgctgaagaagttagcccctccacttgtcactttgctgtctggggagccagaagtgcagtatgtcgccctgaggaacatcaacttaattgtccagaaaaggcctgaaatcttgaagcaggaaatcaaagtcttctttgtgaagtacaatgatcccatctatgttaaactagagaagttggacatcatgattcgtttggcatctcaagccaacattgctcaggttctggcagaactgaaagaatatgctacagaggtggatgttgactttgttcgaaaagctgtgcgggccattggacggtgtgccatcaaggtggagcaatctgcagagcgctgtgtaagcacattgcttgatctaatccagaccaaagtgaattatgtggtccaagaagcaattgttgtcatcagggacatcttccgcaaataccccaacaagtatgaaagtatcatcgccactctgtgtgagaacttagactcgctggatgagccagatgctcgagcagctatgatttggattgtgggagaatatgctgaaagaattgacaatgcagatgagttactagaaagcttcctggagggttttcacgatgaaagcacccaggtgcagctcactctgcttactgccatagtgaagctgtttctcaagaaaccatcagaaacacaggagctagtccagcaggtcttgagtttggcaacacaggattctgataatcctgaccttcgagaccggggctatatttattggcgccttctctcaactgaccctgttacagctaaagaagtagtcttgtctgagaagccactgatctctgaggagacggaccttattgagccaactctgctggatgagctaatctgccacattggttctttggcctctgtgtatcataagcctcccaatgcttttgtggaaggaagtcatggaattcatcgtaaacacttgccaattcatcatgggagcactgatgcaggtgacagccctgttggcactaccactgcaacgaacctggaacagcctcaggttatcccctctcaaggtgatcttctaggggatcttttaaaccttgacctcggtcccccagtcaatgtgccacaggtgtcctccatgcagatgggagcagtggatctcctaggaggaggactagatagtctgcttggcagtgaccttggcgggggcattggaggaagtccggcagtgggacaatccttcatcccatcatcggtgcctgcaacctttgctccttcacctacacctgctgtggtcagcagtggactgaatgacctgtttgaactctccacagggataggcatggcacctggtggatatgtggctcctaaggctgtctggctacctgcagtaaaggctaaaggcttggagatttccggaacatttactcaccgccaagggcacatctatatggaaatgaacttcaccaataaagctctgcagcacatgacagattttgcaatccagtttaacaaaaatagctttggtgtcatccccagcactcctctggccatccatacaccactgatgccaaaccagagcattgatgtctccctgcctctcaataccttgggcccagtcatgaagatggaacctctgaataacctccaggtggctgtgaaaaacaatatcgatgtcttctacttcagctgcctcatcccactcaatgtgctttttgtagaagatggcaaaatggagcgccaggtcttccttgcaacatggaaggatattcccaatgaaaatgaacttcagtttcagattaaggaatgtcatttaaatgctgacactgtttccagcaagttgcaaaacaacaatgtttatactattgccaagaggaatgtggaagggcaggacatgctgtaccaatccctgaagctcactaatggcatttggattttggccgaactacgtatccagccaggaaaccccaattacacgctgtcactgaagtgtagagctcctgaagtctctcaatacatctatcaggtctacgacagcattttgaaaaactaacaagactggtccagtacccttcaaccatgctgtgatcggtgcaagtcaagaactcttaactggaagaaattgtattgctgcgtagaatctgaacacactgaggccacctagcaaggtagtaactagtctaacctgtgctaacattagggcacaacctgttggatagttttagcttcctgtgaacatttgtaaccactgcttcagtcacctcccacctcttgccacctgctgctgctatctgtccttacttgtgggcttctccatgctgtgccaatggctggctttttctacaccctcttttgagtgtagtttggtattttgtaattgagagctcatttcaaaagcagaaaaagacaacaaatattaaagcaaggaaaagtgtaactgaaacactgcactttactgttttatacttttgtacatatgagaaatcaagggattagtgcaaccagtagaaagcattgaaatgactgtcattaaccacacagtcctggaggcagagatgcagttacctaccctagcttttgatgggttctcttacctgtagtagccttatccctggtcatttggattttcagtttgcttttttctttttttcccctccaaactccttttccttggccaagccttcatgcttccccctttccatattataatctcatttgattgctctgcagttgggaacggtgatcttcttgaatgatgtttcagtgtgcaaaaactatagagcctgtcagcaccaaagctgacagaagttataccttactcctttcctttcccctgaacaaacctgctaatcccactaattcaggaatttgagtagagatggggaacaagaacccagatgctgtcccctcaccccctctcctgtatttctcaggtccagttcaaatctaaaattctacttttagagttgaaacagagtaataacttatctaaccctcttttcctacaaaggagaaagataaaaggcacaaaggttaccgccaaggcccgtcagctgtgtagtggcaaagccgagaccgagtctcctaagtccccgtcagtgtggttttcaccacaggactgtctcttgtcgttttcccctaatgccttctcctgccttttctgtgcctagtttttggctcttcacatattccatattgattttgacgctctgtatattggcatcaggtggcagctgaatatcttttgaattactcgaaggtaaagccagatgccagaatgaaggtgtagccagtgtttcccatatgcccctggagccccacttattgaggccagcagaataggtgcagagatgaagtgagcttagagatgttgcaaatgctctttatcccttcagctctctgatctgctctttcttcatgatacttagtctgcagggcatattaagatcatcccagaggttcaggcagttcctgtcatctctgaaaagactgggggatatgaaatcttccccctaccccacttaatgcgttggatatgatttttcaaagaatgcttcatgcccaaaataccagcctgtttagcagtgttacactgtttgatctgcgggcacttgttgcattgcctggcacccaatattcagggtccatgactaagactggtcttctcagatgccctgcttaaatcaggggcacttcaggctccacaggcgtcatgttggactgagacctaactcactggactcagaggaggaatcgtggaaaacaagagcaaaactaccccacacccctatttcatgtctgaaataaccctgtttcataccagttgcaaagcttgtggggagcggtcccacaaagcactttcttaaaccttgagaatctccaagagaaaaatatttggggaaggagggaggaaatatgtcccttgcacaccacccctgaagcacatggcagtagggaaacagcataggattgtatgtgggaggtggataggtcggtgatgtgtggagcggaaaagcaggttggtaaagttcccttcttgggacttattcctggagtcagtggatacaagtagtgcagaaggttcacactgcaaatagtgttctcatctcaaagcaaactatcattccagaaggaaaagtgtgtcagggcaagcagacaacacaatttcctatcagaatatgtccctcaacccccgaaacaaggcttctctcagcctccccaccagtgatggataacagctcctattctcagctgacctgactgagccaacccatgaactcttcactccttggggaagccacctcccatcacacccctgagcagagttagggaggaattctacttcccataaaaggacctctcctgagaggcaaaacctgttgcctccaccacggcttccctcttggctcattccaagcttggccaaattggggaagtgggatggaggttgccctgcatcccccctcctctgcctgagtgtgtctttgtaatgtcagctggcatcatacaaagagcaggagaagcaaacacccagaactcttttgctggtcagagattccctgagtgtctgtcctcacccaagcctgctctgtgtctgtgttgtgaagcttgagactctggaaagaaatggggagggggggcaggggaaatgttgccctaagaatgcttctcattcctctgttcttattgggtcctgtttttcgggagggtgggggttgggggaagcttgaccttgtgtcttcgtcaataaactcacatttacacaaaa

SEQ ID NO: 366084 - DNA, 6040 bp, Homo sapiens
cagggctgagaacctttgcattcaagagtcaggagacacagtgctaagcccaactttgtcactgactctgtgaactttgagcctcatttcttaatctgtaaagcggagcgtgggtaaatgaggtaatacgcgcctgctccctacctacgtttatgttctcctccagactttaacattctgatggaagatcatccttcatatactgttctctccccattgtagctagatataatgagatttggtttttcccactcttgtggttcttgaagatctggattgcaccttcctctctggccataatttaaaagatttttaaaacttactgatggcttccttgtcagtgagtcaggtaatattctagggctttgaattttatatattctataattttaaaatcttattttagttgctgccctgctatcctggtattggttattacatagtgtagtattctgctctaagtctgtggtactggaaccttaccagtttgctctcatctcttgcaggagaaatatttgaactaaaagctgaactcaacaatgaaaagaaagaaaagagaaaggaggctgtgaagaaagtgattgctgctatgaccgtggggaaggatgttagttctctctttccagacgtagtgaactgtatgcagactgacaatctggaactaaagaagcttgtgtatctctacttgatgaactacgccaagagtcagccagacatggccatcatggctgtaaacagctttgtgaaggactgtgaagatcctaatcctttgattcgagccttggcagtcagaaccatggggtgcatccgggtagacaaaattacagaatatctctgtgagccgctccgcaagtgcttgaaggatgaggatccctatgttcggaaaacagcagcagtctgcgtggcaaaactccatgatatcaatgcccaaatggtggaagatcagggatttctggattctctacgggatctcatagcagattcaaatccaatggtggtggctaatgccgtagcggcattatctgaaatcagtgagtctcacccaaacagcaacttacttgatctgaacccacagaacattaataagctgctgacagccctgaatgaatgcactgaatggggccagattttcatcctggactgcctgtctaattacaaccctaaagatgatcgggaggctcagagcatctgtgagcgggtaactccccggctatcccatgccaactcagcagtggtgctttcagcggtaaaagtcctaatgaagtttctagaattgttacctaaggattctgactactacaatatgctgctgaagaagttagcccctccacttgtcactttgctgtctggggagccagaagtgcagtatgtcgccctgaggaacatcaacttaattgtccagaaaaggcctgaaatcttgaagcaggaaatcaaagtcttctttgtgaagtacaatgatcccatctatgttaaactagagaagttggacatcatgattcgtttggcatctcaagccaacattgctcaggttctggcagaactgaaagaatatgctacagaggtggatgttgactttgttcgaaaagctgtgcgggccattggacggtgtgccatcaaggtggagcaatctgcagagcgctgtgtaagcacattgcttgatctaatccagaccaaagtgaattatgtggtccaagaagcaattgttgtcatcagggacatcttccgcaaataccccaacaagtatgaaagtatcatcgccactctgtgtgagaacttagactcgctggatgagccagatgctcgagcagctatgatttggattgtgggagaatatgctgaaagaattgacaatgcagatgagttactagaaagcttcctggagggttttcacgatgaaagcacccaggtgcagctcactctgcttactgccatagtgaagctgtttctcaagaaaccatcagaaacacaggagctagtccagcaggtcttgagtttggcaacacaggattctgataatcctgaccttcgagaccggggctatatttattggcgccttctctcaactgaccctgttacagctaaagaagtagtcttgtctgagaagccactgatctctgaggagacggaccttattgagccaactctgctggatgagctaatctgccacattggttctttggcctctgtgtatcataagcctcccaatgcttttgtggaaggaagtcatggaattcatcgtaaacacttgccaattcatcatgggagcactgatgcaggtgacagccctgttggcactaccactgcaacgaacctggaacagcctcaggttatcccctctcaaggtgatcttctaggggatcttttaaaccttgacctcggtcccccagtcaatgtgccacaggtgtcctccatgcagatgggagcagtggatctcctaggaggaggactagatagtctgcttggcagtgaccttggcgggggcattggaggaagtccggcagtgggacaatccttcatcccatcatcggtgcctgcaacctttgctccttcacctacacctgctgtggtcagcagtggactgaatgacctgtttgaactctccacagggataggcatggcacctggtggatatgtggctcctaaggctgtctggctacctgcagtaaaggctaaaggcttggagatttccggaacatttactcaccgccaagggcacatctatatggaaatgaacttcaccaataaagctctgcagcacatgacagattttgcaatccagtttaacaaaaatagctttggtgtcatccccagcactcctctggccatccatacaccactgatgccaaaccagagcattgatgtctccctgcctctcaataccttgggcccagtcatgaagatggaacctctgaataacctccaggtggctgtgaaaaacaatatcgatgtcttctacttcagctgcctcatcccactcaatgtgctttttgtagaagatggcaaaatggagcgccaggtcttccttgcaacatggaaggatattcccaatgaaaatgaacttcagtttcagattaaggaatgtcatttaaatgctgacactgtttccagcaagttgcaaaacaacaatgtttatactattgccaagaggaatgtggaagggcaggacatgctgtaccaatccctgaagctcactaatggcatttggattttggccgaactacgtatccagccaggaaaccccaattacacgctgtcactgaagtgtagagctcctgaagtctctcaatacatctatcaggtctacgacagcattttgaaaaactaacaagactggtccagtacccttcaaccatgctgtgatcggtgcaagtcaagaactcttaactggaagaaattgtattgctgcgtagaatctgaacacactgaggccacctagcaaggtagtaactagtctaacctgtgctaacattagggcacaacctgttggatagttttagcttcctgtgaacatttgtaaccactgcttcagtcacctcccacctcttgccacctgctgctgctatctgtccttacttgtgggcttctccatgctgtgccaatggctggctttttctacaccctcttttgagtgtagtttggtattttgtaattgagagctcatttcaaaagcagaaaaagacaacaaatattaaagcaaggaaaagtgtaactgaaacactgcactttactgttttatacttttgtacatatgagaaatcaagggattagtgcaaccagtagaaagcattgaaatgactgtcattaaccacacagtcctggaggcagagatgcagttacctaccctagcttttgatgggttctcttacctgtagtagccttatccctggtcatttggattttcagtttgcttttttctttttttcccctccaaactccttttccttggccaagccttcatgcttccccctttccatattataatctcatttgattgctctgcagttgggaacggtgatcttcttgaatgatgtttcagtgtgcaaaaactatagagcctgtcagcaccaaagctgacagaagttataccttactcctttcctttcccctgaacaaacctgctaatcccactaattcaggaatttgagtagagatggggaacaagaacccagatgctgtcccctcaccccctctcctgtatttctcaggtccagttcaaatctaaaattctacttttagagttgaaacagagtaataacttatctaaccctcttttcctacaaaggagaaagataaaaggcacaaaggttaccgccaaggcccgtcagctgtgtagtggcaaagccgagaccgagtctcctaagtccccgtcagtgtggttttcaccacaggactgtctcttgtcgttttcccctaatgccttctcctgccttttctgtgcctagtttttggctcttcacatattccatattgattttgacgctctgtatattggcatcaggtggcagctgaatatcttttgaattactcgaaggtaaagccagatgccagaatgaaggtgtagccagtgtttcccatatgcccctggagccccacttattgaggccagcagaataggtgcagagatgaagtgagcttagagatgttgcaaatgctctttatcccttcagctctctgatctgctctttcttcatgatacttagtctgcagggcatattaagatcatcccagaggttcaggcagttcctgtcatctctgaaaagactgggggatatgaaatcttccccctaccccacttaatgcgttggatatgatttttcaaagaatgcttcatgcccaaaataccagcctgtttagcagtgttacactgtttgatctgcgggcacttgttgcattgcctggcacccaatattcagggtccatgactaagactggtcttctcagatgccctgcttaaatcaggggcacttcaggctccacaggcgtcatgttggactgagacctaactcactggactcagaggaggaatcgtggaaaacaagagcaaaactaccccacacccctatttcatgtctgaaataaccctgtttcataccagttgcaaagcttgtggggagcggtcccacaaagcactttcttaaaccttgagaatctccaagagaaaaatatttggggaaggagggaggaaatatgtcccttgcacaccacccctgaagcacatggcagtagggaaacagcataggattgtatgtgggaggtggataggtcggtgatgtgtggagcggaaaagcaggttggtaaagttcccttcttgggacttattcctggagtcagtggatacaagtagtgcagaaggttcacactgcaaatagtgttctcatctcaaagcaaactatcattccagaaggaaaagtgtgtcagggcaagcagacaacacaatttcctatcagaatatgtccctcaacccccgaaacaaggcttctctcagcctccccaccagtgatggataacagctcctattctcagctgacctgactgagccaacccatgaactcttcactccttggggaagccacctcccatcacacccctgagcagagttagggaggaattctacttcccataaaaggacctctcctgagaggcaaaacctgttgcctccaccacggcttccctcttggctcattccaagcttggccaaattggggaagtgggatggaggttgccctgcatcccccctcctctgcctgagtgtgtctttgtaatgtcagctggcatcatacaaagagcaggagaagcaaacacccagaactcttttgctggtcagagattccctgagtgtctgtcctcacccaagcctgctctgtgtctgtgttgtgaagcttgagactctggaaagaaatggggagggggggcaggggaaatgttgccctaagaatgcttctcattcctctgttcttattgggtcctgtttttcgggagggtgggggttgggggaagcttgaccttgtgtcttcgtcaataaactcacatttacacaaaa

SEQ ID NO: 366085 - DNA, 5647 bp, Homo sapiens
acgtcagagtttcctgcccaccatctttgtccctggcaaagtgggttttgcgcagtggcttagacctagaaaagaatcgtgacgggcaggaaaccattacaccaccacctgggctgtgctctccggctcccgccgccacccccgccctcgccttcgcctccgcctccggtgcacattaaagatccaaagtcatgactgactccaagtatttcacaaccaataaaaaaggagaaatatttgaactaaaagctgaactcaacaatgaaaagaaagaaaagagaaaggaggctgtgaagaaagtgattgctgctatgaccgtggggaaggatgttagttctctctttccagacgtagtgaactgtatgcagactgacaatctggaactaaagaagcttgtgtatctctacttgatgaactacgccaagagtcagccagacatggccatcatggctgtaaacagctttgtgaaggactgtgaagatcctaatcctttgattcgagccttggcagtcagaaccatggggtgcatccgggtagacaaaattacagaatatctctgtgagccgctccgcaagtgcttgaaggatgaggatccctatgttcggaaaacagcagcagtctgcgtggcaaaactccatgatatcaatgcccaaatggtggaagatcagggatttctggattctctacgggatctcatagcagattcaaatccaatggtggtggctaatgccgtagcggcattatctgaaatcagtgagtctcacccaaacagcaacttacttgatctgaacccacagaacattaataagctgctgacagccctgaatgaatgcactgaatggggccagattttcatcctggactgcctgtctaattacaaccctaaagatgatcgggaggctcagagcatctgtgagcgggtaactccccggctatcccatgccaactcagcagtggtgctttcagcggtaaaagtcctaatgaagtttctagaattgttacctaaggattctgactactacaatatgctgctgaagaagttagcccctccacttgtcactttgctgtctggggagccagaagtgcagtatgtcgccctgaggaacatcaacttaattgtccagaaaaggcctgaaatcttgaagcaggaaatcaaagtcttctttgtgaagtacaatgatcccatctatgttaaactagagaagttggacatcatgattcgtttggcatctcaagccaacattgctcaggttctggcagaactgaaagaatatgctacagaggtggatgttgactttgttcgaaaagctgtgcgggccattggacggtgtgccatcaaggtggagcaatctgcagagcgctgtgtaagcacattgcttgatctaatccagaccaaagtgaattatgtggtccaagaagcaattgttgtcatcagggacatcttccgcaaataccccaacaagtatgaaagtatcatcgccactctgtgtgagaacttagactcgctggatgagccagatgctcgagcagctatgatttggattgtgggagaatatgctgaaagaattgacaatgcagatgagttactagaaagcttcctggagggttttcacgatgaaagcacccaggtgcagctcactctgcttactgccatagtgaagctgtttctcaagaaaccatcagaaacacaggagctagtccagcaggtcttgagtttggcaacacagctaaagaagtagtcttgtctgagaagccactgatctctgaggagacggaccttattgagccaactctgctggatgagctaatctgccacattggttctttggcctctgtgtatcataagcctcccaatgcttttgtggaaggaagtcatggaattcatcgtaaacacttgccaattcatcatgggagcactgatgcaggtgacagccctgttggcactaccactgcaacgaacctggaacagcctcaggttatcccctctcaaggtgatcttctaggggatcttttaaaccttgacctcggtcccccagtcaatgtgccacaggtgtcctccatgcagatgggagcagtggatctcctaggaggaggactagatagtctggtgggacaatccttcatcccatcatcggtgcctgcaacctttgctccttcacctacacctgctgtggtcagcagtggactgaatgacctgtttgaactctccacagggataggcatggcacctggtggatatgtggctcctaaggctgtctggctacctgcagtaaaggctaaaggcttggagatttccggaacatttactcaccgccaagggcacatctatatggaaatgaacttcaccaataaagctctgcagcacatgacagattttgcaatccagtttaacaaaaatagctttggtgtcatccccagcactcctctggccatccatacaccactgatgccaaaccagagcattgatgtctccctgcctctcaataccttgggcccagtcatgaagatggaacctctgaataacctccaggtggctgtgaaaaacaatatcgatgtcttctacttcagctgcctcatcccactcaatgtgctttttgtagaagatggcaaaatggagcgccaggtcttccttgcaacatggaaggatattcccaatgaaaatgaacttcagtttcagattaaggaatgtcatttaaatgctgacactgtttccagcaagttgcaaaacaacaatgtttatactattgccaagaggaatgtggaagggcaggacatgctgtaccaatccctgaagctcactaatggcatttggattttggccgaactacgtatccagccaggaaaccccaattacacgctgtcactgaagtgtagagctcctgaagtctctcaatacatctatcaggtctacgacagcattttgaaaaactaacaagactggtccagtacccttcaaccatgctgtgatcggtgcaagtcaagaactcttaactggaagaaattgtattgctgcgtagaatctgaacacactgaggccacctagcaaggtagtaactagtctaacctgtgctaacattagggcacaacctgttggatagttttagcttcctgtgaacatttgtaaccactgcttcagtcacctcccacctcttgccacctgctgctgctatctgtccttacttgtgggcttctccatgctgtgccaatggctggctttttctacaccctcttttgagtgtagtttggtattttgtaattgagagctcatttcaaaagcagaaaaagacaacaaatattaaagcaaggaaaagtgtaactgaaacactgcactttactgttttatacttttgtacatatgagaaatcaagggattagtgcaaccagtagaaagcattgaaatgactgtcattaaccacacagtcctggaggcagagatgcagttacctaccctagcttttgatgggttctcttacctgtagtagccttatccctggtcatttggattttcagtttgcttttttctttttttcccctccaaactccttttccttggccaagccttcatgcttccccctttccatattataatctcatttgattgctctgcagttgggaacggtgatcttcttgaatgatgtttcagtgtgcaaaaactatagagcctgtcagcaccaaagctgacagaagttataccttactcctttcctttcccctgaacaaacctgctaatcccactaattcaggaatttgagtagagatggggaacaagaacccagatgctgtcccctcaccccctctcctgtatttctcaggtccagttcaaatctaaaattctacttttagagttgaaacagagtaataacttatctaaccctcttttcctacaaaggagaaagataaaaggcacaaaggttaccgccaaggcccgtcagctgtgtagtggcaaagccgagaccgagtctcctaagtccccgtcagtgtggttttcaccacaggactgtctcttgtcgttttcccctaatgccttctcctgccttttctgtgcctagtttttggctcttcacatattccatattgattttgacgctctgtatattggcatcaggtggcagctgaatatcttttgaattactcgaaggtaaagccagatgccagaatgaaggtgtagccagtgtttcccatatgcccctggagccccacttattgaggccagcagaataggtgcagagatgaagtgagcttagagatgttgcaaatgctctttatcccttcagctctctgatctgctctttcttcatgatacttagtctgcagggcatattaagatcatcccagaggttcaggcagttcctgtcatctctgaaaagactgggggatatgaaatcttccccctaccccacttaatgcgttggatatgatttttcaaagaatgcttcatgcccaaaataccagcctgtttagcagtgttacactgtttgatctgcgggcacttgttgcattgcctggcacccaatattcagggtccatgactaagactggtcttctcagatgccctgcttaaatcaggggcacttcaggctccacaggcgtcatgttggactgagacctaactcactggactcagaggaggaatcgtggaaaacaagagcaaaactaccccacacccctatttcatgtctgaaataaccctgtttcataccagttgcaaagcttgtggggagcggtcccacaaagcactttcttaaaccttgagaatctccaagagaaaaatatttggggaaggagggaggaaatatgtcccttgcacaccacccctgaagcacatggcagtagggaaacagcataggattgtatgtgggaggtggataggtcggtgatgtgtggagcggaaaagcaggttggtaaagttcccttcttgggacttattcctggagtcagtggatacaagtagtgcagaaggttcacactgcaaatagtgttctcatctcaaagcaaactatcattccagaaggaaaagtgtgtcagggcaagcagacaacacaatttcctatcagaatatgtccctcaacccccgaaacaaggcttctctcagcctccccaccagtgatggataacagctcctattctcagctgacctgactgagccaacccatgaactcttcactccttggggaagccacctcccatcacacccctgagcagagttagggaggaattctacttcccataaaaggacctctcctgagaggcaaaacctgttgcctccaccacggcttccctcttggctcattccaagcttggccaaattggggaagtgggatggaggttgccctgcatcccccctcctctgcctgagtgtgtctttgtaatgtcagctggcatcatacaaagagcaggagaagcaaacacccagaactcttttgctggtcagagattccctgagtgtctgtcctcacccaagcctgctctgtgtctgtgttgtgaagcttgagactctggaaagaaatggggagggggggcaggggaaatgttgccctaagaatgcttctcattcctctgttcttattgggtcctgtttttcgggagggtgggggttgggggaagcttgaccttgtgtcttcgtcaataaactcacatttacacaaaa

SEQ ID NO: 366086 - DNA, 3601 bp, Homo sapiens
tctcctttctctctttcagcttggcagtgaccttggcgggggcattggaggaagtccggcagtgggacaatccttcatcccatcatcggtgcctgcaacctttgctccttcacctacacctgctgtggtcagcagtggactgaatgacctgtttgaactctccacagggataggcatggcacctggtggatatgtggctcctaaggctgtctggctacctgcagtaaaggctaaaggcttggagatttccggaacatttactcaccgccaagggcacatctatatggaaatgaacttcaccaataaagctctgcagcacatgacagattttgcaatccagtttaacaaaaatagctttggtgtcatccccagcactcctctggccatccatacaccactgatgccaaaccagagcattgatgtctccctgcctctcaataccttgggcccagtcatgaagatggaacctctgaataacctccaggtggctgtgaaaaacaatatcgatgtcttctacttcagctgcctcatcccactcaatgtgctttttgtagaagatggcaaaatggagcgccaggtcttccttgcaacatggaaggatattcccaatgaaaatgaacttcagtttcagattaaggaatgtcatttaaatgctgacactgtttccagcaagttgcaaaacaacaatgtttatactattgccaagaggaatgtggaagggcaggacatgctgtaccaatccctgaagctcactaatggcatttggattttggccgaactacgtatccagccaggaaaccccaattacacgctgtcactgaagtgtagagctcctgaagtctctcaatacatctatcaggtctacgacagcattttgaaaaactaacaagactggtccagtacccttcaaccatgctgtgatcggtgcaagtcaagaactcttaactggaagaaattgtattgctgcgtagaatctgaacacactgaggccacctagcaaggtagtaactagtctaacctgtgctaacattagggcacaacctgttggatagttttagcttcctgtgaacatttgtaaccactgcttcagtcacctcccacctcttgccacctgctgctgctatctgtccttacttgtgggcttctccatgctgtgccaatggctggctttttctacaccctcttttgagtgtagtttggtattttgtaattgagagctcatttcaaaagcagaaaaagacaacaaatattaaagcaaggaaaagtgtaactgaaacactgcactttactgttttatacttttgtacatatgagaaatcaagggattagtgcaaccagtagaaagcattgaaatgactgtcattaaccacacagtcctggaggcagagatgcagttacctaccctagcttttgatgggttctcttacctgtagtagccttatccctggtcatttggattttcagtttgcttttttctttttttcccctccaaactccttttccttggccaagccttcatgcttccccctttccatattataatctcatttgattgctctgcagttgggaacggtgatcttcttgaatgatgtttcagtgtgcaaaaactatagagcctgtcagcaccaaagctgacagaagttataccttactcctttcctttcccctgaacaaacctgctaatcccactaattcaggaatttgagtagagatggggaacaagaacccagatgctgtcccctcaccccctctcctgtatttctcaggtccagttcaaatctaaaattctacttttagagttgaaacagagtaataacttatctaaccctcttttcctacaaaggagaaagataaaaggcacaaaggttaccgccaaggcccgtcagctgtgtagtggcaaagccgagaccgagtctcctaagtccccgtcagtgtggttttcaccacaggactgtctcttgtcgttttcccctaatgccttctcctgccttttctgtgcctagtttttggctcttcacatattccatattgattttgacgctctgtatattggcatcaggtggcagctgaatatcttttgaattactcgaaggtaaagccagatgccagaatgaaggtgtagccagtgtttcccatatgcccctggagccccacttattgaggccagcagaataggtgcagagatgaagtgagcttagagatgttgcaaatgctctttatcccttcagctctctgatctgctctttcttcatgatacttagtctgcagggcatattaagatcatcccagaggttcaggcagttcctgtcatctctgaaaagactgggggatatgaaatcttccccctaccccacttaatgcgttggatatgatttttcaaagaatgcttcatgcccaaaataccagcctgtttagcagtgttacactgtttgatctgcgggcacttgttgcattgcctggcacccaatattcagggtccatgactaagactggtcttctcagatgccctgcttaaatcaggggcacttcaggctccacaggcgtcatgttggactgagacctaactcactggactcagaggaggaatcgtggaaaacaagagcaaaactaccccacacccctatttcatgtctgaaataaccctgtttcataccagttgcaaagcttgtggggagcggtcccacaaagcactttcttaaaccttgagaatctccaagagaaaaatatttggggaaggagggaggaaatatgtcccttgcacaccacccctgaagcacatggcagtagggaaacagcataggattgtatgtgggaggtggataggtcggtgatgtgtggagcggaaaagcaggttggtaaagttcccttcttgggacttattcctggagtcagtggatacaagtagtgcagaaggttcacactgcaaatagtgttctcatctcaaagcaaactatcattccagaaggaaaagtgtgtcagggcaagcagacaacacaatttcctatcagaatatgtccctcaacccccgaaacaaggcttctctcagcctccccaccagtgatggataacagctcctattctcagctgacctgactgagccaacccatgaactcttcactccttggggaagccacctcccatcacacccctgagcagagttagggaggaattctacttcccataaaaggacctctcctgagaggcaaaacctgttgcctccaccacggcttccctcttggctcattccaagcttggccaaattggggaagtgggatggaggttgccctgcatcccccctcctctgcctgagtgtgtctttgtaatgtcagctggcatcatacaaagagcaggagaagcaaacacccagaactcttttgctggtcagagattccctgagtgtctgtcctcacccaagcctgctctgtgtctgtgttgtgaagcttgagactctggaaagaaatggggagggggggcaggggaaatgttgccctaagaatgcttctcattcctctgttcttattgggtcctgtttttcgggagggtgggggttgggggaagcttgaccttgtgtcttcgtcaataaactcacatttacacaaaa

SEQ ID NO: 366087 - DNA, 5708 bp, Homo sapiens
acgtcagagtttcctgcccaccatctttgtccctggcaaagtgggttttgcgcagtggcttagacctagaaaagaatcgtgacgggcaggaaaccattacaccaccacctgggctgtgctctccggctcccgccgccacccccgccctcgccttcgcctccgcctccggtgcacattaaagatccaaagtcatgactgactccaagtatttcacaaccaataaaaaaggagaaatatttgaactaaaagctgaactcaacaatgaaaagaaagaaaagagaaaggaggctgtgaagaaagtgattgctgctatgaccgtggggaaggatgttagttctctctttccagacgtagtgaactgtatgcagactgacaatctggaactaaagaagcttgtgtatctctacttgatgaactacgccaagagtcagccagacatggccatcatggctgtaaacagctttgtgaaggactgtgaagatcctaatcctttgattcgagccttggcagtcagaaccatggggtgcatccgggtagacaaaattacagaatatctctgtgagccgctccgcaagtgcttgaaggatgaggatccctatgttcggaaaacagcagcagtctgcgtggcaaaactccatgatatcaatgcccaaatggtggaagatcagggatttctggattctctacgggatctcatagcagattcaaatccaatggtggtggctaatgccgtagcggcattatctgaaatcagtgagtctcacccaaacagcaacttacttgatctgaacccacagaacattaataagctgctgacagccctgaatgaatgcactgaatggggccagattttcatcctggactgcctgtctaattacaaccctaaagatgatcgggaggctcagagcatctgtgagcgggtaactccccggctatcccatgccaactcagcagtggtgctttcagcggtaaaagtcctaatgaagtttctagaattgttacctaaggattctgactactacaatatgctgctgaagaagttagcccctccacttgtcactttgctgtctggggagccagaagtgcagtatgtcgccctgaggaacatcaacttaattgtccagaaaaggcctgaaatcttgaagcaggaaatcaaagtcttctttgtgaagtacaatgatcccatctatgttaaactagagaagttggacatcatgattcgtttggcatctcaagccaacattgctcaggttctggcagaactgaaagaatatgctacagaggtggatgttgactttgttcgaaaagctgtgcgggccattggacggtgtgccatcaaggtggagcaatctgcagagcgctgtgtaagcacattgcttgatctaatccagaccaaagtgaattatgtggtccaagaagcaattgttgtcatcagggacatcttccgcaaataccccaacaagtatgaaagtatcatcgccactctgtgtgagaacttagactcgctggatgagccagatgctcgagcagctatgatttggattgtgggagaatatgctgaaagaattgacaatgcagatgagttactagaaagcttcctggagggttttcacgatgaaagcacccaggtgcagctcactctgcttactgccatagtgaagctgtttctcaagaaaccatcagaaacacaggagctagtccagcaggtcttgagtttggcaacacaggattctgataatcctgaccttcgagaccggggctatatttattggcgccttctctcaactgaccctgttacagctaaagaagtagtcttgtctgagaagccactgatctctgaggagacggaccttattgagccaactctgctggatgagctaatctgccacattggttctttggcctctgtgtatcataagcctcccaatgcttttgtggaaggaagtcatggaattcatcgtaaacacttgccaattcatcatgggagcactgatgcaggtgacagccctgttggcactaccactgcaacgaacctggaacagcctcaggttatcccctctcaaggtgatcttctaggggatcttttaaaccttgacctcggtcccccagtcaatgtgccacaggtgtcctccatgcagatgggagcagtggatctcctaggaggaggactagatagtctgcttggcagtgaccttggcgggggcattggaggaagtccggcagtgggacaatccttcatcccatcatcggtgcctgcaacctttgctccttcacctacacctgctgtggtcagcagtggactgaatgacctgtttgaactctccacagggataggcatggcacctggtggatatgtggctcctaaggctgtctggctacctgcagtaaaggctaaaggcttggagatttccggaacatttactcaccgccaagggcacatctatatggaaatgaacttcaccaataaagctctgcagcacatgacagattttgcaatccagtttaacaaaaatagctttggtgtcatccccagcactcctctggccatccatacaccactgatgccaaaccagagcattgatgtctccctgcctctcaataccttgggcccagtcatgaagatggaacctctgaataacctccaggtggctgtgaaaaacaatatcgatgtcttctacttcagctgcctcatcccactcaatgtgctttttgtagaagatggcaaaatggagcgccaggtcttccttgcaacatggaaggatattcccaatgaaaatgaacttcagtttcagattaaggaatgtcatttaaatgctgacactgtttccagcaagttgcaaaacaacaatgtttatactattgccaagaggaatgtggaagggcaggacatgctgtaccaatccctgaagctcactaatggcatttggattttggccgaactacgtatccagccaggaaaccccaattacacgctgtcactgaagtgtagagctcctgaagtctctcaatacatctatcaggtctacgacagcattttgaaaaactaacaagactggtccagtacccttcaaccatgctgtgatcggtgcaagtcaagaactcttaactggaagaaattgtattgctgcgtagaatctgaacacactgaggccacctagcaaggtagtaactagtctaacctgtgctaacattagggcacaacctgttggatagttttagcttcctgtgaacatttgtaaccactgcttcagtcacctcccacctcttgccacctgctgctgctatctgtccttacttgtgggcttctccatgctgtgccaatggctggctttttctacaccctcttttgagtgtagtttggtattttgtaattgagagctcatttcaaaagcagaaaaagacaacaaatattaaagcaaggaaaagtgtaactgaaacactgcactttactgttttatacttttgtacatatgagaaatcaagggattagtgcaaccagtagaaagcattgaaatgactgtcattaaccacacagtcctggaggcagagatgcagttacctaccctagcttttgatgggttctcttacctgtagtagccttatccctggtcatttggattttcagtttgcttttttctttttttcccctccaaactccttttccttggccaagccttcatgcttccccctttccatattataatctcatttgattgctctgcagttgggaacggtgatcttcttgaatgatgtttcagtgtgcaaaaactatagagcctgtcagcaccaaagctgacagaagttataccttactcctttcctttcccctgaacaaacctgctaatcccactaattcaggaatttgagtagagatggggaacaagaacccagatgctgtcccctcaccccctctcctgtatttctcaggtccagttcaaatctaaaattctacttttagagttgaaacagagtaataacttatctaaccctcttttcctacaaaggagaaagataaaaggcacaaaggttaccgccaaggcccgtcagctgtgtagtggcaaagccgagaccgagtctcctaagtccccgtcagtgtggttttcaccacaggactgtctcttgtcgttttcccctaatgccttctcctgccttttctgtgcctagtttttggctcttcacatattccatattgattttgacgctctgtatattggcatcaggtggcagctgaatatcttttgaattactcgaaggtaaagccagatgccagaatgaaggtgtagccagtgtttcccatatgcccctggagccccacttattgaggccagcagaataggtgcagagatgaagtgagcttagagatgttgcaaatgctctttatcccttcagctctctgatctgctctttcttcatgatacttagtctgcagggcatattaagatcatcccagaggttcaggcagttcctgtcatctctgaaaagactgggggatatgaaatcttccccctaccccacttaatgcgttggatatgatttttcaaagaatgcttcatgcccaaaataccagcctgtttagcagtgttacactgtttgatctgcgggcacttgttgcattgcctggcacccaatattcagggtccatgactaagactggtcttctcagatgccctgcttaaatcaggggcacttcaggctccacaggcgtcatgttggactgagacctaactcactggactcagaggaggaatcgtggaaaacaagagcaaaactaccccacacccctatttcatgtctgaaataaccctgtttcataccagttgcaaagcttgtggggagcggtcccacaaagcactttcttaaaccttgagaatctccaagagaaaaatatttggggaaggagggaggaaatatgtcccttgcacaccacccctgaagcacatggcagtagggaaacagcataggattgtatgtgggaggtggataggtcggtgatgtgtggagcggaaaagcaggttggtaaagttcccttcttgggacttattcctggagtcagtggatacaagtagtgcagaaggttcacactgcaaatagtgttctcatctcaaagcaaactatcattccagaaggaaaagtgtgtcagggcaagcagacaacacaatttcctatcagaatatgtccctcaacccccgaaacaaggcttctctcagcctccccaccagtgatggataacagctcctattctcagctgacctgactgagccaacccatgaactcttcactccttggggaagccacctcccatcacacccctgagcagagttagggaggaattctacttcccataaaaggacctctcctgagaggcaattggggaagtgggatggaggttgccctgcatcccccctcctctgcctgagtgtgtctttgtaatgtcagctggcatcatacaaagagcaggagaagcaaacacccagaactcttttgctggtcagagattccctgagtgtctgtcctcacccaagcctgctctgtgtctgtgttgtgaagcttgagactctggaaagaaatggggagggggggcaggggaaatgttgccctaagaatgcttctcattcctctgttcttattgggtcctgtttttcgggagggtgggggttgggggaagcttgaccttgtgtcttcgtcaataaactcacatttacacaaaa

SEQ ID NO: 366088 - DNA, 3630 bp, Homo sapiens
gagaaataaaaatcaaggtttagcgtcaagtttctgtttgaatcgtaattcttctgtgtactagctacatgactctggatgttacttagtctttctaaacctgagtttcattatctgcgaaatgagaggggaatgatatctactttgtttgagatcattatagtgtgagttagaaataatatcattaataggtaacttagtaagtggtagcagctactattaataatcatagagaaaaaaatcacagactagattattcctggtatacaagttgtgccttgaagacaggccttctggaaggaggtagagttgcaggttgtcacagttctatgacaatggagtaagtaagggtgtgctttgcagtatatgggccagtttgtttgatttggggagacctgcactgagagaaagaggaaggaaatagggaggcctatttctagacacagcgctgttcttttcctcctacctggctccctgcgatgtcctcatttgaccttgttgctttcctggcaggtggctgtgaaaaacaatatcgatgtcttctacttcagctgcctcatcccactcaatgtgctttttgtagaagatggcaaaatggagcgccaggtcttccttgcaacatggaaggatattcccaatgaaaatgaacttcagtttcagattaaggaatgtcatttaaatgctgacactgtttccagcaagttgcaaaacaacaatgtttatactattgccaagaggaatgtggaagggcaggacatgctgtaccaatccctgaagctcactaatggcatttggattttggccgaactacgtatccagccaggaaaccccaattacacgctgtcactgaagtgtagagctcctgaagtctctcaatacatctatcaggtctacgacagcattttgaaaaactaacaagactggtccagtacccttcaaccatgctgtgatcggtgcaagtcaagaactcttaactggaagaaattgtattgctgcgtagaatctgaacacactgaggccacctagcaaggtagtaactagtctaacctgtgctaacattagggcacaacctgttggatagttttagcttcctgtgaacatttgtaaccactgcttcagtcacctcccacctcttgccacctgctgctgctatctgtccttacttgtgggcttctccatgctgtgccaatggctggctttttctacaccctcttttgagtgtagtttggtattttgtaattgagagctcatttcaaaagcagaaaaagacaacaaatattaaagcaaggaaaagtgtaactgaaacactgcactttactgttttatacttttgtacatatgagaaatcaagggattagtgcaaccagtagaaagcattgaaatgactgtcattaaccacacagtcctggaggcagagatgcagttacctaccctagcttttgatgggttctcttacctgtagtagccttatccctggtcatttggattttcagtttgcttttttctttttttcccctccaaactccttttccttggccaagccttcatgcttccccctttccatattataatctcatttgattgctctgcagttgggaacggtgatcttcttgaatgatgtttcagtgtgcaaaaactatagagcctgtcagcaccaaagctgacagaagttataccttactcctttcctttcccctgaacaaacctgctaatcccactaattcaggaatttgagtagagatggggaacaagaacccagatgctgtcccctcaccccctctcctgtatttctcaggtccagttcaaatctaaaattctacttttagagttgaaacagagtaataacttatctaaccctcttttcctacaaaggagaaagataaaaggcacaaaggttaccgccaaggcccgtcagctgtgtagtggcaaagccgagaccgagtctcctaagtccccgtcagtgtggttttcaccacaggactgtctcttgtcgttttcccctaatgccttctcctgccttttctgtgcctagtttttggctcttcacatattccatattgattttgacgctctgtatattggcatcaggtggcagctgaatatcttttgaattactcgaaggtaaagccagatgccagaatgaaggtgtagccagtgtttcccatatgcccctggagccccacttattgaggccagcagaataggtgcagagatgaagtgagcttagagatgttgcaaatgctctttatcccttcagctctctgatctgctctttcttcatgatacttagtctgcagggcatattaagatcatcccagaggttcaggcagttcctgtcatctctgaaaagactgggggatatgaaatcttccccctaccccacttaatgcgttggatatgatttttcaaagaatgcttcatgcccaaaataccagcctgtttagcagtgttacactgtttgatctgcgggcacttgttgcattgcctggcacccaatattcagggtccatgactaagactggtcttctcagatgccctgcttaaatcaggggcacttcaggctccacaggcgtcatgttggactgagacctaactcactggactcagaggaggaatcgtggaaaacaagagcaaaactaccccacacccctatttcatgtctgaaataaccctgtttcataccagttgcaaagcttgtggggagcggtcccacaaagcactttcttaaaccttgagaatctccaagagaaaaatatttggggaaggagggaggaaatatgtcccttgcacaccacccctgaagcacatggcagtagggaaacagcataggattgtatgtgggaggtggataggtcggtgatgtgtggagcggaaaagcaggttggtaaagttcccttcttgggacttattcctggagtcagtggatacaagtagtgcagaaggttcacactgcaaatagtgttctcatctcaaagcaaactatcattccagaaggaaaagtgtgtcagggcaagcagacaacacaatttcctatcagaatatgtccctcaacccccgaaacaaggcttctctcagcctccccaccagtgatggataacagctcctattctcagctgacctgactgagccaacccatgaactcttcactccttggggaagccacctcccatcacacccctgagcagagttagggaggaattctacttcccataaaaggacctctcctgagaggcaaaacctgttgcctccaccacggcttccctcttggctcattccaagcttggccaaattggggaagtgggatggaggttgccctgcatcccccctcctctgcctgagtgtgtctttgtaatgtcagctggcatcatacaaagagcaggagaagcaaacacccagaactcttttgctggtcagagattccctgagtgtctgtcctcacccaagcctgctctgtgtctgtgttgtgaagcttgagactctggaaagaaatggggagggggggcaggggaaatgttgccctaagaatgcttctcattcctctgttcttattgggtcctgtttttcgggagggtgggggttgggggaagcttgaccttgtgtcttcgtcaataaactcacatttacacaaaa

SEQ ID NO: 366089 - DNA, 1341 bp, Homo sapiens
aaccggttcgccatgttcccactgcagtaggtgcttttgactattttctttatggtgtctttaaagcacaacagtttttagattttggtgaaatcccacttacctacattttctttttgctatgcacttcatgcccaaaataccagcctgtttagcagtgttacactgtttgatctgcgggcacttgttgcattgcctggcacccaatattcagggtccatgactaagactggtcttctcagatgccctgcttaaatcaggggcacttcaggctccacaggcgtcatgttggactgagacctaactcactggactcagaggaggaatcgtggaaaacaagagcaaaactaccccacacccctatttcatgtctgaaataaccctgtttcataccagttgcaaagcttgtggggagcggtcccacaaagcactttcttaaaccttgagaatctccaagagaaaaatatttggggaaggagggaggaaatatgtcccttgcacaccacccctgaagcacatggcagtagggaaacagcataggattgtatgtgggaggtggataggtcggtgatgtgtggagcggaaaagcaggttggtaaagttcccttcttgggacttattcctggagtcagtggatacaagtagtgcagaaggttcacactgcaaatagtgttctcatctcaaagcaaactatcattccagaaggaaaagtgtgtcagggcaagcagacaacacaatttcctatcagaatatgtccctcaacccccgaaacaaggcttctctcagcctccccaccagtgatggataacagctcctattctcagctgacctgactgagccaacccatgaactcttcactccttggggaagccacctcccatcacacccctgagcagagttagggaggaattctacttcccataaaaggacctctcctgagaggcaaaacctgttgcctccaccacggcttccctcttggctcattccaagcttggccaaattggggaagtgggatggaggttgccctgcatcccccctcctctgcctgagtgtgtctttgtaatgtcagctggcatcatacaaagagcaggagaagcaaacacccagaactcttttgctggtcagagattccctgagtgtctgtcctcacccaagcctgctctgtgtctgtgttgtgaagcttgagactctggaaagaaatggggagggggggcaggggaaatgttgccctaagaatgcttctcattcctctgttcttattgggtcctgtttttcgggagggtgggggttgggggaagcttgaccttgtgtcttcgtcaataaactcacatttacacaaaa

SEQ ID NO: 366090 - DNA, 1016 bp, Homo sapiens
tcttgtccttggtaataagagcagagacaggacccctatttcatgtctgaaataaccctgtttcataccagttgcaaagcttgtggggagcggtcccacaaagcactttcttaaaccttgagaatctccaagagaaaaatatttggggaaggagggaggaaatatgtcccttgcacaccacccctgaagcacatggcagtagggaaacagcataggattgtatgtgggaggtggataggtcggtgatgtgtggagcggaaaagcaggttggtaaagttcccttcttgggacttattcctggagtcagtggatacaagtagtgcagaaggttcacactgcaaatagtgttctcatctcaaagcaaactatcattccagaaggaaaagtgtgtcagggcaagcagacaacacaatttcctatcagaatatgtccctcaacccccgaaacaaggcttctctcagcctccccaccagtgatggataacagctcctattctcagctgacctgactgagccaacccatgaactcttcactccttggggaagccacctcccatcacacccctgagcagagttagggaggaattctacttcccataaaaggacctctcctgagaggcaaaacctgttgcctccaccacggcttccctcttggctcattccaagcttggccaaattggggaagtgggatggaggttgccctgcatcccccctcctctgcctgagtgtgtctttgtaatgtcagctggcatcatacaaagagcaggagaagcaaacacccagaactcttttgctggtcagagattccctgagtgtctgtcctcacccaagcctgctctgtgtctgtgttgtgaagcttgagactctggaaagaaatggggagggggggcaggggaaatgttgccctaagaatgcttctcattcctctgttcttattgggtcctgtttttcgggagggtgggggttgggggaagcttgaccttgtgtcttcgtcaataaactcacatttacacaaaa

SEQ ID NO: 366091 - DNA, 2544 bp, Homo sapiens
acgtcagagtttcctgcccaccatctttgtccctggcaaagtgggttttgcgcagtggcttagacctagaaaagaatcgtgacgggcaggaaaccattacaccaccacctgggctgtgctctccggctcccgccgccacccccgccctcgccttcgcctccgcctccggtgcacattaaagatccaaagtcatgactgactccaagtatttcacaaccaataaaaaaggagaaatatttgaactaaaagctgaactcaacaatgaaaagaaagaaaagagaaaggaggctgtgaagaaagtgattgctgctatgaccgtggggaaggatgttagttctctctttccagacgtagtgaactgtatgcagactgacaatctggaactaaagaagcttgtgtatctctacttgatgaactacgccaagagtcagccagacatggccatcatggctgtaaacagctttgtgaaggactgtgaagatcctaatcctttgattcgagccttggcagtcagaaccatggggtgcatccgggtagacaaaattacagaatatctctgtgagccgctccgcaagtgcttgaaggatgaggatccctatgttcggaaaacagcagcagtctgcgtggcaaaactccatgatatcaatgcccaaatggtggaagatcagggatttctggattctctacgggatctcatagcagattcaaatccaatggtggtggctaatgccgtagcggcattatctgaaatcagtgagtctcacccaaacagcaacttacttgatctgaacccacagaacattaataagctgctgacagccctgaatgaatgcactgaatggggccagattttcatcctggactgcctgtctaattacaaccctaaagatgatcgggaggctcagagcatctgtgagcgggtaactccccggctatcccatgccaactcagcagtggtgctttcagcggtaaaagtcctaatgaagtttctagaattgttacctaaggattctgactactacaatatgctgctgaagaagttagcccctccacttgtcactttgctgtctggggagccagaagtgcagtatgtcgccctgaggaacatcaacttaattgtccagaaaaggcctgaaatcttgaagcaggaaatcaaagtcttctttgtgaagtacaatgatcccatctatgttaaactagagaagttggacatcatgattcgtttggcatctcaagccaacattgctcaggttctggcagaactgaaagaatatgctacagaggtggatgttgactttgttcgaaaagctgtgcgggccattggacggtgtgccatcaaggtggagcaatctgcagagcgctgtgtaagcacattgcttgatctaatccagaccaaagtgaattatgtggtccaagaagcaattgttgtcatcagggacatcttccgcaaataccccaacaagtatgaaagtatcatcgccactctgtgtgagaacttagactcgctggatgagccagatgctcgagcagctatgatttggattgtgggagaatatgctgaaagaattgacaatgcagatgagttactagaaagcttcctggagggttttcacgatgaaagcacccaggtgcagctcactctgcttactgccatagtgaagctgtttctcaagaaaccatcagaaacacaggagctagtccagcaggtcttgagtttggcaacacaggattctgataatcctgaccttcgagaccggggctatatttattggcgccttctctcaactgaccctgttacagctaaagaagtagtcttgtctgagaagccactgatctctgaggagacggaccttattgagccaactctgctggatgagctaatctgccacattggttctttggcctctgtgtatcataagcctcccaatgcttttgtggaaggaagtcatggaattcatcgtaaacacttgccaattcatcatgggagcactgatgcaggtgacagccctgttggcactaccactgcaacgaacctggaacagcctcaggttatcccctctcaaggtgatcttctaggggatcttttaaaccttgacctcggtcccccagtcaatgtgccacaggtgtcctccatgcagatgggagcagtggatctcctaggaggaggactagatagtctgccccagaaattgtttacagtgcagttttcttcagcttattctgagattgaaagatatcccagaaatcaagatgagaagaaattaaagcccttatttttgctttggatccgtatgtggttaaatatatattcactcagagaatcaaggttcctttttcgagaacatcacaaggaagacctaaatttgcctgtgtggaagaagatgagtttctaaggcggcagtggacttttaaaatgcttttattgttcttatgcaaattacctaaagagaagattaatcctcaaagccattttttgaatgcatccttgccttacagagtgcttctcaaaataaattatataccttgaatctcctaaaaaaaaag

SEQ ID NO: 366092 - DNA, 500 bp, Homo sapiens
atggaatggaagaatccattcaactccttttcattccattccgttccatctgattccattccattctaatcaattccattccattccattccattccattccattccattccattcctttacattccattccattccatttcagtccattccactccagtccattccattggagtccattccattcctttccattccattacggatgattccattccattgcattccattccattccattcccctgtactcgggttgaacacccagaactcttttgctggtcagagattccctgagtgtctgtcctcacccaagcctgctctgtgtctgtgttgtgaagcttgagactctggaaagaaatggggagggggggcaggggaaatgttgccctaagaatgcttctcattcctctgttcttattgggtcctgtttttcgggagggtgggggttgggggaagcttgaccttgtgtcttcgtcaataaactcacatttacacaaaa

SEQ ID NO: 366093 - DNA, 219 bp, Homo sapiens
gaaaaacaatatcgatgtcttctacttcagctgcctcatcccactcaatgtgctttttgtagaagatggcaaaatgggtaagtaccttcctgcctgtcctgctgaatatacctttgcccttcctgtgcatgtcaggcagagcatagccccagaagttttgagttattttgaggttaaaaaaaaatgggttaaggatattctaaagctcttaataattgc

SEQ ID NO: 366094 - DNA, 3444 bp, Homo sapiens
acgtcagagtttcctgcccaccatctttgtccctggcaaagtgggttttgcgcagtggcttagacctagaaaagaatcgtgacgggcaggaaaccattacaccaccacctgggctgtgctctccggctcccgccgccacccccgccctcgccttcgcctccgcctccggtgcacattaaagatccaaagtcatgactgactccaagtatttcacaaccaataaaaaaggagaaatatttgaactaaaagctgaactcaacaatgaaaagaaagaaaagagaaaggaggctgtgaagaaagtgattgctgctatgaccgtggggaaggatgttagttctctctttccagacgtagtgaactgtatgcagactgacaatctggaactaaagaagcttgtgtatctctacttgatgaactacgccaagagtcagccagacatggccatcatggctgtaaacagctttgtgaaggactgtgaagatcctaatcctttgattcgagccttggcagtcagaaccatggggtgcatccgggtagacaaaattacagaatatctctgtgagccgctccgcaagtgcttgaaggatgaggatccctatgttcggaaaacagcagcagtctgcgtggcaaaactccatgatatcaatgcccaaatggtggaagatcagggatttctggattctctacgggatctcatagcagattcaaatccaatggtggtggctaatgccgtagcggcattatctgaaatcagtgagtctcacccaaacagcaacttacttgatctgaacccacagaacattaataagctgctgacagccctgaatgaatgcactgaatggggccagattttcatcctggactgcctgtctaattacaaccctaaagatgatcgggaggctcagagcatctgtgagcgggtaactccccggctatcccatgccaactcagcagtggtgctttcagcggtaaaagtcctaatgaagtttctagaattgttacctaaggattctgactactacaatatgctgctgaagaagttagcccctccacttgtcactttgctgtctggggagccagaagtgcagtatgtcgccctgaggaacatcaacttaattgtccagaaaaggcctgaaatcttgaagcaggaaatcaaagtcttctttgtgaagtacaatgatcccatctatgttaaactagagaagttggacatcatgattcgtttggcatctcaagccaacattgctcaggttctggcagaactgaaagaatatgctacagaggtggatgttgactttgttcgaaaagctgtgcgggccattggacggtgtgccatcaaggtggagcaatctgcagagcgctgtgtaagcacattgcttgatctaatccagaccaaagtgaattatgtggtccaagaagcaattgttgtcatcagggacatcttccgcaaataccccaacaagtatgaaagtatcatcgccactctgtgtgagaacttagactcgctggatgagccagatgctcgagcagctatgatttggattgtgggagaatatgctgaaagaattgacaatgcagatgagttactagaaagcttcctggagggttttcacgatgaaagcacccaggtgcagctcactctgcttactgccatagtgaagctgtttctcaagaaaccatcagaaacacaggagctagtccagcaggtcttgagtttggcaacacaggattctgataatcctgaccttcgagaccggggctatatttattggcgccttctctcaactgaccctgttacagctaaagaagtagtcttgtctgagaagccactgatctctgaggagacggaccttattgagccaactctgctggatgagctaatctgccacattggttctttggcctctgtgtatcataagcctcccaatgcttttgtggaaggaagtcatggaattcatcgtaaacacttgccaattcatcatgggagcactgatgcaggtgacagccctgttggcactaccactgcaacgaacctggaacagcctcaggttatcccctctcaaggtgatcttctaggggatcttttaaaccttgacctcggtcccccagtcaatgtgccacaggtgtcctccatgcagatgggagcagtggatctcctaggaggaggactagatagtctgcttggcagtgaccttggcgggggcattggaggaagtccggcagtgggacaatccttcatcccatcatcggtgcctgcaacctttgctccttcacctacacctgctgtggtcagcagtggactgaatgacctgtttgaactctccacagggataggcatggcacctggtggatatgtggctcctaaggctgtctggctacctgcagtaaaggctaaaggcttggagatttccggaacatttactcaccgccaagggcacatctatatggaaatgaacttcaccaataaagctctgcagcacatgacagattttgcaatccagtttaacaaaaatagctttggtgtcatccccagcactcctctggccatccatacaccactgatgccaaaccagagcattgatgtctccctgcctctcaataccttgggcccagtcatgaagatggaacctctgaataacctccaggtggctgtgaaaaacaatatcgatgtcttctacttcagctgcctcatcccactcaatgtgctttttgtagaagatggcaaaatggagcgccaggtcttccttgcaacatggaaggatattcccaatgaaaatgaacttcagtttcagattaaggaatgtcatttaaatgctgacactgtttccagcaagttgcaaaacaacaatgtttatactattgccaagaggaatgtggaagggcaggacatgctgtaccaatccctgaagctcactaatggcatttggattttggccgaactacgtatccagccaggaaaccccaattacacgctgtcactgaagtgtagagctcctgaagtctctcaatacatctatcaggtctacgacagcattttgaaaaactaacaagactggtccagtacccttcaaccatgctgtgatcggtgcaagtcaagaactcttaactggaagaaattgtattgctgcgtagaatctgaacacactgaggccacctagcaaggtagtaactagtctaacctgtgctaacattagggcacaacctgttggatagttttagcttcctgtgaacatttgtaaccactgcttcagtcacctcccacctcttgccacctgctgctgctatctgtccttacttgtgggcttctccatgctgtgccaatggctggctttttctacaccctcttttgagtgtagtttggtattttgtaattgagagctcatttcaaaagcagaaaaagacaacaaatattaaagcaaggaaaagtgtaactgaaacactgca

SEQ ID NO: 366095 - DNA, 5762 bp, Homo sapiens
acgtcagagtttcctgcccaccatctttgtccctggcaaagtgggttttgcgcagtggcttagacctagaaaagaatcgtgacgggcaggaaaccattacaccaccacctgggctgtgctctccggctcccgccgccacccccgccctcgccttcgcctccgcctccggtgcacattaaagatccaaagtcatgactgactccaagtatttcacaaccaataaaaaaggagaaatatttgaactaaaagctgaactcaacaatgaaaagaaagaaaagagaaaggaggctgtgaagaaagtgattgctgctatgaccgtggggaaggatgttagttctctctttccagacgtagtgaactgtatgcagactgacaatctggaactaaagaagcttgtgtatctctacttgatgaactacgccaagagtcagccagacatggccatcatggctgtaaacagctttgtgaaggactgtgaagatcctaatcctttgattcgagccttggcagtcagaaccatggggtgcatccgggtagacaaaattacagaatatctctgtgagccgctccgcaagtgcttgaaggatgaggatccctatgttcggaaaacagcagcagtctgcgtggcaaaactccatgatatcaatgcccaaatggtggaagatcagggatttctggattctctacgggatctcatagcagattcaaatccaatggtggtggctaatgccgtagcggcattatctgaaatcagtgagtctcacccaaacagcaacttacttgatctgaacccacagaacattaataagctgctgacagccctgaatgaatgcactgaatggggccagattttcatcctggactgcctgtctaattacaaccctaaagatgatcgggaggctcagagcatctgtgagcgggtaactccccggctatcccatgccaactcagcagtggtgctttcagcggtaaaagtcctaatgaagtttctagaattgttacctaaggattctgactactacaatatgctgctgaagaagttagcccctccacttgtcactttgctgtctggggagccagaagtgcagtatgtcgccctgaggaacatcaacttaattgtccagaaaaggcctgaaatcttgaagcaggaaatcaaagtcttctttgtgaagtacaatgatcccatctatgttaaactagagaagttggacatcatgattcgtttggcatctcaagccaacattgctcaggttctggcagaactgaaagaatatgctacagaggtggatgttgactttgttcgaaaagctgtgcgggccattggacggtgtgccatcaaggtggagcaatctgcagagcgctgtgtaagcacattgcttgatctaatccagaccaaagtgaattatgtggtccaagaagcaattgttgtcatcagggacatcttccgcaaataccccaacaagtatgaaagtatcatcgccactctgtgtgagaacttagactcgctggatgagccagatgctcgagcagctatgatttggattgtgggagaatatgctgaaagaattgacaatgcagatgagttactagaaagcttcctggagggttttcacgatgaaagcacccaggtgcagctcactctgcttactgccatagtgaagctgtttctcaagaaaccatcagaaacacaggagctagtccagcaggtcttgagtttggcaacacaggattctgataatcctgaccttcgagaccggggctatatttattggcgccttctctcaactgaccctgttacagctaaagaagtagtcttgtctgagaagccactgatctctgaggagacggaccttattgagccaactctgctggatgagctaatctgccacattggttctttggcctctgtgtatcataagcctcccaatgcttttgtggaaggaagtcatggaattcatcgtaaacacttgccaattcatcatgggagcactgatgcaggtgacagccctgttggcactaccactgcaacgaacctggaacagcctcaggttatcccctctcaaggtgatcttctaggggatcttttaaaccttgacctcggtcccccagtcaatgtgccacaggtgtcctccatgcagatgggagcagtggatctcctaggaggaggactagatagtctgcttggcagtgaccttggcgggggcattggaggaagtccggcagtgggacaatccttcatcccatcatcggtgcctgcaacctttgctccttcacctacacctgctgtggtcagcagtggactgaatgacctgtttgaactctccacagggataggcatggcacctggtggatatgtggctcctaaggctgtctggctacctgcagtaaaggctaaaggcttggagatttccggaacatttactcaccgccaagggcacatctatatggaaatgaacttcaccaataaagctctgcagcacatgacagattttgcaatccagtttaacaaaaatagctttggtgtcatccccagcactcctctggccatccatacaccactgatgccaaaccagagcattgatgtctccctgcctctcaataccttgggcccagtcatgaagatggaacctctgaataacctccaggtggctgtgaaaaacaatatcgatgtcttctacttcagctgcctcatcccactcaatgtgctttttgtagaagatggcaaaatggagcgccaggtcttccttgcaacatggaaggatattcccaatgaaaatgaacttcagtttcagattaaggaatgtcatttaaatgctgacactgtttccagcaagttgcaaaacaacaatgtttatactattgccaagaggaatgtggaagggcaggacatgctgtaccaatccctgaagctcactaatggcatttggattttggccgaactacgtatccagccaggaaaccccaattacacgctgtcactgaagtgtagagctcctgaagtctctcaatacatctatcaggtctacgacagcattttgaaaaactaacaagactggtccagtacccttcaaccatgctgtgatcggtgcaagtcaagaactcttaactggaagaaattgtattgctgcgtagaatctgaacacactgaggccacctagcaaggtagtaactagtctaacctgtgctaacattagggcacaacctgttggatagttttagcttcctgtgaacatttgtaaccactgcttcagtcacctcccacctcttgccacctgctgctgctatctgtccttacttgtgggcttctccatgctgtgccaatggctggctttttctacaccctcttttgagtgtagtttggtattttgtaattgagagctcatttcaaaagcagaaaaagacaacaaatattaaagcaaggaaaagtgtaactgaaacactgcactttactgttttatacttttgtacatatgagaaatcaagggattagtgcaaccagtagaaagcattgaaatgactgtcattaaccacacagtcctggaggcagagatgcagttacctaccctagcttttgatgggttctcttacctgtagtagccttatccctggtcatttggattttcagtttgcttttttctttttttcccctccaaactccttttccttggccaagccttcatgcttccccctttccatattataatctcatttgattgctctgcagttgggaacggtgatcttcttgaatgatgtttcagtgtgcaaaaactatagagcctgtcagcaccaaagctgacagaagttataccttactcctttcctttcccctgaacaaacctgctaatcccactaattcaggaatttgagtagagatggggaacaagaacccagatgctgtcccctcaccccctctcctgtatttctcaggtccagttcaaatctaaaattctacttttagagttgaaacagagtaataacttatctaaccctcttttcctacaaaggagaaagataaaaggcacaaaggttaccgccaaggcccgtcagctgtgtagtggcaaagccgagaccgagtctcctaagtccccgtcagtgtggttttcaccacaggactgtctcttgtcgttttcccctaatgccttctcctgccttttctgtgcctagtttttggctcttcacatattccatattgattttgacgctctgtatattggcatcaggtggcagctgaatatcttttgaattactcgaaggtaaagccagatgccagaatgaaggtgtagccagtgtttcccatatgcccctggagccccacttattgaggccagcagaataggtgcagagatgaagtgagcttagagatgttgcaaatgctctttatcccttcagctctctgatctgctctttcttcatgatacttagtctgcagggcatattaagatcatcccagaggttcaggcagttcctgtcatctctgaaaagactgggggatatgaaatcttccccctaccccacttaatgcgttggatatgatttttcaaagaatgcttcatgcccaaaataccagcctgtttagcagtgttacactgtttgatctgcgggcacttgttgcattgcctggcacccaatattcagggtccatgactaagactggtcttctcagatgccctgcttaaatcaggggcacttcaggctccacaggcgtcatgttggactgagacctaactcactggactcagaggaggaatcgtggaaaacaagagcaaaactaccccacacccctatttcatgtctgaaataaccctgtttcataccagttgcaaagcttgtggggagcggtcccacaaagcactttcttaaaccttgagaatctccaagagaaaaatatttggggaaggagggaggaaatatgtcccttgcacaccacccctgaagcacatggcagtagggaaacagcataggattgtatgtgggaggtggataggtcggtgatgtgtggagcggaaaagcaggttggtaaagttcccttcttgggacttattcctggagtcagtggatacaagtagtgcagaaggttcacactgcaaatagtgttctcatctcaaagcaaactatcattccagaaggaaaagtgtgtcagggcaagcagacaacacaatttcctatcagaatatgtccctcaacccccgaaacaaggcttctctcagcctccccaccagtgatggataacagctcctattctcagctgacctgactgagccaacccatgaactcttcactccttggggaagccacctcccatcacacccctgagcagagttagggaggaattctacttcccataaaaggacctctcctgagaggcaaaacctgttgcctccaccacggcttccctcttggctcattccaagcttggccaaattggggaagtgggatggaggttgccctgcatcccccctcctctgcctgagtgtgtctttgtaatgtcagctggcatcatacaaagagcaggagaagcaaacacccagaactcttttgctggtcagagattccctgagtgtctgtcctcacccaagcctgctctgtgtctgtgttgtgaagcttgagactctggaaagaaatggggagggggggcaggggaaatgttgccctaagaatgcttctcattcctctgttcttattgggtcctgtttttcgggagggtgggggttgggggaagcttgaccttgtgtcttcgtcaataaactcacatttacacaaaa

SEQ ID NO: 366096 - DNA, 5816 bp, Homo sapiens
acgtcagagtttcctgcccaccatctttgtccctggcaaagtgggttttgcgcagtggcttagacctagaaaagaatcgtgacgggcaggaaaccattacaccaccacctgggctgtgctctccggctcccgccgccacccccgccctcgccttcgcctccgcctccggtgcacattaaagatccaaagtcatgactgactccaagtatttcacaaccaataaaaaaggagaaatatttgaactaaaagctgaactcaacaatgaaaagaaagaaaagagaaaggaggctgtgaagaaagtgattgctgctatgaccgtggggaaggatgttagttctctctttccagacgtagtgaactgtatgcagactgacaatctggaactaaagaagcttgtgtatctctacttgatgaactacgccaagagtcagccagacatggccatcatggctgtaaacagctttgtgaaggactgtgaagatcctaatcctttgattcgagccttggcagtcagaaccatggggtgcatccgggtagacaaaattacagaatatctctgtgagccgctccgcaagtgcttgaaggatgaggatccctatgttcggaaaacagcagcagtctgcgtggcaaaactccatgatatcaatgcccaaatggtggaagatcagggatttctggattctctacgggatctcatagcagattcaaatccaatggtggtggctaatgccgtagcggcattatctgaaatcagtgagtctcacccaaacagcaacttacttgatctgaacccacagaacattaataagctgctgacagccctgaatgaatgcactgaatggggccagattttcatcctggactgcctgtctaattacaaccctaaagatgatcgggaggctcagagcatctgtgagcgggtaactccccggctatcccatgccaactcagcagtggtgctttcagcggtaaaagtcctaatgaagtttctagaattgttacctaaggattctgactactacaatatgctgctgaagaagttagcccctccacttgtcactttgctgtctggggagccagaagtgcagtatgtcgccctgaggaacatcaacttaattgtccagaaaaggcctgaaatcttgaagcaggaaatcaaagtcttctttgtgaagtacaatgatcccatctatgttaaactagagaagttggacatcatgattcgtttggcatctcaagccaacattgctcaggttctggcagaactgaaagaatatgctacagaggtggatgttgactttgttcgaaaagctgtgcgggccattggacggtgtgccatcaaggtggagcaatctgcagagcgctgtgtaagcacattgcttgatctaatccagaccaaagtgaattatgtggtccaagaagcaattgttgtcatcagggacatcttccgcaaataccccaacaagtatgaaagtatcatcgccactctgtgtgagaacttagactcgctggatgagccagatgctcgagcagctatgatttggattgtgggagaatatgctgaaagaattgacaatgcagatgagttactagaaagcttcctggagggttttcacgatgaaagcacccaggtgcagctcactctgcttactgccatagtgaagctgtttctcaagaaaccatcagaaacacaggagctagtccagcaggtcttgagtttggcaacacaggattctgataatcctgaccttcgagaccggggctatatttattggcgccttctctcaactgaccctgttacagctaaagaagtagtcttgtctgagaagccactgatctctgaggagacggaccttattgagccaactctgctggatgagctaatctgccacattggttctttggcctctgtgtatcataagcctcccaatgcttttgtggaaggaagtcatggaattcatcgtaaacacttgccaattcatcatgggagcactgatgcaggtgacagccctgttggcactaccactgcaacgaacctggaacagcctcaggttatcccctctcaaggtgatcttctaggggatcttttaaaccttgacctcggtcccccagtcaatgtgccacaggtgtcctccatgcagatgggagcagtggatctcctaggaggaggactagatagtctggtgggacaatccttcatcccatcatcggtgcctgcaacctttgctccttcacctacacctgctgtggtcagcagtggactgaatgacctgtttgaactctccacagggataggcatggcacctggtggatatgtggctcctaaggctgtctggctacctgcagtaaaggctaaaggcttggagatttccggaacatttactcaccgccaagggcacatctatatggaaatgaacttcaccaataaagctctgcagcacatgacagattttgcaatccagtttaacaaaaatagctttggtgtcatccccagcactcctctggccatccatacaccactgatgccaaaccagagcattgatgtctccctgcctctcaataccttgggcccagtcatgaagatggaacctctgaataacctccaggttaaaagcaaggagaataattggatggacacttctgggagagagaacgcaaatattatggagaagggaatacaggcaccatttaaagtaaggaaggtggctgtgaaaaacaatatcgatgtcttctacttcagctgcctcatcccactcaatgtgctttttgtagaagatggcaaaatggagcgccaggtcttccttgcaacatggaaggatattcccaatgaaaatgaacttcagtttcagattaaggaatgtcatttaaatgctgacactgtttccagcaagttgcaaaacaacaatgtttatactattgccaagaggaatgtggaagggcaggacatgctgtaccaatccctgaagctcactaatggcatttggattttggccgaactacgtatccagccaggaaaccccaattacacgctgtcactgaagtgtagagctcctgaagtctctcaatacatctatcaggtctacgacagcattttgaaaaactaacaagactggtccagtacccttcaaccatgctgtgatcggtgcaagtcaagaactcttaactggaagaaattgtattgctgcgtagaatctgaacacactgaggccacctagcaaggtagtaactagtctaacctgtgctaacattagggcacaacctgttggatagttttagcttcctgtgaacatttgtaaccactgcttcagtcacctcccacctcttgccacctgctgctgctatctgtccttacttgtgggcttctccatgctgtgccaatggctggctttttctacaccctcttttgagtgtagtttggtattttgtaattgagagctcatttcaaaagcagaaaaagacaacaaatattaaagcaaggaaaagtgtaactgaaacactgcactttactgttttatacttttgtacatatgagaaatcaagggattagtgcaaccagtagaaagcattgaaatgactgtcattaaccacacagtcctggaggcagagatgcagttacctaccctagcttttgatgggttctcttacctgtagtagccttatccctggtcatttggattttcagtttgcttttttctttttttcccctccaaactccttttccttggccaagccttcatgcttccccctttccatattataatctcatttgattgctctgcagttgggaacggtgatcttcttgaatgatgtttcagtgtgcaaaaactatagagcctgtcagcaccaaagctgacagaagttataccttactcctttcctttcccctgaacaaacctgctaatcccactaattcaggaatttgagtagagatggggaacaagaacccagatgctgtcccctcaccccctctcctgtatttctcaggtccagttcaaatctaaaattctacttttagagttgaaacagagtaataacttatctaaccctcttttcctacaaaggagaaagataaaaggcacaaaggttaccgccaaggcccgtcagctgtgtagtggcaaagccgagaccgagtctcctaagtccccgtcagtgtggttttcaccacaggactgtctcttgtcgttttcccctaatgccttctcctgccttttctgtgcctagtttttggctcttcacatattccatattgattttgacgctctgtatattggcatcaggtggcagctgaatatcttttgaattactcgaaggtaaagccagatgccagaatgaaggtgtagccagtgtttcccatatgcccctggagccccacttattgaggccagcagaataggtgcagagatgaagtgagcttagagatgttgcaaatgctctttatcccttcagctctctgatctgctctttcttcatgatacttagtctgcagggcatattaagatcatcccagaggttcaggcagttcctgtcatctctgaaaagactgggggatatgaaatcttccccctaccccacttaatgcgttggatatgatttttcaaagaatgcttcatgcccaaaataccagcctgtttagcagtgttacactgtttgatctgcgggcacttgttgcattgcctggcacccaatattcagggtccatgactaagactggtcttctcagatgccctgcttaaatcaggggcacttcaggctccacaggcgtcatgttggactgagacctaactcactggactcagaggaggaatcgtggaaaacaagagcaaaactaccccacacccctatttcatgtctgaaataaccctgtttcataccagttgcaaagcttgtggggagcggtcccacaaagcactttcttaaaccttgagaatctccaagagaaaaatatttggggaaggagggaggaaatatgtcccttgcacaccacccctgaagcacatggcagtagggaaacagcataggattgtatgtgggaggtggataggtcggtgatgtgtggagcggaaaagcaggttggtaaagttcccttcttgggacttattcctggagtcagtggatacaagtagtgcagaaggttcacactgcaaatagtgttctcatctcaaagcaaactatcattccagaaggaaaagtgtgtcagggcaagcagacaacacaatttcctatcagaatatgtccctcaacccccgaaacaaggcttctctcagcctccccaccagtgatggataacagctcctattctcagctgacctgactgagccaacccatgaactcttcactccttggggaagccacctcccatcacacccctgagcagagttagggaggaattctacttcccataaaaggacctctcctgagaggcaaaacctgttgcctccaccacggcttccctcttggctcattccaagcttggccaaattggggaagtgggatggaggttgccctgcatcccccctcctctgcctgagtgtgtctttgtaatgtcagctggcatcatacaaagagcaggagaagcaaacacccagaactcttttgctggtcagagattccctgagtgtctgtcctcacccaagcctgctctgtgtctgtgttgtgaagcttgagactctggaaagaaatggggagggggggcaggggaaatgttgccctaagaatgcttctcattcctctgttcttattgggtcctgtttttcgggagggtgggggttgggggaagcttgaccttgtgtcttcgtcaataaactcacatttacacaaaa

SEQ ID NO: 366097 - DNA, 5710 bp, Homo sapiens
acgtcagagtttcctgcccaccatctttgtccctggcaaagtgggttttgcgcagtggcttagacctagaaaagaatcgtgacgggcaggaaaccattacaccaccacctgggctgtgctctccggctcccgccgccacccccgccctcgccttcgcctccgcctccggtgcacattaaagatccaaagtcatgactgactccaagtatttcacaaccaataaaaaaggagaaatatttgaactaaaagctgaactcaacaatgaaaagaaagaaaagagaaaggaggctgtgaagaaagtgattgctgctatgaccgtggggaaggatgttagttctctctttccagacgtagtgaactgtatgcagactgacaatctggaactaaagaagcttgtgtatctctacttgatgaactacgccaagagtcagccagacatggccatcatggctgtaaacagctttgtgaaggactgtgaagatcctaatcctttgattcgagccttggcagtcagaaccatggggtgcatccgggtagacaaaattacagaatatctctgtgagccgctccgcaagtgcttgaaggatgaggatccctatgttcggaaaacagcagcagtctgcgtggcaaaactccatgatatcaatgcccaaatggtggaagatcagggatttctggattctctacgggatctcatagcagattcaaatccaatggtggtggctaatgccgtagcggcattatctgaaatcagtgagtctcacccaaacagcaacttacttgatctgaacccacagaacattaataagctgctgacagccctgaatgaatgcactgaatggggccagattttcatcctggactgcctgtctaattacaaccctaaagatgatcgggaggctcagagcatctgtgagcgggtaactccccggctatcccatgccaactcagcagtggtgctttcagcggtaaaagtcctaatgaagtttctagaattgttacctaaggattctgactactacaatatgctgctgaagaagttagcccctccacttgtcactttgctgtctggggagccagaagtgcagtatgtcgccctgaggaacatcaacttaattgtccagaaaaggcctgaaatcttgaagcaggaaatcaaagtcttctttgtgaagtacaatgatcccatctatgttaaactagagaagttggacatcatgattcgtttggcatctcaagccaacattgctcaggttctggcagaactgaaagaatatgctacagaggtggatgttgactttgttcgaaaagctgtgcgggccattggacggtgtgccatcaaggtggagcaatctgcagagcgctgtgtaagcacattgcttgatctaatccagaccaaagtgaattatgtggtccaagaagcaattgttgtcatcagggacatcttccgcaaataccccaacaagtatgaaagtatcatcgccactctgtgtgagaacttagactcgctggatgagccagatgctcgagcagctatgatttggattgtgggagaatatgctgaaagaattgacaatgcagatgagttactagaaagcttcctggagggttttcacgatgaaagcacccaggtgcagctcactctgcttactgccatagtgaagctgtttctcaagaaaccatcagaaacacaggagctagtccagcaggtcttgagtttggcaacacaggattctgataatcctgaccttcgagaccggggctatatttattggcgccttctctcaactgaccctgttacagctaaagaagtagtcttgtctgagaagccactgatctctgaggagacggaccttattgagccaactctgctggatgagctaatctgccacattggttctttggcctctgtgtatcataagcctcccaatgcttttgtggaaggaagtcatggaattcatcgtaaacacttgccaattcatcatgggagcactgatgcaggtgacagccctgttggcactaccactgcaacgaacctggaacagcctcaggttatcccctctcaaggtgatcttctaggggatcttttaaaccttgacctcggtcccccagtcaatgtgccacaggtgtcctccatgcagatgggagcagtggatctcctaggaggaggactagatagtctgcttggcagtgaccttggcgggggcattggaggaagtccggcagtgggacaatccttcatcccatcatcggtgcctgcaacctttgctccttcacctacacctgctgtggtcagcagtggactgaatgacctgtttgaactctccacagggataggcatggcacctggtggatatgtggctcctaaggctgtctggctacctgcagtaaaggctaaaggcttggagatttccggaacatttactcaccgccaagggcacatctatatggaaatgaacttcaccaataaagctctgcagcacatgacagattttgcaatccagtttaacaaaaatagctttggtgtcatccccagcactcctctggccatccatacaccactgatgccaaaccagagcattgatgtctccctgcctctcaataccttgggcccagtcatgaagatggaacctctgaataacctccaggtggctgtgaaaaacaatatcgatgtcttctacttcagctgcctcatcccactcaatgtgctttttgtagaagatggcaaaatggagcgccaggtcttccttgcaacatggaaggatattcccaatgaaaatgaacttcagtttcagattaaggaatgtcatttaaatgctgacactgtttccagcaagttgcaaaacaacaatgtttatactattgccaagaggaatgtggaagggcaggacatgctgtaccaatccctgaagctcactaatggcatttggattttggccgaactacgtatccagccaggaaaccccaattacacgctgtcactgaagtgtagagctcctgaagtctctcaatacatctatcaggtctacgacagcattttgaaaaactaacaagactggtccagtacccttcaaccatgctgtgatcggtgcaagtcaagaactcttaactggaagaaattgtattgctgcgtagaatctgaacacactgaggccacctagcaaggtagtaactagtctaacctgtgctaacattagggcacaacctgttggatagttttagcttcctgtgaacatttgtaaccactgcttcagtcacctcccacctcttgccacctgctgctgctatctgtccttacttgtgggcttctccatgctgtgccaatggctggctttttctacaccctcttttgagtgtagtttggtattttgtaattgagagctcatttcaaaagcagaaaaagacaacaaatattaaagcaaggaaaagtgtaactgaaacactgcactttactgttttatacttttgtacatatgagaaatcaagggattagtgcaaccagtagaaagcattgaaatgactgtcattaaccacacagtcctggaggcagagatgcagttacctaccctagcttttgatgggttctcttacctgtagtagccttatccctggtcatttggattttcagtttgcttttttctttttttcccctccaaactccttttccttggccaagccttcatgcttccccctttccatattataatctcatttgattgctctgcagttgggaacggtgatcttcttgaatgatgtttcagtgtgcaaaaactatagagcctgtcagcaccaaagctgacagaagttataccttactcctttcctttcccctgaacaaacctgctaatcccactaattcaggaatttgagtagagatggggaacaagaacccagatgctgtcccctcaccccctctcctgtatttctcaggtccagttcaaatctaaaattctacttttagagttgaaacagagtaataacttatctaaccctcttttcctacaaaggagaaagataaaaggcacaaaggttaccgccaaggcccgtcagctgtgtagtggcaaagccgagaccgagtctcctaagtccccgtcagtgtggttttcaccacaggactgtctcttgtcgttttcccctaatgccttctcctgccttttctgtgcctagtttttggctcttcacatattccatattgattttgacgctctgtatattggcatcaggtggcagctgaatatcttttgaattactcgaaggtaaagccagatgccagaatgaaggtgtagccagtgtttcccatatgcccctggagccccacttattgaggccagcagaataggtgcagagatgaagtgagcttagagatgttgcaaatgctctttatcccttcagctctctgatctgctctttcttcatgatacttagtctgcagggcatattaagatcatcccagaggttcaggcagttcctgtcatctctgaaaagactgggggatatgaaatcttccccctaccccacttaatgcgttggatatgatttttcaaagaatgcttcatgcccaaaataccagcctgtttagcagtgttacactgtttgatctgcgggcacttgttgcattgcctggcacccaatattcagggtccatgactaagactggtcttctcagatgccctgcttaaatcaggggcacttcaggctccacaggcgtcatgttggactgagacctaactcactggactcagaggaggaatcgtggaaaacaagagcaaaactaccccacacccctatttcatgtctgaaataaccctgtttcataccaaatctccaagagaaaaatatttggggaaggagggaggaaatatgtcccttgcacaccacccctgaagcacatggcagtagggaaacagcataggattgtatgtgggaggtggataggtcggtgatgtgtggagcggaaaagcaggttggtaaagttcccttcttgggacttattcctggagtcagtggatacaagtagtgcagaaggttcacactgcaaatagtgttctcatctcaaagcaaactatcattccagaaggaaaagtgtgtcagggcaagcagacaacacaatttcctatcagaatatgtccctcaacccccgaaacaaggcttctctcagcctccccaccagtgatggataacagctcctattctcagctgacctgactgagccaacccatgaactcttcactccttggggaagccacctcccatcacacccctgagcagagttagggaggaattctacttcccataaaaggacctctcctgagaggcaaaacctgttgcctccaccacggcttccctcttggctcattccaagcttggccaaattggggaagtgggatggaggttgccctgcatcccccctcctctgcctgagtgtgtctttgtaatgtcagctggcatcatacaaagagcaggagaagcaaacacccagaactcttttgctggtcagagattccctgagtgtctgtcctcacccaagcctgctctgtgtctgtgttgtgaagcttgagactctggaaagaaatggggagggggggcaggggaaatgttgccctaagaatgcttctcattcctctgttcttattgggtcctgtttttcgggagggtgggggttgggggaagcttgaccttgtgtcttcgtcaataaactcacatttacacaaaa

SEQ ID NO: 366098 - DNA, 5709 bp, Homo sapiens
acgtcagagtttcctgcccaccatctttgtccctggcaaagtgggttttgcgcagtggcttagacctagaaaagaatcgtgacgggcaggaaaccattacaccaccacctgggctgtgctctccggctcccgccgccacccccgccctcgccttcgcctccgcctccggtgcacattaaagatccaaagtcatgactgactccaagtatttcacaaccaataaaaaaggagaaatatttgaactaaaagctgaactcaacaatgaaaagaaagaaaagagaaaggaggctgtgaagaaagtgattgctgctatgaccgtggggaaggatgttagttctctctttccagacgtagtgaactgtatgcagactgacaatctggaactaaagaagcttgtgtatctctacttgatgaactacgccaagagtcagccagacatggccatcatggctgtaaacagctttgtgaaggactgtgaagatcctaatcctttgattcgagccttggcagtcagaaccatggggtgcatccgggtagacaaaattacagaatatctctgtgagccgctccgcaagtgcttgaaggatgaggatccctatgttcggaaaacagcagcagtctgcgtggcaaaactccatgatatcaatgcccaaatggtggaagatcagggatttctggattctctacgggatctcatagcagattcaaatccaatggtggtggctaatgccgtagcggcattatctgaaatcagtgagtctcacccaaacagcaacttacttgatctgaacccacagaacattaataagctgctgacagccctgaatgaatgcactgaatggggccagattttcatcctggactgcctgtctaattacaaccctaaagatgatcgggaggctcagagcatctgtgagcgggtaactccccggctatcccatgccaactcagcagtggtgctttcagcggtaaaagtcctaatgaagtttctagaattgttacctaaggattctgactactacaatatgctgctgaagaagttagcccctccacttgtcactttgctgtctggggagccagaagtgcagtatgtcgccctgaggaacatcaacttaattgtccagaaaaggcctgaaatcttgaagcaggaaatcaaagtcttctttgtgaagtacaatgatcccatctatgttaaactagagaagttggacatcatgattcgtttggcatctcaagccaacattgctcaggttctggcagaactgaaagaatatgctacagaggtggatgttgactttgttcgaaaagctgtgcgggccattggacggtgtgccatcaaggtggagcaatctgcagagcgctgtgtaagcacattgcttgatctaatccagaccaaagtgaattatgtggtccaagaagcaattgttgtcatcagggacatcttccgcaaataccccaacaagtatgaaagtatcatcgccactctgtgtgagaacttagactcgctggatgagccagatgctcgagcagctatgatttggattgtgggagaatatgctgaaagaattgacaatgcagatgagttactagaaagcttcctggagggttttcacgatgaaagcacccaggtgcagctcactctgcttactgccatagtgaagctgtttctcaagaaaccatcagaaacacaggagctagtccagcaggtcttgagtttggcaacacaggattctgataatcctgaccttcgagaccggggctatatttattggcgccttctctcaactgaccctgttacagctaaagaagtagtcttgtctgagaagccactgatctctgaggagacggaccttattgagccaactctgctggatgagctaatctgccacattggttctttggcctctgtgtatcataagcctcccaatgcttttgtggaaggaagtcatggaattcatcgtaaacacttgccaattcatcatgggagcactgatgcaggtgacagccctgttggcactaccactgcaacgaacctggaacagcctcaggttatcccctctcaaggtgatcttctaggggatcttttaaaccttgacctcggtcccccagtcaatgtgccacaggtgtcctccatgcagatgggagcagtggatctcctaggaggaggactagatagtctgcttggcagtgaccttggcgggggcattggaggaagtccggcagtgggacaatccttcatcccatcatcggtgcctgcaacctttgctccttcacctacacctgctgtggtcagcagtggactgaatgacctgtttgaactctccacagggataggcatggcacctggtggatatgtggctcctaaggctgtctggctacctgcagtaaaggctaaaggcttggagatttccggaacatttactcaccgccaagggcacatctatatggaaatgaacttcaccaataaagctctgcagcacatgacagattttgcaatccagtttaacaaaaatagctttggtgtcatccccagcactcctctggccatccatacaccactgatgccaaaccagagcattgatgtctccctgcctctcaataccttgggcccagtcatgaagatggaacctctgaataacctccaggtggctgtgaaaaacaatatcgatgtcttctacttcagctgcctcatcccactcaatgtgctttttgtagaagatggcaaaatggagcgccaggtcttccttgcaacatggaaggatattcccaatgaaaatgaacttcagtttcagattaaggaatgtcatttaaatgctgacactgtttccagcaagttgcaaaacaacaatgtttatactattgccaagaggaatgtggaagggcaggacatgctgtaccaatccctgaagctcactaatggcatttggattttggccgaactacgtatccagccaggaaaccccaattacacgctgtcactgaagtgtagagctcctgaagtctctcaatacatctatcaggtctacgacagcattttgaaaaactaacaagactggtccagtacccttcaaccatgctgtgatcggtgcaagtcaagaactcttaactggaagaaattgtattgctgcgtagaatctgaacacactgaggccacctagcaaggtagtaactagtctaacctgtgctaacattagggcacaacctgttggatagttttagcttcctgtgaacatttgtaaccactgcttcagtcacctcccacctcttgccacctgctgctgctatctgtccttacttgtgggcttctccatgctgtgccaatggctggctttttctacaccctcttttgagtgtagtttggtattttgtaattgagagctcatttcaaaagcagaaaaagacaacaaatattaaagcaaggaaaagtgtaactgaaacactgcactttactgttttatacttttgtacatatgagaaatcaagggattagtgcaaccagtagaaagcattgaaatgactgtcattaaccacacagtcctggaggcagagatgcagttacctaccctagcttttgatgggttctcttacctgtagtagccttatccctggtcatttggattttcagtttgcttttttctttttttcccctccaaactccttttccttggccaagccttcatgcttccccctttccatattataatctcatttgattgctctgcagttgggaacggtgatcttcttgaatgatgtttcagtgtgcaaaaactatagagcctgtcagcaccaaagctgacagaagttataccttactcctttcctttcccctgaacaaacctgctaatcccactaattcaggaatttgagtagagatggggaacaagaacccagatgctgtcccctcaccccctctcctgtatttctcaggtccagttcaaatctaaaattctacttttagagttgaaacagagtaataacttatctaaccctcttttcctacaaaggagaaagataaaaggcacaaaggttaccgccaaggcccgtcagctgtgtagtggcaaagccgagaccgagtctcctaagtccccgtcagtgtggttttcaccacaggactgtctcttgtcgttttcccctaatgccttctcctgccttttctgtgcctagtttttggctcttcacatattccatattgattttgacgctctgtatattggcatcaggtggcagctgaatatcttttgaattactcgaaggtaaagccagatgccagaatgaaggtgtagccagtgtttcccatatgcccctggagccccacttattgaggccagcagaataggtgcagagatgaagtgagcttagagatgttgcaaatgctctttatcccttcagctctctgatctgctctttcttcatgatacttagtctgcagggcatattaagatcatcccagaggttcaggcagttcctgtcatctctgaaaagactgggggatatgaaatcttccccctaccccacttaatgcgttggatatgatttttcaaagaatgcttcatgcccaaaataccagcctgtttagcagtgttacactgtttgatctgcgggcacttgttgcattgcctggcacccaatattcagggtccatgactaagactggtcttctcagatgccctgcttaaatcaggggcacttcaggctccacaggcgtcatgttggactgagacctaactcactggactcagaggaggaatcgtggaaaacaagagcaaaactaccccacacccctatttcatgtctgaaataaccctgtttcataccagttgcaaagcttgtggggagcggtcccacaaagcactttcttaaaccttgagaatctccaagagaaaaatatttggggaaggagggaggaaatatgtcccttgcacaccacccctgaagcacatggcagtagggaaacagcataggattgtatgtgggaggtggataggtcggtgatgtgtggagcggaaaagcaggttggtaaagttcccttcttgggacttattcctggagtcagtggatacaagtagtgcagaaggttcacactgcaaatagtgttctcatctcaaagcaaactatcattccagaaggaaaaccccgaaacaaggcttctctcagcctccccaccagtgatggataacagctcctattctcagctgacctgactgagccaacccatgaactcttcactccttggggaagccacctcccatcacacccctgagcagagttagggaggaattctacttcccataaaaggacctctcctgagaggcaaaacctgttgcctccaccacggcttccctcttggctcattccaagcttggccaaattggggaagtgggatggaggttgccctgcatcccccctcctctgcctgagtgtgtctttgtaatgtcagctggcatcatacaaagagcaggagaagcaaacacccagaactcttttgctggtcagagattccctgagtgtctgtcctcacccaagcctgctctgtgtctgtgttgtgaagcttgagactctggaaagaaatggggagggggggcaggggaaatgttgccctaagaatgcttctcattcctctgttcttattgggtcctgtttttcgggagggtgggggttgggggaagcttgaccttgtgtcttcgtcaataaactcacatttacacaaaa

SEQ ID NO: 366099 - DNA, 5312 bp, Homo sapiens
acgtcagagtttcctgcccaccatctttgtccctggcaaagtgggttttgcgcagtggcttagacctagaaaagaatcgtgacgggcaggaaaccattacaccaccacctgggctgtgctctccggctcccgccgccacccccgccctcgccttcgcctccgcctccggtgcacattaaagatccaaagtcatgactgactccaagtatttcacaaccaataaaaaaggagaaatatttgaactaaaagctgaactcaacaatgaaaagaaagaaaagagaaaggaggctgtgaagaaagtgattgctgctatgaccgtggggaaggatgttagttctctctttccagacgtagtgaactgtatgcagactgacaatctggaactaaagaagcttgtgtatctctacttgatgaactacgccaagagtcagccagacatggccatcatggctgtaaacagctttgtgaaggactgtgaagatcctaatcctttgattcgagccttggcagtcagaaccatggggtgcatccgggtagacaaaattacagaatatctctgtgagccgctccgcaagtgcttgaaggatgaggatccctatgttcggaaaacagcagcagtctgcgtggcaaaactccatgatatcaatgcccaaatggtggaagatcagggatttctggattctctacgggatctcatagcagattcaaatccaatggtggtggctaatgccgtagcggcattatctgaaatcagtgagtctcacccaaacagcaacttacttgatctgaacccacagaacattaataagctgctgacagccctgaatgaatgcactgaatggggccagattttcatcctggactgcctgtctaattacaaccctaaagatgatcgggaggctcagagcatctgtgagcgggtaactccccggctatcccatgccaactcagcagtggtgctttcagcggtaaaagtcctaatgaagtttctagaattgttacctaaggattctgactactacaatatgctgctgaagaagttagcccctccacttgtcactttgctgtctggggagccagaagtgcagtatgtcgccctgaggaacatcaacttaattgtccagaaaaggcctgaaatcttgaagcaggaaatcaaagtcttctttgtgaagtacaatgatcccatctatgttaaactagagaagttggacatcatgattcgtttggcatctcaagccaacattgctcaggttctggcagaactgaaagaatatgctacagaggtggatgttgactttgttcgaaaagctgtgcgggccattggacggtgtgccatcaaggtggagcaatctgcagagcgctgtgtaagcacattgcttgatctaatccagaccaaagtgaattatgtggtccaagaagcaattgttgtcatcagggacatcttccgcaaataccccaacaagtatgaaagtatcatcgccactctgtgtgagaacttagactcgctggatgagccagatgctcgagcagctatgatttggattgtgggagaatatgctgaaagaattgacaatgcagatgagttactagaaagcttcctggagggttttcacgatgaaagcacccaggtgcagctcactctgcttactgccatagtgaagctgtttctcaagaaaccatcagaaacacaggagctagtccagcaggtcttgagtttggcaacacaggattctgataatcctgaccttcgagaccggggctatatttattggcgccttctctcaactgaccctgttacagctaaagaagtagtcttgtctgagaagccactgatctctgaggagacggaccttattgagccaactctgctggatgagctaatctgccacattggttctttggcctctgtgtatcataagcctcccaatgcttttgtggaaggaagtcatggaattcatcgtaaacacttgccaattcatcatgggagcactgatgcaggtgacagccctgttggcactaccactgcaacgaacctggaacagcctcaggttatcccctctcaaggtgatcttctaggggatcttttaaaccttgacctcggtcccccagtcaatgtgccacaggtgtcctccatgcagatgggagcagtggatctcctaggaggaggactagatagtctgcttggcagtgaccttggcgggggcattggaggaagtccggcagtgggacaatccttcatcccatcatcggtgcctgcaacctttgctccttcacctacacctgctgtggtcagcagtggactgaatgacctgtttgaactctccacagggataggcatggcacctggtggatatgtggctcctaaggctgtctggctacctgcagtaaaggctaaaggcttggagatttccggaacatttactcaccgccaagggcacatctatatggaaatgaacttcaccaataaagctctgcagcacatgacagattttgcaatccagtttaacaaaaatagctttggtgtcatccccagcactcctctggccatccatacaccactgatgccaaaccagagcattgatgtctccctgcctctcaataccttgggcccagtcatgaagatggaacctctgaataacctccaggtggctgtgaaaaacaatatcgatgtcttctacttcagctgcctcatcccactcaatgtgctttttgtagaagatggcaaaatggagcgccaggtcttccttgcaacatggaaggatattcccaatgaaaatgaacttcagtttcagattaaggaatgtcatttaaatgctgacactgtttccagcaagttgcaaaacaacaatgtttatactattgccaagaggaatgtggaagggcaggacatgctgtaccaatccctgaagctcactaatggcatttggattttggccgaactacgtatccagccaggaaaccccaattacacgctgtcactgaagtgtagagctcctgaagtctctcaatacatctatcaggtctacgacagcattttgaaaaactaacaagactggtccagtacccttcaaccatgctgtgatcggtgcaagtcaagaactcttaactggaagaaattgtattgctgcgtagaatctgaacacactgaggccacctagcaaggtagtaactagtctaacctgtgctaacattagggcacaacctgttggatagttttagcttcctgtgaacatttgtaaccactgcttcagtcacctcccacctcttgccacctgctgctgctatctgtccttacttgtgggcttctccatgctgtgccaatggctggctttttctacaccctcttttgagtgtagtttggtattttgtaattgagagctcatttcaaaagcagaaaaagacaacaaatattaaagcaaggaaaagtgtaactgaaacactgcactttactgttttatacttttgtacatatgagaaatcaagggattagtgcaaccagtagaaagcattgaaatgactgtcattaaccacacagtcctggaggcagagatgcagttacctaccctagcttttgatgggttctcttacctgtagtagccttatccctggtcatttggattttcagtttgcttttttctttttttcccctccaaactccttttccttggccaagccttcatgcttccccctttccatattataatctcatttgattgctctgcagttgggaacggtgatcttcttgaatgatgtttcagtgtgcaaaaactatagagcctgtcagcaccaaagctgacagaagttataccttactcctttcctttcccctgaacaaacctgctaatcccactaattcaggaatttgagtagagatggggaacaagaacccagatgctgtcccctcaccccctctcctgtatttctcaggtccagttcaaatctaaaattctacttttagagttgaaacagagtaataacttatctaaccctcttttcctacaaaggagaaagataaaaggcacaaaggttaccgccaaggcccgtcagctgtgtagtggcaaagccgagaccgagtctcctaagtccccgtcagtgtggttttcaccacaggactgtctcttgtcgttttcccctaatgccttctcctgccttttctgtgcctagtttttggctcttcacatattccatattgattttgacgctctgtatattggcatcaggtggcagctgaatatcttttgaattactcgaaggtaaagccagatgccagaatgaaggtgtagccagtgtttcccatatgcccctggagccccacttattgaggccagcagaataggtgcagagatgaagtgagcttagagatgttgcaaatgctctttatcccttcagctctctgatctgctctttcttcatgatacttagtctgcagggcatattaagatcatcccagaggttcaggcagttcctgtcatctctgaaaagactgggggatatgaaatcttccccctaccccacttaatgcgttggatatgatttttcaaagaatgcttcatgcccaaaataccagcctgtttagcagtgttacactgtttgatctgcgggcacttgttgcattgcctggcacccaatattcagggtccatgactaagactggtcttctcagatgccctgcttaaatcaggggcacttcaggctccacaggcgtcatgttggactgagacctaactcactggactcagaggaggaatcgtggaaaacaagagcaaaactaccccacacccctatttcatgtctgaaataaccctgtttcataccagttgcaaagcttgtggggagcggtcccacaaagcactttcttaaaccttgagaatctccaagagaaaaatatttggggaaggagggaggaaatatgtcccttgcacaccacccctgaagcacatggcagtagggaaacagcataggattgtatgtgggaggtggataggtcggtgatgtgtggagcggaaaagcaggttggtaaagttcccttcttgggacttattcctggagtcagtggatacaagtagtgcagaaggttcacactgcaaatagtgttctcatctcaaagcaaactatcattccagaaggaaaagtgtgtcagggcaagcagacaacacaatttcctatcagaatatgtccctcaacccccgaaacaaggcttctctcagcctccccaccagtgatggataacagctcctattctcagctgacctgactgagccaacccatgaactcttgcttcatgttggttgggatcctctagatcaccgcca

SEQ ID NO: 366100 - DNA, 5173 bp, Homo sapiens
acgtcagagtttcctgcccaccatctttgtccctggcaaagtgggttttgcgcagtggcttagacctagaaaagaatcgtgacgggcaggaaaccattacaccaccacctgggctgtgctctccggctcccgccgccacccccgccctcgccttcgcctccgcctccggtgcacattaaagatccaaagtcatgactgactccaagtatttcacaaccaataaaaaaggagaaatatttgaactaaaagctgaactcaacaatgaaaagaaagaaaagagaaaggaggctgtgaagaaagtgattgctgctatgaccgtggggaaggatgttagttctctctttccagacgtagtgaactgtatgcagactgacaatctggaactaaagaagcttgtgtatctctacttgatgaactacgccaagagtcagccagacatggccatcatggctgtaaacagctttgtgaaggactgtgaagatcctaatcctttgattcgagccttggcagtcagaaccatggggtgcatccgggtagacaaaattacagaatatctctgtgagccgctccgcaagtgcttgaaggatgaggatccctatgttcggaaaacagcagcagtctgcgtggcaaaactccatgatatcaatgcccaaatggtggaagatcagggatttctggattctctacgggatctcatagcagattcaaatccaatggtggtggctaatgccgtagcggcattatctgaaatcagtgagtctcacccaaacagcaacttacttgatctgaacccacagaacattaataagctgctgacagccctgaatgaatgcactgaatggggccagattttcatcctggactgcctgtctaattacaaccctaaagatgatcgggaggctcagagcatctgtgagcgggtaactccccggctatcccatgccaactcagcagtggtgctttcagcggtaaaagtcctaatgaagtttctagaattgttacctaaggattctgactactacaatatgctgctgaagaagttagcccctccacttgtcactttgctgtctggggagccagaagtgcagtatgtcgccctgaggaacatcaacttaattgtccagaaaaggcctgaaatcttgaagcaggaaatcaaagtcttctttgtgaagtacaatgatcccatctatgttaaactagagaagttggacatcatgattcgtttggcatctcaagccaacattgctcaggttctggcagaactgaaagaatatgctacagaggtggatgttgactttgttcgaaaagctgtgcgggccattggacggtgtgccatcaaggtggagcaatctgcagagcgctgtgtaagcacattgcttgatctaatccagaccaaagtgaattatgtggtccaagaagcaattgttgtcatcagggacatcttccgcaaataccccaacaagtatgaaagtatcatcgccactctgtgtgagaacttagactcgctggatgagccagatgctcgagcagctatgatttggattgtgggagaatatgctgaaagaattgacaatgcagatgagttactagaaagcttcctggagggttttcacgatgaaagcacccaggtgcagctcactctgcttactgccatagtgaagctgtttctcaagaaaccatcagaaacacaggagctagtccagcaggtcttgagtttggcaacacaggattctgataatcctgaccttcgagaccggggctatatttattggcgccttctctcaactgaccctgttacagctaaagaagtagtcttgtctgagaagccactgatctctgaggagacggaccttattgagccaactctgctggatgagctaatctgccacattggttctttggcctctgtgtatcataagcctcccaatgcttttgtggaaggaagtcatggaattcatcgtaaacacttgccaattcatcatgggagcactgatgcaggtgacagccctgttggcactaccactgcaacgaacctggaacagcctcaggttatcccctctcaaggtgatcttctaggggatcttttaaaccttgacctcggtcccccagtcaatgtgccacaggtgtcctccatgcagatgggagcagtggatctcctaggaggaggactagatagtctgcttggcagtgaccttggcgggggcattggaggaagtccggcagtgggacaatccttcatcccatcatcggtgcctgcaacctttgctccttcacctacacctgctgtggtcagcagtggactgaatgacctgtttgaactctccacagggataggcatggcacctggtggatatgtggctcctaaggctgtctggctacctgcagtaaaggctaaaggcttggagatttccggaacatttactcaccgccaagggcacatctatatggaaatgaacttcaccaataaagctctgcagcacatgacagattttgcaatccagtttaacaaaaatagctttggtgtcatccccagcactcctctggccatccatacaccactgatgccaaaccagagcattgatgtctccctgcctctcaataccttgggcccagtcatgaagatggaacctctgaataacctccaggtggctgtgaaaaacaatatcgatgtcttctacttcagctgcctcatcccactcaatgtgctttttgtagaagatggcaaaatggagcgccaggtcttccttgcaacatggaaggatattcccaatgaaaatgaacttcagtttcagattaaggaatgtcatttaaatgctgacactgtttccagcaagttgcaaaacaacaatgtttatactattgccaagaggaatgtggaagggcaggacatgctgtaccaatccctgaagctcactaatggcatttggattttggccgaactacgtatccagccaggaaaccccaattacacgctgtcactgaagtgtagagctcctgaagtctctcaatacatctatcaggtctacgacagcattttgaaaaactaacaagactggtccagtacccttcaaccatgctgtgatcggtgcaagtcaagaactcttaactggaagaaattgtattgctgcgtagaatctgaacacactgaggccacctagcaaggtagtaactagtctaacctgtgctaacattagggcacaacctgttggatagttttagcttcctgtgaacatttgtaaccactgcttcagtcacctcccacctcttgccacctgctgctgctatctgtccttacttgtgggcttctccatgctgtgccaatggctggctttttctacaccctcttttgagtgtagtttggtattttgtaattgagagctcatttcaaaagcagaaaaagacaacaaatattaaagcaaggaaaagtgtaactgaaacactgcactttactgttttatacttttgtacatatgagaaatcaagggattagtgcaaccagtagaaagcattgaaatgactgtcattaaccacacagtcctggaggcagagatgcagttacctaccctagcttttgatgggttctcttacctgtagtagccttatccctggtcatttggattttcagtttgcttttttctttttttcccctccaaactccttttccttggccaagccttcatgcttccccctttccatattataatctcatttgattgctctgcagttgggaacggtgatcttcttgaatgatgtttcagtgtgcaaaaactatagagcctgtcagcaccaaagctgacagaagttataccttactcctttcctttcccctgaacaaacctgctaatcccactaattcaggaatttgagtagagatggggaacaagaacccagatgctgtcccctcaccccctctcctgtatttctcaggtccagttcaaatctaaaattctacttttagagttgaaacagagtaataacttatctaaccctcttttcctacaaaggagaaagataaaaggcacaaaggttaccgccaaggcccgtcagctgtgtagtggcaaagccgagaccgagtctcctaagtccccgtcagtgtggttttcaccacaggactgtctcttgtcgttttcccctaatgccttctcctgccttttctgtgcctagtttttggctcttcacatattccatattgattttgacgctctgtatattggcatcaggtggcagctgaatatcttttgaattactcgaaggtaaagccagatgccagaatgaaggtgtagccagtgtttcccatatgcccctggagccccacttattgaggccagcagaataggtgcagagatgaagtgagcttagagatgttgcaaatgctctttatcccttcagctctctgatctgctctttcttcatgatacttagtctgcagggcatattaagatcatcccagaggttcaggcagttcctgtcatctctgaaaagactgggggatatgaaatcttccccctaccccacttaatgcgttggatatgatttttcaaagaatgcttcatgcccaaaataccagcctgtttagcagtgttacactgtttgatctgcgggcacttgttgcattgcctggcacccaatattcagggtccatgactaagactggtcttctcagatgccctgcttaaatcaggggcacttcaggctccacaggcgtcatgttggactgagacctaactcactggactcagaggaggaatcgtggaaaacaagagcaaaactaccccacctttttgtacaaaacacaaggagaaacaaataaaaaagaagataaagatagataaatacagcagataaaattaagagggcacataacgattacattacgcacaatcggtaatacagctacataccaacaattactatggagaatgaccgcatacggttaatcaatacgtacgtgcactgcgggccgtacatcgcaagatgtcatctacagctcttgttcaccacggaaagtaatgtggatccccttgcttttacgttgggtccaaatgtcactcgcacttggtccagctcatgctattaaatcccaatttagcagtcacgcatactgttgtagcgagcatttcgggggacacacctgcccacagtggggcatacaaagccaagcgcaacctacaag

SEQ ID NO: 366101 - DNA, 2874 bp, Homo sapiens
acgtcagagtttcctgcccaccatctttgtccctggcaaagtgggttttgcgcagtggcttagacctagaaaagaatcgtgacgggcaggaaaccattacaccaccacctgggctgtgctctccggctcccgccgccacccccgccctcgccttcgcctccgcctccggtgcacattaaagatccaaagtcatgactgactccaagtatttcacaaccaataaaaaaggagaaatatttgaactaaaagctgaactcaacaatgaaaagaaagaaaagagaaaggaggctgtgaagaaagtgattgctgctatgaccgtggggaaggatgttagttctctctttccagacgtagtgaactgtatgcagactgacaatctggaactaaagaagcttgtgtatctctacttgatgaactacgccaagagtcagccagacatggccatcatggctgtaaacagctttgtgaaggactgtgaagatcctaatcctttgattcgagccttggcagtcagaaccatggggtgcatccgggtagacaaaattacagaatatctctgtgagccgctccgcaagtgcttgaaggatgaggatccctatgttcggaaaacagcagcagtctgcgtggcaaaactccatgatatcaatgcccaaatggtggaagatcagggatttctggattctctacgggatctcatagcagattcaaatccaatggtggtggctaatgccgtagcggcattatctgaaatcagtgagtctcacccaaacagcaacttacttgatctgaacccacagaacattaataagctgctgacagccctgaatgaatgcactgaatggggccagattttcatcctggactgcctgtctaattacaaccctaaagatgatcgggaggctcagagcatctgtgagcgggtaactccccggctatcccatgccaactcagcagtggtgctttcagcggtaaaagtcctaatgaagtttctagaattgttacctaaggattctgactactacaatatgctgctgaagaagttagcccctccacttgtcactttgctgtctggggagccagaagtgcagtatgtcgccctgaggaacatcaacttaattgtccagaaaaggcctgaaatcttgaagcaggaaatcaaagtcttctttgtgaagtacaatgatcccatctatgttaaactagagaagttggacatcatgattcgtttggcatctcaagccaacattgctcaggttctggcagaactgaaagaatatgctacagaggtggatgttgactttgttcgaaaagctgtgcgggccattggacggtgtgccatcaaggtggagcaatctgcagagcgctgtgtaagcacattgcttgatctaatccagaccaaagtgaattatgtggtccaagaagcaattgttgtcatcagggacatcttccgcaaataccccaacaagtatgaaagtatcatcgccactctgtgtgagaacttagactcgctggatgagccagatgctcgagcagctatgatttggattgtgggagaatatgctgaaagaattgacaatgcagatgagttactagaaagcttcctggagggttttcacgatgaaagcacccaggtgcagctcactctgcttactgccatagtgaagctgtttctcaagaaaccatcagaaacacaggagctagtccagcaggtcttgagtttggcaacacaggattctgataatcctgaccttcgagaccggggctatatttattggcgccttctctcaactgaccctgttacagctaaagaagtagtcttgtctgagaagccactgatctctgaggagacggaccttattgagccaactctgctggatgagctaatctgccacattggttctttggcctctgtgtatcataagcctcccaatgcttttgtggaaggaagtcatggaattcatcgtaaacacttgccaattcatcatgggagcactgatgcaggtgacagccctgttggcactaccactgcaacgaacctggaacagcctcaggttatcccctctcaaggtgatcttctaggggatcttttaaaccttgacctcggtcccccagtcaatgtgccacaggtgtcctccatgcagatgggagcagtggatctcctaggaggaggactagatagtctggtaagcatctttcttcccttgttcttttggttatttttagttcttgatatgctagagagttttaaattattcagctttttagaactagacctttccttgatgagcagtagtgtcctttgataaaggacaggattctttgtctttagtaagacaaaattataattaatactgttcatcatcggtaatggggtatgtctgcaagtgtatgggattatttcattgtcctgcctctaaatagaacttttgacatttaaccatcctattgttcagcaattttaatgtttagtatcttttccagagtttattattgttcctagctcttaactctggatagcccacataaattctccttttgacctgaacggcattaaagtgacctcacacaaatcatcctattttgaggctttcaaacctttgcctttttaatattttatttacttatgccctaattctgaaaggttttgaggcagcctttttttttcttcttcttctttttttttttttaagtaaaatgtacctttattacagttgggaagggctgcttgattggttctttttttcccttcttccccacctactccattctatcatacttccaatttaattagcttccaggattctaatactaaaaggctccaaagtccagaatacctgcgaacatttgccaccaatgggaaccaaaattattttttgt

SEQ ID NO: 366102 - DNA, 405 bp, Homo sapiens
cttggcagtgaccttggcgggggcattggaggaagtccggcagtaagtgccatctgtttttttcaccatgagaagcactgccccctgtttgatgcctttcctatgtacacattatcagaccagccactgctgctgtctagcactgcacaccaaaacctctataacagtatatgggtagtagaaagtagtatagggttacttggaattgttggggtcatgcaccacatggtgtagagacatctttaaggtttaatgttccagtgcctatagagatctttgtctttctgatattaaagagctaaaggaaatggacccttccatcttgactggagaatgcttattccctggtgtcacctagaaagaacttgagagggtcagctggactcagagtgagactctcctcgt

SEQ ID NO: 366103 - DNA, 1071 bp, Homo sapiens
caagggaggcaggcctagctgggacggagaaaaacactgttgggggagatgcagtgtaggctccatatgggaagtaacagggaactaccacaggttcttgagcaagggagtgacaagatagaatccgaaattttgtatctgactgagcctgtagaccaggatgtatggggttggggtgggggcggcactaggaaactacttcttccatctgctaccatttagcccacaaaccgtgagcaaagcctggggctggatgtggttgagccagcggaggcaggcccggggctgtcctggtggagaagggtgtgagggctgcaggtgtgcagcaatggagaggatagtgctggccctacttgctgggaggaagggacagtggtggctctaggctggggagctctgagggaggtgccctgctctgaggaggcacagctacacattgtggaggcctgatctgagacgggagacatggcaggaccctcaggttgagccccccaagccacaaacactgggggagcttttccagggcgagcagaggccagaactgaagcgggggccgcggctccatggccagccccctctgaggtgatcacacctgcagagacgaggaggagctgagacgctctctgtctgagttggccgaccccaaccccaaggtcatcaagcggatcagcgggggcagtggcagtggctccagccctttcctggacctgactcccgagcctggggctgccgtctacaagcacggggccctggtgcgaaaggtgcacgcagaccctgactgcaggaagacacctcggggcaagcggggctggaagagcttccacgggatcctcaagggcatgatcctctacctgcagaaggaggagtacaagcctgggaaggccctttcagagacggagctcaagaatgccatcagcatccaccatgccctggccactcgtgccagtgactacagcaagaggccccacgtcttctacctgcgcacagctgactggcgggtcttcctcttccaggccccgtgagtgccctcctcctgcccatcccggaccccttcccccacctcccatcctg

SEQ ID NO: 366104 - DNA, 551 bp, Homo sapiens
agtgcgacaaatctggcgctgtccccttcagcaccacgcggagtccgcgccgcccctccccgcggtgagccccgcgcgcccccgcctcgcacgtcctcgcgccccctgactgcccgaacagaccccttcttccttccgaggtcaccatctgcccgccctggccctcccaaagagagtagttgccatagtaactccagcggctctttcttaaaatagcagggcccccttctaccctggccaagggcacaagggttgccggtcccccacgtcttccggtccctagttcatcccgtctaacctcttacccctgggcaggcgtgacgacacctaactcaggcagcaaggaagttcttcctgaagtctgatttaacatccccctgctgcatcctgggagggtggtcagggttggatctcctgggtccgagactcaaaacccctggcgggttcaagacggtgttccctagatctcctttccatagttgatggtctcctggatttagggggcgggtccagtctacacccataccgtgtgcttggcgcggccgcgtgct

SEQ ID NO: 366105 - DNA, 4938 bp, Homo sapiens
ggcgtagggcttctctagcaaccctctttcttcagattttgcatgtctccaagaaaaaacaacttgaaatttcttgaacacacagtttacttgttcatatctttaactatgctgttctcttttatctacaatgccatctatctcttccactgaaaacttccatttattcctcaaaatcctgctcaggtgctagcatatctgtgaagcgttctctgacctgttcctgaagtcaaacattccctcctcggtaatatttccatactttaaacttactattattgatggactccaaaaaaattctctttattgttgtgtctagccctatgatcctgatttcaagatcctgaaagacaagtttctatcccttacaaataccacaggacctggcacatagaagacacatttattgactcagtgttttcttcatgtttacattcttcaagtacacagctgtctatgcagtgaaaaatgtgctctacaagtagaaaaagaaatatgtgaagtgcacaatagacaatcctcaattcccataatgcagatgtgcatgagcaattattagcagttcaaagttgtttcattacggtaagtactattctaacaaactaactgccccaaccaattttgtctaggaagcatatatggttttaaagtgttgatttacgccagctgggcatggtgcttacgcctgcaatcccagcactttgggaggccaggcgggcggatcacaaggtcaagagatcgagaccatcctggccaacgtagtgaaaccccatctctattaaaaatacaaaaactagctgcgagtggtggcgcacgcctgtagtcccagctactcgaggccgggaactgggacgtgtgacagcaccctgtacacctctgcgtggccccccctcaccccgtgttgctccctcaccctgggcaccctcttcacccactgggcagcccccacccggggcccagagctctgtggtcatcttccgctttgtggagaaggccagtgtgaggccactgaatgggctacctgctccagggggcttgagtcggagctgggatctgggtggggtttctcctcccaggcccaccccagcccttgggcctggctccaaccggaagttacggctggaagcatccacatcagacccactccccgccagaggaggctcggccctacctggcagccggaaccttgtacatgggccgccagccccaccccaggttggagcagatggcctttactcctctctccccaatgggctggggggcccccctgagcgcctggccacactcttcggaggacctgctgacactggattcctgaaccagggggatacctggtcctccccccgggaagtctcctctcatgcccagagaatcgctagagccaaatgggaattcttctatggctccttggacccccccagctcaggtgctaagcccccagagcaggcccccccatctccacctggggtgggctcaaggcagggctctggggtggctgtggggcgagcagccaagtactccgagacagacctggacacggtgcccctgaggtgctaccgcgagactgacatcgatgaggtgctggctgagcgggaggaggccgactcggccatcgaaagtcagcccagctctgagggcccaccaggcactgcctacccacctgccccacggcccggcccactccctggccctcatcccagcctcggcagtggcaatgaggatgaggacgacgatgaggcaggtggggaagaagatgtggacgacgaggtgtttgaggcctctgaaggggcccggccagggagccggatgcctctcaagtcacctgtgccctttctacctgggacgagcccctcggctgatgggcctgactctttcagttgtgtgttcgaagccatcctggagtcacaccgggccaaaggcacctcctataccagcctcgcctcgctggaggccttggcctcacctggcccaacccagagccccttcttcacctttgagctgcctccccaaccccctgcaccccggcccgacccaccagctcccgccccacttacccctcttgaaccggattctggtaccagctctgctgctgatggtccttggacacagagaggggaggaggaggaggcagaggccagagccaagctggccccagggagggagccccctagtccctgccactcagaggacagccttgggctgggggcagcaccccttggcagcgaaccacccctgagccagctggtgtccgactcagactcagagctggacagcacagaccggctggccctgggaagcacagacaccttgtccaatgggcagaaagcggacctggaggctgcgcagcgcctggccaagaggctgtaccgactagatggcttcaggaaggccgatgtggcccggcacctgggcaagaacaatgacttcagcaaactggtggctggggagtacctcaagttctttgtcttcacgggcatgactctggaccaagctctcagggtgtttctgaaggagctggccttaatgggtgagacccaggaacgagagcgcgtgctggcccacttctcccagcgatacttccagtgcaatcctgaagccctgtcctcagaggacggcgcccacacgctgacctgtgcgctcatgctgctcaacacggatctccacggcataacatcgggaagcgcatgacctgcggggacttcatcgggaacctggagggcctcaatgatggcggcgacttccctagggagctgctcaaggccttgtacagctccatcaagaatgagaagctgcagtgggccatagacgaggaggagctgagacgctctctgtctgagttggccgaccccaaccccaaggtcatcaagcggatcagcgggggcagtggcagtggctccagccctttcctggacctgactcccgagcctggggctgccgtctacaagcacggggccctggtgcgaaaggtgcacgcagaccctgactgcaggaagacacctcggggcaagcggggctggaagagcttccacgggatcctcaagggcatgatcctctacctgcagaaggaggagtacaagcctgggaaggccctttcagagacggagctcaagaatgccatcagcatccaccatgccctggccactcgtgccagtgactacagcaagaggccccacgtcttctacctgcgcacagctgactggcgggtcttcctcttccaggccccgagcctggagcagatgcagtcctggatcactcgcatcaatgtagtagccgctatgttctctgcgccccccttcccagctgctgttagctcccaaaagaagttcagccgccctctcctgcccagcgctgccacccgcctctcccaggaggagcaggtgcggacccacgaggccaagctgaaggccatggcaagtgagctgcgggagcaccgggccgcccagctgggcaagaagggccggggcaaggaggctgaagagcagcggcagaaggaggcctacctggagtttgagaaatcccgctacagcacctatgcagcgctgcttcgggtcaagctgaaggcaggcagtgaggagctggatgcagtggaggcagcactggcccaggccgggagcacagaggatggactccctccttctcactccagtccctccctgcagcccaaaccctccagccagccccgggctcagcgtcacagctcagagcctcggccaggggcaggcagtgggcggcggaagccctgagatgaggtttagggtggggagtgcctgctgggcacctgaaggatgacatggccctgcctgagcccgggccggcctcgggccacccacgagggcctcccggcctagggcccgaccgcgccggacgcggtgtccggggcagggcagggctggggcctgggcctcaggagcctaggctaggggcacctccgagagcccctttttgtgataatgttttgcactttttcgtacagggtgggcgggggcgggaggggctagcgcccctgaacttttgatgctttttttttgtgtgggagaggcctgatgccgtttctgctttctgctgagaccacccccaccctgacaccatcagtccccctctgtcctggggcctggcttggacagagaccaggatttggggctgagctggtttcccctccttcctccccaagggcttactctttctcttgctggaggtggaggaagggcgtccatgccaaggccccacggcctggctttcccccgcttcagtgggccttgccctttgtacagcctccacccccattaaaactgctctggacttgcaaaaaaaaacaaaaaaaaaaaaaaaaaaaaaaaaaaaaaaaaaaaaaagagagagggcgcgcgcgcgcgcccccataaatattatctccctccggaggggcgccccattttccgcgcgccgctccaccctgtttttgtgtcacaacgggggcgccccttataggggcgactcctcttatttaatacacccgaggcgccggcggcgccccgcgctgtttataccacaacggtcgctcggaccgcggggagaacaacgcgcgcgctacacctctgtggcgaatatctcttgtgtgatgaacggagaccccccttctctttctgcgggggagtggagacaacacactattgtgggcgccacaacactcactccctctcagccggaacttattttaacgcgccctccaggggtgacaacatcttatacacctcttttaacagagcgagtgtctattagcgcgtgtgtgtcatacacacacctacaggcgcgccgctatttatcgccgctgcgcgcgtgtgtgagatgcaaaatttttgttgagccttctcctgcggcgcctattgtgtgtctttctcggtgacacacatatttttttttactcccacacgcgcgccgcctcctaccgcctatagtaaa

SEQ ID NO: 366106 - DNA, 2599 bp, Homo sapiens
cgctctagccaagccgcagagcagacagcgccgccgccgccgccgcgcactccgtgcgtccgtgagagccgggccggctcgggccgggccgcgccgctcgcgctggctgtcgggggagcggtccgcgggccgtccgggcggcccgggggccgagggcggacgggggcatggccgggggccgcggcgcgccggccgggccagcatgatcggcgtcaacagcatccacagcagcgccgggcggctgcgctcgcgctcgctgtgctccgtgcgctacgggcgcacccaccgcggcgcggagaccctgtgctacggctggccgcagcgctcgcgcagcctcaagcccgtgctctacaccgacctggtggtcagccgcctgcagagccgcaagaagaaaaaggcggccttgtacagctccatcaagaatgagaagctgcagtgggccatagacgaggaggagctgagacgctctctgtctgagttggccgaccccaaccccaaggtcatcaagcggatcagcgggggcagtggcagtggctccagccctttcctggacctgactcccgagcctggggctgccgtctacaagcacggggccctggtgcgaaaggtgcacgcagaccctgactgcaggaagacacctcggggcaagcggggctggaagagcttccacgggatcctcaagggcatgatcctctacctgcagaaggaggagtacaagcctgggaaggccctttcagagacggagctcaagaatgccatcagcatccaccatgccctggccactcgtgccagtgactacagcaagaggccccacgtcttctacctgcgcacagctgactggcgggtcttcctcttccaggccccgagcctggagcagatgcagtcctggatcactcgcatcaatgtagtagccgctatgttctctgcgccccccttcccagctgctgttagctcccaaaagaagttcagccgccctctcctgcccagcgctgccacccgcctctcccaggaggagcaggtgcggacccacgaggccaagctgaaggccatggcaagtgagctgcgggagcaccgggccgcccagctgggcaagaagggccggggcaaggaggctgaagagcagcggcagaaggaggcctacctggagtttgagaaatcccgctacagcacctatgcagcgctgcttcgggtcaagctgaaggcaggcagtgaggagctggatgcagtggaggcagcactggcccaggccgggagcacagaggatggactccctccttctcactccagtccctccctgcagcccaaaccctccagccagccccgggctcagcgtcacagctcagagcctcggccaggggcaggcagtgggcggcggaagccctgagatgaggtttagggtggggagtgcctgctgggcacctgaaggatgacatggccctgcctgagcccgggccggcctcgggccacccacgagggcctcccggcctagggcccgaccgcgccggacgcggtgtccggggcagggcagggctggggcctgggcctcaggagcctaggctaggggcacctccgagagcccctttttgtgataatgttttgcactttttcgtacagggtgggcgggggcgggaggggctagcgcccctgaacttttgatgctttttttttgtgtgggagaggcctgatgccgtttctgctttctgctgagaccacccccaccctgacaccatcagtccccctctgtcctggggcctggcttggacagagaccaggatttggggctgagctggtttcccctccttcctccccaagggcttactctttctcttgctggaggtggaggaagggcgtccatgccaaggccccatacctgggccgggggcagcacggcctggctttcccccgcttcagtgggccttgccctttgtacagcctccacccccattaaaactgctctggacttgcaaaaaaaaacaaaaaaaaaaaaaaaaaaaaaaaaaaaaaaaaaaaaaagagagagggcgcgcgcgcgcgcccccataaatattatctccctccggaggggcgccccattttccgcgcgccgctccaccctgtttttgtgtcacaacgggggcgccccttataggggcgactcctcttatttaatacacccgaggcgccggcggcgccccgcgctgtttataccacaacggtcgctcggaccgcggggagaacaacgcgcgcgctacacctctgtggcgaatatctcttgtgtgatgaacggagaccccccttctctttctgcgggggagtggagacaacacactattgtgggcgccacaacactcactccctctcagccggaacttattttaacgcgccctccaggggtgacaacatcttatacacctcttttaacagagcgagtgtctattagcgcgtgtgtgtcatacacacacctacaggcgcgccgctatttatcgccgctgcgcgcgtgtgtgagatgcaaaatttttgttgagccttctcctgcggcgcctattgtgtgtctttctcggtgacacacatatttttttttactcccacacgcgcgccgcctcctaccgcctatagtaaa

SEQ ID NO: 366107 - DNA, 2432 bp, Homo sapiens
ggccagacatgcaggacctgggaggccaagggccctccaaactcacaggcctccgttcccttccttagaacatcgggaagcgcatgacctgcggggacttcatcgggaacctggagggcctcaatgatggcggcgacttccctagggagctgctcaaggccttgtacagctccatcaagaatgagaagctgcagtgggccatggcgagcagaggccagaactgaagcgggggccgcggctccatggccagccccctctgaggtgatcacacctgcagagacgaggaggagctgagacgctctctgtctgagttggccgaccccaaccccaaggtcatcaagcggatcagcgggggcagtggcagtggctccagccctttcctggacctgactcccgagcctggggctgccgtctacaagcacggggccctggtgcgaaaggtgcacgcagaccctgactgcaggaagacacctcggggcaagcggggctggaagagcttccacgggatcctcaagggcatgatcctctacctgcagaaggaggagtacaagcctgggaaggccctttcagagacggagctcaagaatgccatcagcatccaccatgccctggccactcgtgccagtgactacagcaagaggccccacgtcttctacctgcgcacagctgactggcgggtcttcctcttccaggccccgagcctggagcagatgcagtcctggatcactcgcatcaatgtagtagccgctatgttctctgcgccccccttcccagctgctgttagctcccaaaagaagttcagccgccctctcctgcccagcgctgccacccgcctctcccaggaggagcaggtgcggacccacgaggccaagctgaaggccatggcaagtgagctgcgggagcaccgggccgcccagctgggcaagaagggccggggcaaggaggctgaagagcagcggcagaaggaggcctacctggagtttgagaaatcccgctacagcacctatgcagcgctgcttcgggtcaagctgaaggcaggcagtgaggagctggatgcagtggaggcagcactggcccaggccgggagcacagaggatggactccctccttctcactccagtccctccctgcagcccaaaccctccagccagccccgggctcagcgtcacagctcagagcctcggccaggggcaggcagtgggcggcggaagccctgagatgaggtttagggtggggagtgcctgctgggcacctgaaggatgacatggccctgcctgagcccgggccggcctcgggccacccacgagggcctcccggcctagggcccgaccgcgccggacgcggtgtccggggcagggcagggctggggcctgggcctcaggagcctaggctaggggcacctccgagagcccctttttgtgataatgttttgcactttttcgtacagggtgggcgggggcgggaggggctagcgcccctgaacttttgatgctttttttttgtgtgggagaggcctgatgccgtttctgctttctgctgagaccacccccaccctgacaccatcagtccccctctgtcctggggcctggcttggacagagaccaggatttggggctgagctggtttcccctccttcctccccaagggcttactctttctcttgctggaggtggaggaagggcgtccatgccaaggccccatacctgggccgggggcagcacggcctggctttcccccgcttcagtgggccttgccctttgtacagcctccacccccattaaaactgctctggacttgcaaaaaaaaacaaaaaaaaaaaaaaaaaaaaaaaaaaaaaaaaaaaaaagagagagggcgcgcgcgcgcgcccccataaatattatctccctccggaggggcgccccattttccgcgcgccgctccaccctgtttttgtgtcacaacgggggcgccccttataggggcgactcctcttatttaatacacccgaggcgccggcggcgccccgcgctgtttataccacaacggtcgctcggaccgcggggagaacaacgcgcgcgctacacctctgtggcgaatatctcttgtgtgatgaacggagaccccccttctctttctgcgggggagtggagacaacacactattgtgggcgccacaacactcactccctctcagccggaacttattttaacgcgccctccaggggtgacaacatcttatacacctcttttaacagagcgagtgtctattagcgcgtgtgtgtcatacacacacctacaggcgcgccgctatttatcgccgctgcgcgcgtgtgtgagatgcaaaatttttgttgagccttctcctgcggcgcctattgtgtgtctttctcggtgacacacatatttttttttactcccacacgcgcgccgcctcctaccgcctatagtaaa

SEQ ID NO: 366108 - DNA, 4495 bp, Homo sapiens
agtgcgacaaatctggcgctgtccccttcagcaccacgcggagtccgcgccgcccctccccgcgctcagctgggcccagcctctcctctgtctctcctcggtctcagctctgggcgagcagcggcctgtctgaagagcatgcagcccccttactccccgcctggcctcgccatccctgcccccccagcctgacccccggccccagcatggcccagggtgccatgcgcttctgctcggaaggcgactgtgccatctccccaccacgatgcccacgccgctggctccccgaaggcccggtgccccagagccccccagccagcatgtatggcagcacaggctccttgctacggcgagtggcaggtccaggtcctcgaggccgggaactgggacgtgtgacagcaccctgtacacctctgcgtggccccccctcaccccgtgttgctccctcaccctgggcaccctcttcacccactgggcagcccccacccggggcccagagctctgtggtcatcttccgctttgtggagaaggccagtgtgaggccactgaatgggctacctgctccagggggcttgagtcggagctgggatctgggtggggtttctcctcccaggcccaccccagcccttgggcctggctccaaccggaagttacggctggaagcatccacatcagacccactccccgccagaggaggctcggccctacctggcagccggaaccttgtacatgggccgccagccccaccccaggttggagcagatggcctttactcctctctccccaatgggctggggggcccccctgagcgcctggccacactcttcggaggacctgctgacactggattcctgaaccagggggatacctggtcctccccccgggaagtctcctctcatgcccagagaatcgctagagccaaatgggaattcttctatggctccttggacccccccagctcaggtgctaagcccccagagcaggcccccccatctccacctggggtgggctcaaggcagggctctggggtggctgtggggcgagcagccaagtactccgagacagacctggacacggtgcccctgaggtgctaccgcgagactgacatcgatgaggtgctggctgagcgggaggaggccgactcggccatcgaaagtcagcccagctctgagggcccaccaggcactgcctacccacctgccccacggcccggcccactccctggccctcatcccagcctcggcagtggcaatgaggatgaggacgacgatgaggcaggtggggaagaagatgtggacgacgaggtgtttgaggcctctgaaggggcccggccagggagccggatgcctctcaagtcacctgtgccctttctacctgggacgagcccctcggctgatgggcctgactctttcagttgtgtgttcgaagccatcctggagtcacaccgggccaaaggcacctcctataccagcctcgcctcgctggaggccttggcctcacctggcccaacccagagccccttcttcacctttgagctgcctccccaaccccctgcaccccggcccgacccaccagctcccgccccacttacccctcttgaaccggattctggtaccagctctgctgctgatggtccttggacacagagaggggaggaggaggaggcagaggccagagccaagctggccccagggagggagccccctagtccctgccactcagaggacagccttgggctgggggcagcaccccttggcagcgaaccacccctgagccagctggtgtccgactcagactcagagctggacagcacagaccggctggccctgggaagcacagacaccttgtccaatgggcagaaagcggacctggaggctgcgcagcgcctggccaagaggctgtaccgactagatggcttcaggaaggccgatgtggcccggcacctgggcaagaacaatgacttcagcaaactggtggctggggagtacctcaagttctttgtcttcacgggcatgactctggaccaagctctcagggtgtttctgaaggagctggccttaatgggtgagacccaggaacgagagcgcgtgctggcccacttctcccagcgatacttccagtgcaatcctgaagccctgtcctcagaggacggcgcccacacgctgacctgtgcgctcatgctgctcaacacggatctccacggcataacatcgggaagcgcatgacctgcggggacttcatcgggaacctggagggcctcaatgatggcggcgacttccctagggagctgctcaaggccttgtacagctccatcaagaatgagaagctgcagtgggccatagacgaggaggagctgagacgctctctgtctgagttggccgaccccaaccccaaggtcatcaagcggatcagcgggggcagtggcagtggctccagccctttcctggacctgactcccgagcctggggctgccgtctacaagcacggggccctggtgcgaaaggtgcacgcagaccctgactgcaggaagacacctcggggcaagcggggctggaagagcttccacgggatcctcaagggcatgatcctctacctgcagaaggaggagtacaagcctgggaaggccctttcagagacggagctcaagaatgccatcagcatccaccatgccctggccactcgtgccagtgactacagcaagaggccccacgtcttctacctgcgcacagctgactggcgggtcttcctcttccaggccccgagcctggagcagatgcagtcctggatcactcgcatcaatgtagtagccgctatgttctctgcgccccccttcccagctgctgttagctcccaaaagaagttcagccgccctctcctgcccagcgctgccacccgcctctcccaggaggagcaggtgcggacccacgaggccaagctgaaggccatggcaagtgagctgcgggagcaccgggccgcccagctgggcaagaagggccggggcaaggaggctgaagagcagcggcagaaggaggcctacctggagtttgagaaatcccgctacagcacctatgcagcgctgcttcgggtcaagctgaaggcaggcagtgaggagctggatgcagtggaggcagcactggcccaggccgggagcacagaggatggactccctccttctcactccagtccctccctgcagcccaaaccctccagccagccccgggctcagcgtcacagctcagagcctcggccaggggcaggcagtgggcggcggaagccctgagatgaggtttagggtggggagtgcctgctgggcacctgaaggatgacatggccctgcctgagcccgggccggcctcgggccacccacgagggcctcccggcctagggcccgaccgcgccggacgcggtgtccggggcagggcagggctggggcctgggcctcaggagcctaggctaggggcacctccgagagcccctttttgtgataatgttttgcactttttcgtacagggtgggcgggggcgggaggggctagcgcccctgaacttttgatgctttttttttgtgtgggagaggcctgatgccgtttctgctttctgctgagaccacccccaccctgacaccatcagtccccctctgtcctggggcctggcttggacagagaccaggatttggggctgagctggtttcccctccttcctccccaagggcttactctttctcttgctggaggtggaggaagggcgtccatgccaaggccccatacctgggccgggggcagcacggcctggctttcccccgcttcagtgggccttgccctttgtacagcctccacccccattaaaactgctctggacttgcaaaaaaaaacaaaaaaaaaaaaaaaaaaaaaaaaaaaaaaaaaaaaaagagagagggcgcgcgcgcgcgcccccataaatattatctccctccggaggggcgccccattttccgcgcgccgctccaccctgtttttgtgtcacaacgggggcgccccttataggggcgactcctcttatttaatacacccgaggcgccggcggcgccccgcgctgtttataccacaacggtcgctcggaccgcggggagaacaacgcgcgcgctacacctctgtggcgaatatctcttgtgtgatgaacggagaccccccttctctttctgcgggggagtggagacaacacactattgtgggcgccacaacactcactccctctcagccggaacttattttaacgcgccctccaggggtgacaacatcttatacacctcttttaacagagcgagtgtctattagcgcgtgtgtgtcatacacacacctacaggcgcgccgctatttatcgccgctgcgcgcgtgtgtgagatgcaaaatttttgttgagccttctcctgcggcgcctattgtgtgtctttctcggtgacacacatatttttttttactcccacacgcgcgccgcctcctaccgcctatagtaaa

SEQ ID NO: 366109 - DNA, 4492 bp, Homo sapiens
agcgggagggactgagaggcgggcgggcctggagcaaacgggagccgcgctgccttcacagctcagctgggcccagcctctcctctgtctctcctcggtctcagctctgggcgagcagcggcctgtctgaagagcatgcagcccccttactccccgcctggcctcgccatccctgcccccccagcctgacccccggccccagcatggcccagggtgccatgcgcttctgctcggaaggcgactgtgccatctccccaccacgatgcccacgccgctggctccccgaaggcccggtgccccagagccccccagccagcatgtatggcagcacaggctccttgctacggcgagtggcaggtccaggtcctcgaggccgggaactgggacgtgtgacagcaccctgtacacctctgcgtggccccccctcaccccgtgttgctccctcaccctgggcaccctcttcacccactgggcagcccccacccggggcccagagctctgtggtcatcttccgctttgtggagaaggccagtgtgaggccactgaatgggctacctgctccagggggcttgagtcggagctgggatctgggtggggtttctcctcccaggcccaccccagcccttgggcctggctccaaccggaagttacggctggaagcatccacatcagacccactccccgccagaggaggctcggccctacctggcagccggaaccttgtacatgggccgccagccccaccccaggttggagcagatggcctttactcctctctccccaatgggctggggggcccccctgagcgcctggccacactcttcggaggacctgctgacactggattcctgaaccagggggatacctggtcctccccccgggaagtctcctctcatgcccagagaatcgctagagccaaatgggaattcttctatggctccttggacccccccagctcaggtgctaagcccccagagcaggcccccccatctccacctggggtgggctcaaggcagggctctggggtggctgtggggcgagcagccaagtactccgagacagacctggacacggtgcccctgaggtgctaccgcgagactgacatcgatgaggtgctggctgagcgggaggaggccgactcggccatcgaaagtcagcccagctctgagggcccaccaggcactgcctacccacctgccccacggcccggcccactccctggccctcatcccagcctcggcagtggcaatgaggatgaggacgacgatgaggcaggtggggaagaagatgtggacgacgaggtgtttgaggcctctgaaggggcccggccagggagccggatgcctctcaagtcacctgtgccctttctacctgggacgagcccctcggctgatgggcctgactctttcagttgtgtgttcgaagccatcctggagtcacaccgggccaaaggcacctcctataccagcctcgcctcgctggaggccttggcctcacctggcccaacccagagccccttcttcacctttgagctgcctccccaaccccctgcaccccggcccgacccaccagctcccgccccacttacccctcttgaaccggattctggtaccagctctgctgctgatggtccttggacacagagaggggaggaggaggaggcagaggccagagccaagctggccccagggagggagccccctagtccctgccactcagaggacagccttgggctgggggcagcaccccttggcagcgaaccacccctgagccagctggtgtccgactcagactcagagctggacagcacagaccggctggccctgggaagcacagacaccttgtccaatgggcagaaagcggacctggaggctgcgcagcgcctggccaagaggctgtaccgactagatggcttcaggaaggccgatgtggcccggcacctgggcaagaacaatgacttcagcaaactggtggctggggagtacctcaagttctttgtcttcacgggcatgactctggaccaagctctcagggtgtttctgaaggagctggccttaatgggtgagacccaggaacgagagcgcgtgctggcccacttctcccagcgatacttccagtgcaatcctgaagccctgtcctcagaggacggcgcccacacgctgacctgtgcgctcatgctgctcaacacggatctccacggcataacatcgggaagcgcatgacctgcggggacttcatcgggaacctggagggcctcaatgatggcggcgacttccctagggagctgctcaaggccttgtacagctccatcaagaatgagaagctgcagtgggccatagacgaggaggagctgagacgctctctgtctgagttggccgaccccaaccccaaggtcatcaagcggatcagcgggggcagtggcagtggctccagccctttcctggacctgactcccgagcctggggctgccgtctacaagcacggggccctggtgcgaaaggtgcacgcagaccctgactgcaggaagacacctcggggcaagcggggctggaagagcttccacgggatcctcaagggcatgatcctctacctgcagaaggaggagtacaagcctgggaaggccctttcagagacggagctcaagaatgccatcagcatccaccatgccctggccactcgtgccagtgactacagcaagaggccccacgtcttctacctgcgcacagctgactggcgggtcttcctcttccaggccccgagcctggagcagatgcagtcctggatcactcgcatcaatgtagtagccgctatgttctctgcgccccccttcccagctgctgttagctcccaaaagaagttcagccgccctctcctgcccagcgctgccacccgcctctcccaggaggagcaggtgcggacccacgaggccaagctgaaggccatggcaagtgagctgcgggagcaccgggccgcccagctgggcaagaagggccggggcaaggaggctgaagagcagcggcagaaggaggcctacctggagtttgagaaatcccgctacagcacctatgcagcgctgcttcgggtcaagctgaaggcaggcagtgaggagctggatgcagtggaggcagcactggcccaggccgggagcacagaggatggactccctccttctcactccagtccctccctgcagcccaaaccctccagccagccccgggctcagcgtcacagctcagagcctcggccaggggcaggcagtgggcggcggaagccctgagatgaggtttagggtggggagtgcctgctgggcacctgaaggatgacatggccctgcctgagcccgggccggcctcgggccacccacgagggcctcccggcctagggcccgaccgcgccggacgcggtgtccggggcagggcagggctggggcctgggcctcaggagcctaggctaggggcacctccgagagcccctttttgtgataatgttttgcactttttcgtacagggtgggcgggggcgggaggggctagcgcccctgaacttttgatgctttttttttgtgtgggagaggcctgatgccgtttctgctttctgctgagaccacccccaccctgacaccatcagtccccctctgtcctggggcctggcttggacagagaccaggatttggggctgagctggtttcccctccttcctccccaagggcttactctttctcttgctggaggtggaggaagggcgtccatgccaaggccccatacctgggccgggggcagcacggcctggctttcccccgcttcagtgggccttgccctttgtacagcctccacccccattaaaactgctctggacttgcaaaaaaaaacaaaaaaaaaaaaaaaaaaaaaaaaaaaaaaaaaaaaaagagagagggcgcgcgcgcgcgcccccataaatattatctccctccggaggggcgccccattttccgcgcgccgctccaccctgtttttgtgtcacaacgggggcgccccttataggggcgactcctcttatttaatacacccgaggcgccggcggcgccccgcgctgtttataccacaacggtcgctcggaccgcggggagaacaacgcgcgcgctacacctctgtggcgaatatctcttgtgtgatgaacggagaccccccttctctttctgcgggggagtggagacaacacactattgtgggcgccacaacactcactccctctcagccggaacttattttaacgcgccctccaggggtgacaacatcttatacacctcttttaacagagcgagtgtctattagcgcgtgtgtgtcatacacacacctacaggcgcgccgctatttatcgccgctgcgcgcgtgtgtgagatgcaaaatttttgttgagccttctcctgcggcgcctattgtgtgtctttctcggtgacacacatatttttttttactcccacacgcgcgccgcctcctaccgcctatagtaaa

SEQ ID NO: 366110 - DNA, 4005 bp, Homo sapiens
agtgcgacaaatctggcgctgtccccttcagcaccacgcggagtccgcgccgcccctccccgcgctcagctgggcccagcctctcctctgtctctcctcggtctcagctctgggcgagcagcggcccaccccagcccttgggcctggctccaaccggaagttacggctggaagcatccacatcagacccactccccgccagaggaggctcggccctacctggcagccggaaccttgtacatgggccgccagccccaccccaggttggagcagatggcctttactcctctctccccaatgggctggggggcccccctgagcgcctggccacactcttcggaggacctgctgacactggattcctgaaccagggggatacctggtcctccccccgggaagtctcctctcatgcccagagaatcgctagagccaaatgggaattcttctatggctccttggacccccccagctcaggtgctaagcccccagagcaggcccccccatctccacctggggtgggctcaaggcagggctctggggtggctgtggggcgagcagccaagtactccgagacagacctggacacggtgcccctgaggtgctaccgcgagactgacatcgatgaggtgctggctgagcgggaggaggccgactcggccatcgaaagtcagcccagctctgagggcccaccaggcactgcctacccacctgccccacggcccggcccactccctggccctcatcccagcctcggcagtggcaatgaggatgaggacgacgatgaggcaggtggggaagaagatgtggacgacgaggtgtttgaggcctctgaaggggcccggccagggagccggatgcctctcaagtcacctgtgccctttctacctgggacgagcccctcggctgatgggcctgactctttcagttgtgtgttcgaagccatcctggagtcacaccgggccaaaggcacctcctataccagcctcgcctcgctggaggccttggcctcacctggcccaacccagagccccttcttcacctttgagctgcctccccaaccccctgcaccccggcccgacccaccagctcccgccccacttacccctcttgaaccggattctggtaccagctctgctgctgatggtccttggacacagagaggggaggaggaggaggcagaggccagagccaagctggccccagggagggagccccctagtccctgccactcagaggacagccttgggctgggggcagcaccccttggcagcgaaccacccctgagccagctggtgtccgactcagactcagagctggacagcacagaccggctggccctgggaagcacagacaccttgtccaatgggcagaaagcggacctggaggctgcgcagcgcctggccaagaggctgtaccgactagatggcttcaggaaggccgatgtggcccggcacctgggcaagaacaatgacttcagcaaactggtggctggggagtacctcaagttctttgtcttcacgggcatgactctggaccaagctctcagggtgtttctgaaggagctggccttaatgggtgagacccaggaacgagagcgcgtgctggcccacttctcccagcgatacttccagtgcaatcctgaagccctgtcctcagaggacggcgcccacacgctgacctgtgcgctcatgctgctcaacacggatctccacggcataacatcgggaagcgcatgacctgcggggacttcatcgggaacctggagggcctcaatgatggcggcgacttccctagggagctgctcaaggccttgtacagctccatcaagaatgagaagctgcagtgggccatagacgaggaggagctgagacgctctctgtctgagttggccgaccccaaccccaaggtcatcaagcggatcagcgggggcagtggcagtggctccagccctttcctggacctgactcccgagcctggggctgccgtctacaagcacggggccctggtgcgaaaggtgcacgcagaccctgactgcaggaagacacctcggggcaagcggggctggaagagcttccacgggatcctcaagggcatgatcctctacctgcagaaggaggagtacaagcctgggaaggccctttcagagacggagctcaagaatgccatcagcatccaccatgccctggccactcgtgccagtgactacagcaagaggccccacgtcttctacctgcgcacagctgactggcgggtcttcctcttccaggccccgagcctggagcagatgcagtcctggatcactcgcatcaatgtagtagccgctatgttctctgcgccccccttcccagctgctgttagctcccaaaagaagttcagccgccctctcctgcccagcgctgccacccgcctctcccaggaggagcaggtgcggacccacgaggccaagctgaaggccatggcaagtgagctgcgggagcaccgggccgcccagctgggcaagaagggccggggcaaggaggctgaagagcagcggcagaaggaggcctacctggagtttgagaaatcccgctacagcacctatgcagcgctgcttcgggtcaagctgaaggcaggcagtgaggagctggatgcagtggaggcagcactggcccaggccgggagcacagaggatggactccctccttctcactccagtccctccctgcagcccaaaccctccagccagccccgggctcagcgtcacagctcagagcctcggccaggggcaggcagtgggcggcggaagccctgagatgaggtttagggtggggagtgcctgctgggcacctgaaggatgacatggccctgcctgagcccgggccggcctcgggccacccacgagggcctcccggcctagggcccgaccgcgccggacgcggtgtccggggcagggcagggctggggcctgggcctcaggagcctaggctaggggcacctccgagagcccctttttgtgataatgttttgcactttttcgtacagggtgggcgggggcgggaggggctagcgcccctgaacttttgatgctttttttttgtgtgggagaggcctgatgccgtttctgctttctgctgagaccacccccaccctgacaccatcagtccccctctgtcctggggcctggcttggacagagaccaggatttggggctgagctggtttcccctccttcctccccaagggcttactctttctcttgctggaggtggaggaagggcgtccatgccaaggccccatacctgggccgggggcagcacggcctggctttcccccgcttcagtgggccttgccctttgtacagcctccacccccattaaaactgctctggacttgcaaaaaaaaacaaaaaaaaaaaaaaaaaaaaaaaaaaaaaaaaaaaaaagagagagggcgcgcgcgcgcgcccccataaatattatctccctccggaggggcgccccattttccgcgcgccgctccaccctgtttttgtgtcacaacgggggcgccccttataggggcgactcctcttatttaatacacccgaggcgccggcggcgccccgcgctgtttataccacaacggtcgctcggaccgcggggagaacaacgcgcgcgctacacctctgtggcgaatatctcttgtgtgatgaacggagaccccccttctctttctgcgggggagtggagacaacacactattgtgggcgccacaacactcactccctctcagccggaacttattttaacgcgccctccaggggtgacaacatcttatacacctcttttaacagagcgagtgtctattagcgcgtgtgtgtcatacacacacctacaggcgcgccgctatttatcgccgctgcgcgcgtgtgtgagatgcaaaatttttgttgagccttctcctgcggcgcctattgtgtgtctttctcggtgacacacatatttttttttactcccacacgcgcgccgcctcctaccgcctatagtaaa

SEQ ID NO: 366111 - DNA, 4570 bp, Homo sapiens
agtgcgacaaatctggcgctgtccccttcagcaccacgcggagtccgcgccgcccctccccgcgctcagctgggcccagcctctcctctgtctctcctcggtctcagctctgggcgagcagcggcctgtctgaagagcatgcagcccccttactccccgcctggcctcgccatccctgcccccccagcctgacccccggccccagcatggcccagggtgccatgcgcttctgctcggaaggcgactgtgccatctccccaccacgatgcccacgccgctggctccccgaaggcccggtgccccagagccccccagccagcatgtatggcagcacaggctccttgctacggcgagtggcaggtccaggtcctcgaggccgggaactgggacgtgtgacagcaccctgtacacctctgcgtggccccccctcaccccgtgttgctccctcaccctgggcaccctcttcacccactgggcagcccccacccggggcccagagctctgtggtcatcttccgctttgtggagaaggccagtgtgaggccactgaatgggctacctgctccagggggcttgagtcggagctgggatctgggtggggtttctcctcccaggcccaccccagcccttgggcctggctccaaccggaagttacggctggaagcatccacatcagacccactccccgccagaggaggctcggccctacctggcagccggaaccttgtacatgggccgccagccccaccccaggttggagcagatggcctttactcctctctccccaatgggctggggggcccccctgagcgcctggccacactcttcggaggacctgctgacactggattcctgaaccagggggatacctggtcctccccccgggaagtctcctctcatgcccagagaatcgctagagccaaatgggaattcttctatggctccttggacccccccagctcaggtgctaagcccccagagcaggcccccccatctccacctggggtgggctcaaggcagggctctggggtggctgtggggcgagcagccaagtactccgagacagacctggacacggtgcccctgaggtgctaccgcgagactgacatcgatgaggtgctggctgagcgggaggaggccgactcggccatcgaaagtcagcccagctctgagggcccaccaggcactgcctacccacctgccccacggcccggcccactccctggccctcatcccagcctcggcagtggcaatgaggatgaggacgacgatgaggcaggtggggaagaagatgtggacgacgaggtgtttgaggcctctgaaggggcccggccagggagccggatgcctctcaagtcacctgtgccctttctacctgggacgagcccctcggctgatgggcctgactctttcagttgtgtgttcgaagccatcctggagtcacaccgggccaaaggcacctcctataccagcctcgcctcgctggaggccttggcctcacctggcccaacccagagccccttcttcacctttgagctgcctccccaaccccctgcaccccggcccgacccaccagctcccgccccacttacccctcttgaaccggattctggtaccagctctgctgctgatggtccttggacacagagaggggaggaggaggaggcagaggccagagccaagctggccccagggagggagccccctagtccctgccactcagaggacagccttgggctgggggcagcaccccttggcagcgaaccacccctgagccagctggtgtccgactcagactcagagctggacagcacagaccggctggccctgggaagcacagacaccttgtccaatgggcagaaagcggacctggaggctgcgcagcgcctggccaagaggctgtaccgactagatggcttcaggaaggccgatgtggcccggcacctgggcaagaacaatgacttcagcaaactggtggctggggagtacctcaagttctttgtcttcacgggcatgactctggaccaagctctcagggtgtttctgaaggagctggccttaatgggtgagacccaggaacgagagcgcgtgctggcccacttctcccagcgatacttccagtgcaatcctgaagccctgtcctcagaggacggcgcccacacgctgacctgtgcgctcatgctgctcaacacggatctccacggcataacatcgggaagcgcatgacctgcggggacttcatcgggaacctggagggcctcaatgatggcggcgacttccctagggagctgctcaaggccttgtacagctccatcaagaatgagaagctgcagtgggccatggcgagcagaggccagaactgaagcgggggccgcggctccatggccagccccctctgaggtgatcacacctgcagagacgaggaggagctgagacgctctctgtctgagttggccgaccccaaccccaaggtcatcaagcggatcagcgggggcagtggcagtggctccagccctttcctggacctgactcccgagcctggggctgccgtctacaagcacggggccctggtgcgaaaggtgcacgcagaccctgactgcaggaagacacctcggggcaagcggggctggaagagcttccacgggatcctcaagggcatgatcctctacctgcagaaggaggagtacaagcctgggaaggccctttcagagacggagctcaagaatgccatcagcatccaccatgccctggccactcgtgccagtgactacagcaagaggccccacgtcttctacctgcgcacagctgactggcgggtcttcctcttccaggccccgagcctggagcagatgcagtcctggatcactcgcatcaatgtagtagccgctatgttctctgcgccccccttcccagctgctgttagctcccaaaagaagttcagccgccctctcctgcccagcgctgccacccgcctctcccaggaggagcaggtgcggacccacgaggccaagctgaaggccatggcaagtgagctgcgggagcaccgggccgcccagctgggcaagaagggccggggcaaggaggctgaagagcagcggcagaaggaggcctacctggagtttgagaaatcccgctacagcacctatgcagcgctgcttcgggtcaagctgaaggcaggcagtgaggagctggatgcagtggaggcagcactggcccaggccgggagcacagaggatggactccctccttctcactccagtccctccctgcagcccaaaccctccagccagccccgggctcagcgtcacagctcagagcctcggccaggggcaggcagtgggcggcggaagccctgagatgaggtttagggtggggagtgcctgctgggcacctgaaggatgacatggccctgcctgagcccgggccggcctcgggccacccacgagggcctcccggcctagggcccgaccgcgccggacgcggtgtccggggcagggcagggctggggcctgggcctcaggagcctaggctaggggcacctccgagagcccctttttgtgataatgttttgcactttttcgtacagggtgggcgggggcgggaggggctagcgcccctgaacttttgatgctttttttttgtgtgggagaggcctgatgccgtttctgctttctgctgagaccacccccaccctgacaccatcagtccccctctgtcctggggcctggcttggacagagaccaggatttggggctgagctggtttcccctccttcctccccaagggcttactctttctcttgctggaggtggaggaagggcgtccatgccaaggccccatacctgggccgggggcagcacggcctggctttcccccgcttcagtgggccttgccctttgtacagcctccacccccattaaaactgctctggacttgcaaaaaaaaacaaaaaaaaaaaaaaaaaaaaaaaaaaaaaaaaaaaaaagagagagggcgcgcgcgcgcgcccccataaatattatctccctccggaggggcgccccattttccgcgcgccgctccaccctgtttttgtgtcacaacgggggcgccccttataggggcgactcctcttatttaatacacccgaggcgccggcggcgccccgcgctgtttataccacaacggtcgctcggaccgcggggagaacaacgcgcgcgctacacctctgtggcgaatatctcttgtgtgatgaacggagaccccccttctctttctgcgggggagtggagacaacacactattgtgggcgccacaacactcactccctctcagccggaacttattttaacgcgccctccaggggtgacaacatcttatacacctcttttaacagagcgagtgtctattagcgcgtgtgtgtcatacacacacctacaggcgcgccgctatttatcgccgctgcgcgcgtgtgtgagatgcaaaatttttgttgagccttctcctgcggcgcctattgtgtgtctttctcggtgacacacatatttttttttactcccacacgcgcgccgcctcctaccgcctatagtaaa

SEQ ID NO: 366112 - DNA, 2753 bp, Homo sapiens
caagggaggcaggcctagctgggacggagaaaaacactgttgggggagatgcagtgtaggctccatatgggaagtaacagggaactaccacaggttcttgagcaagggagtgacaagatagaatccgaaattttgtatctgactgagcctgtagaccaggatgtatggggttggggtgggggcggcactaggaaactacttcttccatctgctaccatttagcccacaaaccgtgagcaaagcctggggctggatgtggttgagccagcggaggcaggcccggggctgtcctggtggagaagggtgtgagggctgcaggtgtgcagcaatggagaggatagtgctggccctacttgctgggaggaagggacagtggtggctctaggctggggagctctgagggaggtgccctgctctgaggaggcacagctacacattgtggaggcctgatctgagacgggagacatggcaggaccctcaggttgagccccccaagccacaaacactgggggagcttttccagggcgagcagaggccagaactgaagcgggggccgcggctccatggccagccccctctgaggtgatcacacctgcagagacgaggaggagctgagacgctctctgtctgagttggccgaccccaaccccaaggtcatcaagcggatcagcgggggcagtggcagtggctccagccctttcctggacctgactcccgagcctggggctgccgtctacaagcacggggccctggtgcgaaaggtgcacgcagaccctgactgcaggaagacacctcggggcaagcggggctggaagagcttccacgggatcctcaagggcatgatcctctacctgcagaaggaggagtacaagcctgggaaggccctttcagagacggagctcaagaatgccatcagcatccaccatgccctggccactcgtgccagtgactacagcaagaggccccacgtcttctacctgcgcacagctgactggcgggtcttcctcttccaggccccgagcctggagcagatgcagtcctggatcactcgcatcaatgtagtagccgctatgttctctgcgccccccttcccagctgctgttagctcccaaaagaagttcagccgccctctcctgcccagcgctgccacccgcctctcccaggaggagcaggtgcggacccacgaggccaagctgaaggccatggcaagtgagctgcgggagcaccgggccgcccagctgggcaagaagggccggggcaaggaggctgaagagcagcggcagaaggaggcctacctggagtttgagaaatcccgctacagcacctatgcagcgctgcttcgggtcaagctgaaggcaggcagtgaggagctggatgcagtggaggcagcactggcccaggccgggagcacagaggatggactccctccttctcactccagtccctccctgcagcccaaaccctccagccagccccgggctcagcgtcacagctcagagcctcggccaggggcaggcagtgggcggcggaagccctgagatgaggtttagggtggggagtgcctgctgggcacctgaaggatgacatggccctgcctgagcccgggccggcctcgggccacccacgagggcctcccggcctagggcccgaccgcgccggacgcggtgtccggggcagggcagggctggggcctgggcctcaggagcctaggctaggggcacctccgagagcccctttttgtgataatgttttgcactttttcgtacagggtgggcgggggcgggaggggctagcgcccctgaacttttgatgctttttttttgtgtgggagaggcctgatgccgtttctgctttctgctgagaccacccccaccctgacaccatcagtccccctctgtcctggggcctggcttggacagagaccaggatttggggctgagctggtttcccctccttcctccccaagggcttactctttctcttgctggaggtggaggaagggcgtccatgccaaggccccatacctgggccgggggcagcacggcctggctttcccccgcttcagtgggccttgccctttgtacagcctccacccccattaaaactgctctggacttgcaaaaaaaaacaaaaaaaaaaaaaaaaaaaaaaaaaaaaaaaaaaaaaagagagagggcgcgcgcgcgcgcccccataaatattatctccctccggaggggcgccccattttccgcgcgccgctccaccctgtttttgtgtcacaacgggggcgccccttataggggcgactcctcttatttaatacacccgaggcgccggcggcgccccgcgctgtttataccacaacggtcgctcggaccgcggggagaacaacgcgcgcgctacacctctgtggcgaatatctcttgtgtgatgaacggagaccccccttctctttctgcgggggagtggagacaacacactattgtgggcgccacaacactcactccctctcagccggaacttattttaacgcgccctccaggggtgacaacatcttatacacctcttttaacagagcgagtgtctattagcgcgtgtgtgtcatacacacacctacaggcgcgccgctatttatcgccgctgcgcgcgtgtgtgagatgcaaaatttttgttgagccttctcctgcggcgcctattgtgtgtctttctcggtgacacacatatttttttttactcccacacgcgcgccgcctcctaccgcctatagtaaa

SEQ ID NO: 366113 - DNA, 2544 bp, Homo sapiens
cgctctagccaagccgcagagcagacagcgccgccgccgccgccgcgcactccgtgcgtccgtgagagccgggccggctcgggccgggccgcgccgctcgcgctggctgtcgggggagcggtccgcgggccgtccgggcggcccgggggccgagggcggacgggggcatggccgggggccgcggcgcgccggccgggccagcatgatcggcgtcaacagcatccacagcagcgccgggcggctgcgctcgcgctcgctgtgctccgtgcgctacgggcgcacccaccgcggcgcggagaccctgtgctacggctggccgcagcgctcgcgcagcctcaagcccgtgctctacaccgacctggtggtcagccgcctgcagagccgcaagaagaaaaaggcggccttgtacagctccatcaagaatgagaagctgcagtgggccatgtcatcaagcggatcagcgggggcagtggcagtggctccagccctttcctggacctgactcccgagcctggggctgccgtctacaagcacggggccctggtgcgaaaggtgcacgcagaccctgactgcaggaagacacctcggggcaagcggggctggaagagcttccacgggatcctcaagggcatgatcctctacctgcagaaggaggagtacaagcctgggaaggccctttcagagacggagctcaagaatgccatcagcatccaccatgccctggccactcgtgccagtgactacagcaagaggccccacgtcttctacctgcgcacagctgactggcgggtcttcctcttccaggccccgagcctggagcagatgcagtcctggatcactcgcatcaatgtagtagccgctatgttctctgcgccccccttcccagctgctgttagctcccaaaagaagttcagccgccctctcctgcccagcgctgccacccgcctctcccaggaggagcaggtgcggacccacgaggccaagctgaaggccatggcaagtgagctgcgggagcaccgggccgcccagctgggcaagaagggccggggcaaggaggctgaagagcagcggcagaaggaggcctacctggagtttgagaaatcccgctacagcacctatgcagcgctgcttcgggtcaagctgaaggcaggcagtgaggagctggatgcagtggaggcagcactggcccaggccgggagcacagaggatggactccctccttctcactccagtccctccctgcagcccaaaccctccagccagccccgggctcagcgtcacagctcagagcctcggccaggggcaggcagtgggcggcggaagccctgagatgaggtttagggtggggagtgcctgctgggcacctgaaggatgacatggccctgcctgagcccgggccggcctcgggccacccacgagggcctcccggcctagggcccgaccgcgccggacgcggtgtccggggcagggcagggctggggcctgggcctcaggagcctaggctaggggcacctccgagagcccctttttgtgataatgttttgcactttttcgtacagggtgggcgggggcgggaggggctagcgcccctgaacttttgatgctttttttttgtgtgggagaggcctgatgccgtttctgctttctgctgagaccacccccaccctgacaccatcagtccccctctgtcctggggcctggcttggacagagaccaggatttggggctgagctggtttcccctccttcctccccaagggcttactctttctcttgctggaggtggaggaagggcgtccatgccaaggccccatacctgggccgggggcagcacggcctggctttcccccgcttcagtgggccttgccctttgtacagcctccacccccattaaaactgctctggacttgcaaaaaaaaacaaaaaaaaaaaaaaaaaaaaaaaaaaaaaaaaaaaaaagagagagggcgcgcgcgcgcgcccccataaatattatctccctccggaggggcgccccattttccgcgcgccgctccaccctgtttttgtgtcacaacgggggcgccccttataggggcgactcctcttatttaatacacccgaggcgccggcggcgccccgcgctgtttataccacaacggtcgctcggaccgcggggagaacaacgcgcgcgctacacctctgtggcgaatatctcttgtgtgatgaacggagaccccccttctctttctgcgggggagtggagacaacacactattgtgggcgccacaacactcactccctctcagccggaacttattttaacgcgccctccaggggtgacaacatcttatacacctcttttaacagagcgagtgtctattagcgcgtgtgtgtcatacacacacctacaggcgcgccgctatttatcgccgctgcgcgcgtgtgtgagatgcaaaatttttgttgagccttctcctgcggcgcctattgtgtgtctttctcggtgacacacatatttttttttactcccacacgcgcgccgcctcctaccgcctatagtaaa

SEQ ID NO: 366114 - DNA, 325 bp, Homo sapiens
  misc_feature (293)..(293): n is a, c, g, or t
ggcagcatgtcacttgcagggagtgacttttctttatttgagtgtaagtgctgtgggtggaaggtcagctggggccagaaggggaaggggcccgaatgccttgcatgtttcatctcagctctgcggtgaggcccaaacctgaagtgggccttcatttaagtatttggggagattctgcctggcccaactcaggcggtgactgcagcaggagagagaggtgcagtcggaagaaaggtcttgctgagcaaacgggacccaaagagggatgtgcacagtacacggtcccttcactncacatgccccgcgaccttactcccttttatgg

SEQ ID NO: 366115 - DNA, 585 bp, Homo sapiens
ggcagcatgtcacttgcagggagtgacttttctttatttgagtgtaagtgctgtgggtggaaggtcagctggggccagaaggggaaggggcccgaatgccttgcatgtttcatctcagctctgcggtgaggcccaaacctgaagtgggccttcatttaagtatttggggagattctgcctggcccaactcaggcggtgactgcagcaggagagagaggtgcagtcggaagaaaggtcttgctgagcaaacgggacccaaagagggatgtgcaagatctggaaacaacaaatggttttcaaactcaatagtcccctccagcaatcagcaaacagcagggtggctgcagatcttccatccacccactaaggcagccagcaatccctgtctctgcagtggcggaggaaacctctgtcttttgcaatccctgtgattcggaagctttccacccctctggaccggcccctcttcccctcccgcccctccgctctgatccgtgtggtttgctaagggaggaaagccagagcaggaaacagataacttagggagtggctgttcatgtgattaaaatgtctttgctttccaaa

SEQ ID NO: 366116 - DNA, 551 bp, Homo sapiens
cacgcctttcctgctgctctggagagagggtgggcaccgggctggaggaaatgttgcaagcattctctacccagtctggcatgaacctcgagtggtcccagaagtgccttcaggacaacaactgggactacaccagatctgcccaggccttcactcatctcaaggccaagggcgagatcccagaagtggcattcatgaagtgatcgtagtcatgcctcagaagcagtcccccctgtaaatagtccttggatattaccgtctggttgtcgtctgtcatctcctcctgtctggcccgaggccgccccgtgactgtgaccgagggagggagggctgcctgatccctctcctcgcctgccttctggaagacttcagaagattgagcctcactggtgccaggaagccaaagcttactttgtagaactgacactaaactacccgaaggacttaggtgctttgtgtacttaaccccaggacctccttactttttaatataaagagtgatgttgtatttcgtgttctgcactttttaatataaagagtgatgttgtatt

SEQ ID NO: 366117 - DNA, 2329 bp, Homo sapiens
cggcaccgcccacagcctgggacgtcagcggcgcgcgacgtgctttgctgtataaatgcggtggcgcccggcgtagggacacttcggtcctgagcgcttgggagttaggttgtttgccggcgtagcggccagcgcctgagcccgcccttgatcttcgctgtggcatggcggacgaggggaagtcgtacagcgaacacgatgatgaacgcgttaatttccctcaaagaaagaagaaaggccggggtcccttccggtggaaatatggtgaaggaaaccgtaggtctggaagaggcggttctggtattcggtcttcccgccttgaggaagatgatggagatgtggcaatgagtgatgcccaggatggtccccgagtacgatacaacccctataccacccgacctaaccgtcggggtgatacttggcatgatcgagatcgcattcatgttactgtgcggagagacagagctcctccagagagaggaggggctggcaccagccaggatgggacctcaaagaactggttcaagattacaattccttatggcagaaagtatgacaaggcatggctcctgagcatgattcagagcaagtgcagtgtgcccttcacccctattgagtttcactatgagaatacacgggcccagttcttcgttgaagacgccagtactgcctctgcattgaaggctgtcaactataagattttggatcgggagaaccgaaggatatctatcatcatcaactcttctgctccaccccacactatactgaatgaactgaagccagaacaagtagaacagctaaagctgatcatgagcaaacgatacgatggctcccaacaagcccttgacctcaaaggcctccgttcagacccagatttggtggcccagaacattgacgttgtcctgaatcgcagaagctgtatggcagctaccctgaggatcattgaagagaacatccctgagctattgtccttgaacttgagcaacaacaggctgtacaggctggatgacatgtctagcattgttcagaaggcacccaacctgaagatcctaaacctttctggaaatgaattgaagtctgagcgggaattggacaagataaaggggctgaagctagaagagctctggctcgatggaaactccctgtgtgacaccttccgagaccagtccacctacatcagcgccattcgcgaacgatttcccaagttactacgcctggatggccatgagctacccccaccaattgcctttgatgttgaagcccccacgacgttaccgccctgcaagggaagctattttggaacagaaaacttgaagagtctggtcttgcacttcctgcaacagtactatgcaatttacgactctggagaccgacaagggctcctggatgcctaccatgatggggcctgctgttccctgagcattcctttcattcctcagaaccctgcccgaagcagcttagccgagtatttcaaggatagcagaaatgtgaagaagcttaaagaccctaccttgcggttccggctgctgaagcacacgcgtctcaacgttgttgccttcctcaatgagttgcccaaaacccagcacgacgtcaattccttcgtggtagacataagcgcccagacaagcacattgctgtgtttttctgtcaatggagtcttcaaggaagtggacggaaagtcccgggattctttgcgagccttcacccggacattcattgctgttcctgctagcaattcagggctatgtattgtaaatgatgagctatttgtgcggaatgccagttctgaagagatccaaagagccttcgctatgcctgcacccacgccttcctccagcccggtgcccaccctctctccagagcagcaggaaatgttgcaagcattctctacccagtctggcatgaacctcgagtggtcccagaagtgccttcaggacaacaactgggactacaccagatctgcccaggccttcactcatctcaaggccaagggcgagatcccagaagtggcattcatgaagtgatcgtagtcatgcctcagaagcagtcccccctgtaaatagtccttggatattaccgtctggttgtcgtctgtcatctcctcctgtctggcccgaggccgccccgtgactgtgaccgagggagggagggctgcctgatccctctcctcgcctgccttctggaagacttcagaagattgagcctcactggtgccaggaagccaaagcttactttgtagaactgacactaaactacccgaaggacttaggtgctttgtgtacttaaccccaggacctccttactttttaatataaagagtgatgttgta

SEQ ID NO: 366118 - DNA, 2372 bp, Homo sapiens
cggcaccgcccacagcctgggacgtcagcggcgcgcgacgtgctttgctgtataaatgcggtggcgcccggcgtagggacacttcggtcctgagcgcttgggagttaggttgtttgccggcgtagcggccagcgcctgagcccgcccttgatcttcgctgtggcatggcggacgaggggaagtcgtacagcgaacacgatgatgaacgcgttaatttccctcaaagaaagaagaaaggccggggtcccttccggtggaaatatggtgaaggaaaccgtaggtctggaagaggcggttctggtattcggtcttcccgccttgaggaagatgatggagatgtggcaatgagtgatgcccaggatggtccccgagtacgatacaacccctataccacccgacctaaccgtcggggtgatacttggcatgatcgagatcgcattcatgttactgtgcggagagacagagctcctccagagagaggaggggctggcaccagccaggatgggacctcaaagaactggttcaagattacaattccttatggcagaaagtatgacaaggcatggctcctgagcatgattcagagcaagtgcagtgtgcccttcacccctattgagtttcactatgagaatacacgggcccagttcttcgttgaagacgccagtactgcctctgcattgaaggctgtcaactataagattttggatcgggagaaccgaaggatatctatcatcatcaactcttctgctccaccccacactatactgaatgaactgaagccagaacaagtagaacagctaaagctgatcatgagcaaacgatacgatggctcccaacaagcccttgacctcaaaggcctccgttcagacccagatttggtggcccagaacattgacgttgtcctgaatcgcagaagctgtatggcagctaccctgaggatcattgaagagaacatccctgagctattgtccttgaacttgagcaacaacaggctgtacaggctggatgacatgtctagcattgttcagaaggcacccaacctgaagatcctaaacctttctggaaatgaattgaagtctgagcgggaattggacaagataaaggggctgaagctagaagagctctggctcgatggaaactccctgtgtgacaccttccgagaccagtccacctacatcagcgccattcgcgaacgatttcccaagttactacgcctggatggccatgagctacccccaccaattgcctttgatgttgaagcccccacgacgttaccgccctgcaagggaagctattttggaacagaaaacttgaagagtctggtcttgcacttcctgcaacagtactatgcaatttacgactctggagaccgacaagggctcctggatgcctaccatgatggggcctgctgttccctgagcattcctttcattcctcagaaccctgcccgaagcagcttagccgagtatttcaaggatagcagaaatgtgaagaagcttaaagaccctaccttgcggttccggctgctgaagcacacgcgtctcaacgttgttgccttcctcaatgagttgcccaaaacccagcacgacgtcaattccttcgtggtagacataagcgcccagacaagcacattgctgtgtttttctgtcaatggagtcttcaaggaagtggacggaaagtcccgggattctttgcgagccttcacccggacattcattgctgttcctgctagcaattcagggctatgtattgtaaatgatgagctatttgtgcggaatgccagttctgaagagatccaaagagccttcgctatgcctgcacccacgccttcctccagcccggtgcccaccctctctccagagcagcaggaaatgttgcaagcattctctacccagtctggcatgaacctcgagtggtcccagaagtgccttcaggacaacaactgggactacaccagatctgcccaggccttcactcatctcaaggccaagggcgagatcccagaagtggcattcatgaagtgatcgtagtcatgcctcagaagcagtcccccctgtaaatagtccttggatattaccgtctggttgtcgtctgtcatctcctcctgtctggcccgaggccgccccgtgactgtgaccgagggagggagggctgcctgatccctctcctcgcctgccttctggaagacttcagaagattgagcctcactggtgccaggaagccaaagcttactttgtagaactgacactaaactacccgaaggacttaggtgctttgtgtacttaaccccaggacctccttactttttaatataaagagtgatgttgtatttcgtgttctgcactttttaatataaagagtgatgttgtatt

SEQ ID NO: 366119 - DNA, 2312 bp, Homo sapiens
agcaggctggtcccggccggagttgtaggatgagcgcttgggagttaggttgtttgccggcgtagcggccagcgcctgagcccgcccttgatcttcgctgtggcatggcggacgaggggaagtcgtacagcgaacacgatgatgaacgcgttaatttccctcaaagaaagaagaaaggccggggtcccttccggtggaaatatggtgaaggaaaccgtaggtctggaagaggcggttctggtattcggtcttcccgccttgaggaagatgatggagatgtggcaatgagtgatgcccaggatggtccccgagtacgatacaacccctataccacccgacctaaccgtcggggtgatacttggcatgatcgagatcgcattcatgttactgtgcggagagacagagctcctccagagagaggaggggctggcaccagccaggatgggacctcaaagaactggttcaagattacaattccttatggcagaaagtatgacaaggcatggctcctgagcatgattcagagcaagtgcagtgtgcccttcacccctattgagtttcactatgagaatacacgggcccagttcttcgttgaagacgccagtactgcctctgcattgaaggctgtcaactataagattttggatcgggagaaccgaaggatatctatcatcatcaactcttctgctccaccccacactatactgaatgaactgaagccagaacaagtagaacagctaaagctgatcatgagcaaacgatacgatggctcccaacaagcccttgacctcaaaggcctccgttcagacccagatttggtggcccagaacattgacgttgtcctgaatcgcagaagctgtatggcagctaccctgaggatcattgaagagaacatccctgagctattgtccttgaacttgagcaacaacaggctgtacaggctggatgacatgtctagcattgttcagaaggcacccaacctgaagatcctaaacctttctggaaatgaattgaagtctgagcgggaattggacaagataaaggggctgaagctagaagagctctggctcgatggaaactccctgtgtgacaccttccgagaccagtccacctacatcagcgccattcgcgaacgatttcccaagttactacgcctggatggccatgagctacccccaccaattgcctttgatgttgaagcccccacgacgttaccgccctgcaagggaagctattttggaacagaaaacttgaagagtctggtcttgcacttcctgcaacagtactatgcaatttacgactctggagaccgacaagggctcctggatgcctaccatgatggggcctgctgttccctgagcattcctttcattcctcagaaccctgcccgaagcagcttagccgagtatttcaaggatagcagaaatgtgaagaagcttaaagaccctaccttgcggttccggctgctgaagcacacgcgtctcaacgttgttgccttcctcaatgagttgcccaaaacccagcacgacgtcaattccttcgtggtagacataagcgcccagacaagcacattgctgtgtttttctgtcaatggagtcttcaaggaagtggacggaaagtcccgggattctttgcgagccttcacccggacattcattgctgttcctgctagcaattcagggctatgtattgtaaatgatgagctatttgtgcggaatgccagttctgaagagatccaaagagccttcgctatgcctgcacccacgccttcctccagcccggtgcccaccctctctccagagcagcaggaaatgttgcaagcattctctacccagtctggcatgaacctcgagtggtcccagaagtgccttcaggacaacaactgggactacaccagatctgcccaggccttcactcatctcaaggccaagggcgagatcccagaagtggcattcatgaagtgatcgtagtcatgcctcagaagcagtcccccctgtaaatagtccttggatattaccgtctggttgtcgtctgtcatctcctcctgtctggcccgaggccgccccgtgactgtgaccgagggagggagggctgcctgatccctctcctcgcctgccttctggaagacttcagaagattgagcctcactggtgccaggaagccaaagcttactttgtagaactgacactaaactacccgaaggacttaggtgctttgtgtacttaaccccaggacctccttactttttaatataaagagtgatgttgtatttcgtgttctgcactttttaatataaagagtgatgttgtatt

SEQ ID NO: 366120 - DNA, 2580 bp, Homo sapiens
cggcaccgcccacagcctgggacgtcagcggcgcgcgacgtgctttgctgtataaatgcggtggcgcccggcgtagggacacttcggtcctgagcgcttgggagttaggttgtttgccggcgtagcggccagcgcctgagcccgcccttgatcttcgctgtggcatggcggacgaggggaagtcgtacagcgaacacgatgatgaacgcgttaatttccctcaaagaaagaagaaaggccggggtcccttccggtggaaatatggtgaaggaaaccgtaggtctggaagaggcggttctggtattcggtcttcccgccttgaggaagatgatggagatgtggcaatgagtgatgcccaggatggtccccgagtacgatacaacccctataccacccgacctaaccgtcggggtgatacttggcatgatcgagatcgcattcatgttactgtgcggagagacagagctcctccagagagaggaggggctggcaccagccaggatgggacctcaaagaactggttcaagattacaattccttatggcagaaagtatgacaaggcatggctcctgagcatgattcagagcaagtgcagtgtgcccttcacccctattgagtttcactatgagaatacacgggcccagttcttcgttgaagacgccagtactgcctctgcattgaaggctgtcaactataagattttggatcgggagaaccgaaggatatctatcatcatcaactcttctgctccaccccacactatactgaatgaactgaagccagaacaagtagaacagctaaagctgatcatgagcaaacgatacgatggctcccaacaagcccttgacctcaaaggcctccgttcagacccagatttggtggcccagaacattgacgttgtcctgaatcgcagaagctgtatggcagctaccctgaggatcattgaagagaacatccctgagctattgtccttgaacttgagcaacaacaggctgtacaggctggatgacatgtctagcattgttcagaaggcacccaacctgaagatcctaaacctttctggaaatgaattgaagtctgagcgggaattggacaagataaaggggctgaagctagaagagctctggctcgatggaaactccctgtgtgacaccttccgagaccagtccacctacatcagcgccattcgcgaacgatttcccaagttactacgcctggatggccatgagctacccccaccaattgcctttgatgttgaagcccccacgacgttaccgccctgcaagggaagctattttggaacagaaaacttgaagagtctggtcttgcacttcctgcaacagtactatgcaatttacgactctggagaccgacaagggctcctggatgcctaccatgatggggcctgctgttccctgagcattcctttcattcctcagaaccctgcccgaagcagcttagccgagtatttcaaggatagcagaaatgtgaagaagcttaaagaccctaccttgcggttccggctgctgaagcacacgcgtctcaacgttgttgccttcctcaatgagttgcccaaaacccagcacgacgtcaattccttcgtggtagacataagcgcccagacaagcacattgctgtgtttttctgtcaatggagtcttcaaggaagtggacggaaagtcccgggattctttgcgagccttcacccggacattcattgctgttcctgctagcaattcagggctatgtattgtaaatgatgagctatttgtgcggaatgccagttctgaagagatccaaagagccttcgctatgcctgcacccacgccttcctccagcccggtgcccaccctctctccagagcagcaggaaatgttgcaagcattctctacccagtctggcatgaacctcgagtggtcccagaagtgccttcaggacaacaactgggactacaccagatctgcccaggccttcactcatctcaaggccaagggcgagatcccagaagtggcattcatgaagtgatcgtagtcatgcctcagaagcagtcccccctgtaaatagtccttggatattaccgtctggttgtcgtctgtcatctcctcctgtctggcccgaggccgccccgtgactgtgaccgagggagggagggctgcctgatccctctcctcgcctgccttctggaagacttcagaagattgagcctcactggtgccaggaagccaaagcttactttgtagaactgacactaaactacccgaaggacttaggtgctttgtgtacttaaccccaggacctccttactttttaatataaagagtgatgttgtaaaaaaaaaaaaaaaaaaacatataataaataaatattataaaaacataataaacttaattacaatatatataaaaaaaaaaaaaaaactcgagggggggcccgtaccccaatcgccctatagggagccgattacaattactggcgtcgtttaacagcgttgggactgggggcgaataccaagaagcccgacccgacgcctttccaacagtggcaacctgaatggcattgcaaattgtagcgtaatttttta

SEQ ID NO: 366121 - DNA, 2866 bp, Homo sapiens
cggcaccgcccacagcctgggacgtcagcggcgcgcgacgtgctttgctgtataaatgcggtggcgcccggcgtagggacacttcggtcctgagcgcttgggagttaggttgtttgccggcgtagcggccagcgcctgagcccgcccttgatcttcgctgtggcatggcggacgaggggaagtcgtacagcgaacacgatgatgaacgcgttaatttccctcaaagaaagaagaaaggccggggtcccttccggtggaaatatggtgaaggaaaccgtaggtctggaagaggcggttctggtattcggtcttcccgccttgaggaagatgatggagatgtggcaatgagtgatgcccaggatggtccccgagtacgatacaacccctataccacccgacctaaccgtcggggtgatacttggcatgatcgagatcgcattcatgttactgtgcggagagacagagctcctccagagagaggaggggctggcaccagccaggatgggacctcaaagaactggttcaagattacaattccttatggcagaaagtatgacaaggcatggctcctgagcatgattcagagcaagtgcagtgtgcccttcacccctattgagtttcactatgagaatacacgggcccagttcttcgttgaagacgccagtactgcctctgcattgaaggctgtcaactataagattttggatcgggagaaccgaaggatatctatcatcatcaactcttctgctccaccccacactatactgaatgaactgaagccagaacaagtagaacagctaaagctgatcatgagcaaacgatacgatggctcccaacaagcccttgacctcaaaggcctccgttcagacccagatttggtggcccagaacattgacgttgtcctgaatcgcagaagctgtatggcagctaccctgaggatcattgaagagaacatccctgagctattgtccttgaacttgagcaacaacaggctgtacaggctggatgacatgtctagcattgttcagaaggcacccaacctgaagatcctaaacctttctggaaatgaattgaagtctgagcgggaattggacaagataaaggggctgaagctagaagagctctggctcgatggaaactccctgtgtgacaccttccgagaccagtccacctacatcagcgccattcgcgaacgatttcccaagttactacgcctggatggccatgagctacccccaccaattgcctttgatgttgaagcccccacgacgttaccgccctgcaagggaagctattttggaacagaaaacttgaagagtctggtcttgcacttcctgcaacagtactatgcaatttacgactctggagaccgacaagggctcctggatgcctaccatgatggggcctgctgttccctgagcattcctttcattcctcagaaccctgcccgaagcagcttagccgagtatttcaaggatagcagaaatgtgaagaagcttaaagaccctaccttgcggttccggctgctgaagcacacgcgtctcaacgttgttgccttcctcaatgagttgcccaaaacccagcacgacgtcaattccttcgtggtagacataagcgcccagacaagcacattgctgtgtttttctgtcaatggagtcttcaaggaagtggacggaaagtcccgggattctttgcgagccttcacccggacattcattgctgttcctgctagcaattcagggtaagtattctgcttttcgcattggataccagtcctaatccatggccaacagtgtggtaattggagggtagagtcagtctttggggtgatttcagaaaggcaacaggaaatcagagaaagctcacatagtagttaagagccagttaatagcttggctctggaattgtaccgtctgggttttcatcctggctccaccacttctagcaagtaggctgctgcctcatctgaaaattcatataacaatattcatttcctaagtttgttgtgaggatgaattaaaagagctaaagtccatgcgttgggagaaccctagtgtgtttagtagataatccttccaaacattgattccatgggaggggataaatgataaaaggtaacaatagctaagagtgggagggggaccttgtggatattgaaagaatcagagaataggaatgatgttgggaggatgatgttatctctgtctagctttttaagtgctctttgtcctcaaggctatgtattgtaaatgatgagctatttgtgcggaatgccagttctgaagagatccaaagagccttcgctatgcctgcacccacgccttcctccagcccggtgcccaccctctctccagagcagcaggaaatgttgcaagcattctctacccagtctggcatgaacctcgagtggtcccagaagtgccttcaggacaacaactgggactacaccagatctgcccaggccttcactcatctcaaggccaagggcgagatcccagaagtggcattcatgaagtgatcgtagtcatgcctcagaagcagtcccccctgtaaatagtccttggatattaccgtctggttgtcgtctgtcatctcctcctgtctggcccgaggccgccccgtgactgtgaccgagggagggagggctgcctgatccctctcctcgcctgccttctggaagacttcagaagattgagcctcactggtgccaggaagccaaagcttactttgtagaactgacactaaactacccgaaggacttaggtgctttgtgtacttaaccccaggacctccttactttttaatataaagagtgatgttgtatttcgtgttctgcactttttaatataaagagtgatgttgtatt

SEQ ID NO: 366122 - DNA, 2330 bp, Homo sapiens
cggcaccgcccacagcctgggacgtcagcggcgcgcgacgtgctttgctgtataaatgcggtggcgcccggcgtagggacacttcggtcctgagcgcttgggagttaggttgtttgccggcgtagcggccagcgcctgagcccgcccttgatcttcgctgtggcatggcggacgaggggaagtcgtacagcgaacacgatgatgaacgcgttaatttccctcaaagaaagaagaaaggccggggtcccttccggtggaaatatggtgaaggaaaccgtaggtctggaagaggcggttctggtattcggtcttcccgccttgaggaagatgatggagatgtggcaatgagtgatgcccaggatggtccccgagtacgatacaacccctataccacccgacctaaccgtcggggtgatacttggcatgatcgagatcgcattcatgttactgtgcggagagacagagctcctccagagagaggaggggctggcaccagccaggatgggacctcaaagaactggttcaagattacaattccttatggcagaaagtatgacaaggcatggctcctgagcatgattcagagcaagtgcagtgtgcccttcacccctattgagtttcactatgagaatacacgggcccagttcttcgttgaagacgccagtactgcctctgcattgaaggctgtcaactataagattttggatcgggagaaccgaaggatatctatcatcatcaactcttctgctccaccccacactatactgaatgaactgaagccagaacaagtagaacagctaaagctgatcatgagcaaacgatacgatggctcccaacaagcccttgacctcaaaggcctccgttcagacccagatttggtggcccagaacattgacgttgtcctgaatcgcagaagctgtatggcagctaccctgaggatcattgaagagaacatccctgagctattgtccttgaacttgagcaacaacaggctgtacaggctggatgacatgtctagcattgttcagaaggcacccaacctgaagatcctaaacctttctggaaatgaattgaagtctgagcgggaattggacaagataaaggggctgaagctagaagagctctggctcgatggaaactccctgtgtgacaccttccgagaccagtccacctacatcagcgccattcgcgaacgatttcccaagttactacgcctggatggccatgagctacccccaccaattgcctttgatgttgaagcccccacgacgttaccgccctgcaagggaagctattttggaacagaaaacttgaagagtctggtcttgcacttcctgcaacagtactatgcaatttacgactctggagaccgacaagggctcctggatgcctaccatgatggggcctgctgttccctgagcattcctttcattcctcagaaccctgcccgaagcagcttagccgagtatttcaaggatagcagaaatgtgaagaagcttaaagaccctaccttgcggttccggctgctgaagcacacgcgtctcaacgttgttgccttcctcaatgagttgcccaaaacccagcacgacgtcaattccttcgtggtagacataagcgcccagacaagcacattgctgtgtttttctgtcaatggagtcttcaaggaagtggacggaaagtcccgggattctttgcgagccttcacccggacattcattgctgttcctgctagcaattcaggttctgaagagatccaaagagccttcgctatgcctgcacccacgccttcctccagcccggtgcccaccctctctccagagcagcaggaaatgttgcaagcattctctacccagtctggcatgaacctcgagtggtcccagaagtgccttcaggacaacaactgggactacaccagatctgcccaggccttcactcatctcaaggccaagggcgagatcccagaagtggcattcatgaagtgatcgtagtcatgcctcagaagcagtcccccctgtaaatagtccttggatattaccgtctggttgtcgtctgtcatctcctcctgtctggcccgaggccgccccgtgactgtgaccgagggagggagggctgcctgatccctctcctcgcctgccttctggaagacttcagaagattgagcctcactggtgccaggaagccaaagcttactttgtagaactgacactaaactacccgaaggacttaggtgctttgtgtacttaaccccaggacctccttactttttaatataaagagtgatgttgtatttcgtgttctgcactttttaatataaagagtgatgttgtatt

SEQ ID NO: 366123 - DNA, 1580 bp, Homo sapiens
aactgatggatacctggtgaggcagcggagcccctgggctcccaccccattccctcctcccggggctgcacaggtgagtaggtggaaggtaaggggggcagggaggggaaagaggtcctgggcttaaagcctgggcttggagtactgctccttgacactcagggtcaggcagagagaaaagagacagccttcaaggcagtccatgtctgggtgccccgggtcaggtggggagtgggggccatttttccctgagcacaggctgggagggagtggagggatgagcaggatgggatgggctgtccctcgggtttggtatatttgctcctagagcagcccaggaggcacggtggctctgaagcatcactcacttctgtcccgttcttgacagcgccattcgcgaacgatttcccaagttactacgcctggatggccatgagctacccccaccaattgcctttgatgttgaagcccccacgacgttaccgccctgcaagggaagctattttggaacagaaaacttgaagagtctggtcttgcacttcctgcaacagtactatgcaatttacgactctggagaccgacaagggctcctggatgcctaccatgatggggcctgctgttccctgagcattcctttcattcctcagaaccctgcccgaagcagcttagccgagtatttcaaggatagcagaaatgtgaagaagcttaaagaccctaccttgcggttccggctgctgaagcacacgcgtctcaacgttgttgccttcctcaatgagttgcccaaaacccagcacgacgtcaattccttcgtggtagacataagcgcccagacaagcacattgctgtgtttttctgtcaatggagtcttcaaggaagtggacggaaagtcccgggattctttgcgagccttcacccggacattcattgctgttcctgctagcaattcagggctatgtattgtaaatgatgagctatttgtgcggaatgccagttctgaagagatccaaagagccttcgctatgcctgcacccacgccttcctccagcccggtgcccaccctctctccagagcagcaggaaatgttgcaagcattctctacccagtctggcatgaacctcgagtggtcccagaagtgccttcaggacaacaactgggactacaccagatctgcccaggccttcactcatctcaaggccaagggcgagatcccagaagtggcattcatgaagtgatcgtagtcatgcctcagaagcagtcccccctgtaaatagtccttggatattaccgtctggttgtcgtctgtcatctcctcctgtctggcccgaggccgccccgtgactgtgaccgagggagggagggctgcctgatccctctcctcgcctgccttctggaagacttcagaagattgagcctcactggtgccaggaagccaaagcttactttgtagaactgacactaaactacccgaaggacttaggtgctttgtgtacttaaccccaggacctccttactttttaatataaagagtgatgttgtatttcgtgttctgcactttttaatataaagagtgatgttgtatt

SEQ ID NO: 366124 - DNA, 1474 bp, Homo sapiens
ctgctctgaggccagatggagaatccactttgctggcacctgtgaataatgcattttctgatgatactctcagcatggatcagcgcctccttaaattaattctgcagaatcacatattgaaagtaaaagttggccttaatgagctttacaacgggcaaatactggaaatgaattgaagtctgagcgggaattggacaagataaaggggctgaagctagaagagctctggctcgatggaaactccctgtgtgacaccttccgagaccagtccacctacatcagcgccattcgcgaacgatttcccaagttactacgcctggatggccatgagctacccccaccaattgcctttgatgttgaagcccccacgacgttaccgccctgcaagggaagctattttggaacagaaaacttgaagagtctggtcttgcacttcctgcaacagtactatgcaatttacgactctggagaccgacaagggctcctggatgcctaccatgatggggcctgctgttccctgagcattcctttcattcctcagaaccctgcccgaagcagcttagccgagtatttcaaggatagcagaaatgtgaagaagcttaaagaccctaccttgcggttccggctgctgaagcacacgcgtctcaacgttgttgccttcctcaatgagttgcccaaaacccagcacgacgtcaattccttcgtggtagacataagcgcccagacaagcacattgctgtgtttttctgtcaatggagtcttcaaggaagtggacggaaagtcccgggattctttgcgagccttcacccggacattcattgctgttcctgctagcaattcagggctatgtattgtaaatgatgagctatttgtgcggaatgccagttctgaagagatccaaagagccttcgctatgcctgcacccacgccttcctccagcccggtgcccaccctctctccagagcagcaggaaatgttgcaagcattctctacccagtctggcatgaacctcgagtggtcccagaagtgccttcaggacaacaactgggactacaccagatctgcccaggccttcactcatctcaaggccaagggcgagatcccagaagtggcattcatgaagtgatcgtagtcatgcctcagaagcagtcccccctgtaaatagtccttggatattaccgtctggttgtcgtctgtcatctcctcctgtctggcccgaggccgccccgtgactgtgaccgagggagggagggctgcctgatccctctcctcgcctgccttctggaagacttcagaagattgagcctcactggtgccaggaagccaaagcttactttgtagaactgacactaaactacccgaaggacttaggtgctttgtgtacttaaccccaggacctccttactttttaatataaagagtgatgttgtatttcgtgttctgcactttttaatataaagagtgatgttgtatt

SEQ ID NO: 366125 - DNA, 1176 bp, Homo sapiens
gagctcggtaccccctaggtagatggccatgagctacccccaccaattgcctttgatgttgaagcccccacgacgttaccgccctgcaagggaagctattttggaacagaaaacttgaagagtctggtcttgcacttcctgcaacagtactatgcaatttacgactctggagaccgacaagggctcctggatgcctaccatgatggggcctgctgttccctgagcattcctttcattcctcagaaccctgcccgaagcagcttagccgagtatttcaaggatagcagaaatgtgaagaagcttaaagaccctaccttgcggttccggctgctgaagcacacgcgtctcaacgttgttgccttcctcaatgagttgcccaaaacccagcacgacgtcaattccttcgtggtagacataagcgcccagacaagcacattgctgtgtttttctgtcaatggagtcttcaaggaagtggacggaaagtcccgggattctttgcgagccttcacccggacattcattgctgttcctgctagcaattcagggctatgtattgtaaatgatgagctatttgtgcggaatgccagttctgaagagatccaaagagccttcgctatgcctgcacccacgccttcctccagcccggtgcccaccctctctccagagcagcaggaaatgttgcaagcattctctacccagtctggcatgaacctcgagtggtcccagaagtgccttcaggacaacaactgggactacaccagatctgcccaggccttcactcatctcaaggccaagggcgagatcccagaagtggcattcatgaagtgatcgtagtcatgcctcagaagcagtcccccctgtaaatagtccttggatattaccgtctggttgtcgtctgtcatctcctcctgtctggcccgaggccgccccgtgactgtgaccgagggagggagggctgcctgatccctctcctcgcctgccttctggaagacttcagaagattgagcctcactggtgccaggaagccaaagcttactttgtagaactgacactaaactacccgaaggacttaggtgctttgtgtacttaaccccaggacctccttactttttaatataaagagtgatgttgtatttcgtgttctgcactttttaatataaagagtgatgttgtatt

SEQ ID NO: 366126 - DNA, 2095 bp, Homo sapiens
cggcaccgcccacagcctgggacgtcagcggcgcgcgacgtgctttgctgtataaatgcggtggcgcccggcgtagggacacttcggtcctgagcgcttgggagttaggttgtttgccggcgtagcggccagcgcctgagcccgcccttgatcttcgctgtggcatggcggacgaggggaagtcgtacagcgaacacgatgatgaacgcgttaatttccctcaaagaaagaagaaaggccggggtcccttccggtggaaatatggtgaaggaaaccgtaggtctggaagaggcggttctggtattcggtcttcccgccttgaggaagatgatggagatgtggcaatgagtgatgcccaggatggtccccgagtacgatacaacccctataccacccgacctaaccgtcggggtgatacttggcatgatcgagatcgcattcatgttactgtgcggagagacagagctcctccagagagaggaggggctggcaccagccaggatgggacctcaaagaactggttcaagattacaattccttatggcagaaagtatgacaaggcatggctcctgagcatgattcagagcaagtgcagtgtgcccttcacccctattgagtttcactatgagaatacacgggcccagttcttcgttgaagacgccagtactgcctctgcattgaaggctgtcaactataagattttggatcgggagaaccgaaggatatctatcatcatcaactcttctgctccaccccacactatactgaatgaactgaagccagaacaagtagaacagctaaagctgatcatgagcaaacgatacgatggctcccaacaagcccttgacctcaaaggcctccgttcagacccagatttggtggcccagaacattgacgttgtcctgaatcgcagaagctgtatggcagctaccctgaggatcattgaagagaacatccctgagctattgtccttgaacttgagcaacaacaggctgtacaggctggatgacatgtctagcattgttcagaaggcacccaacctgaagatcctaaacctttctggaaatgaattgaagtctgagcgggaattggacaagataaaggggctgaagctagaagagctctggctcgatggaaactccctgtgtgacaccttccgagaccagtccacctacatcagcgccattcgcgaacgatttcccaagttactacgcctggatggccatgagctacccccaccaattgcctttgatgttgaagcccccacgacgttaccgccctgcaagggaagctattttggaacagaaaacttgaagagtctggtcttgcacttcctgcaacagtactatgcaatttacgactctggagaccgacaagggctcctggatgcctaccatgatggggcctgctgttccctgagcattcctttcattcctcagaaccctgcccgaagcagcttagccgagtatttcaaggatagcagaaatgtgaagaagcttaaagaccctaccttgcggttccggctgctgaagcacacgcgtctcaacgttgttgccttcctcaatgagttgcccaaaacccagcacgacgtcaattccttcgtggtagacataagcgcccagacaagcacattgctgtgtttttctgtcaatggagtcttcaaggaagtggacggaaagtcccgggattctttgcgagccttcacccggacattcattgctgttcctgctagcaattcagggctatgtattgtaaatgatgagctatttgtgcggaatgccagttctgaagagatccaaagagccttcgctatgcctgcacccacgccttcctccagcccggtgcccaccctctctccagagcagcaggaaatgttgcaagcattctctacccagtctggcatgaacctcgagtggtcccagaagtgagtgcggggcatgtgtaggatggggatgcactgaagtagggctagtagtaaataatgagggctcctgacagttttttttgtttttttttttggagacaagttcttgcgctgtcatccaggctggagtatagtggtgatcataactcactgtagcctctaattcctgtg

SEQ ID NO: 366127 - DNA, 1528 bp, Homo sapiens
aactgatggatacctggtgaggcagcggagcccctgggctcccaccccattccctcctcccggggctgcacaggtgagtaggtggaaggtaaggggggcagggaggggaaagaggtcctgggcttaaagcctgggcttggagtactgctccttgacactcagggtcaggcagagagaaaagagacagccttcaaggcagtccatgtctgggtgccccgggtcaggtggggagtgggggccatttttccctgagcacaggctgggagggagtggagggatgagcaggatgggatgggctgtccctcgggtttggtatatttgctcctagagcagcccaggaggcacggtggctctgaagcatcactcacttctgtcccgttcttgacagcgccattcgcgaacgatttcccaagttactacgcctggatggccatgagctacccccaccaattgcctttgatgttgaagcccccacgacgttaccgccctgcaagggaagctattttggaacagaaaacttgaagagtctggtcttgcacttcctgcaacagtactatgcaatttacgactctggagaccgacaagggctcctggatgcctaccatgatggggcctgctgttccctgagcattcctttcattcctcagaaccctgcccgaagcagcttagccgagtatttcaaggatagcagaaatgtgaagaagcttaaagaccctaccttgcggttccggctgctgaagcacacgcgtctcaacgttgttgccttcctcaatgagttgccagcacattgctgtgtttttctgtcaatggagtcttcaaggaagtggacggaaagtcccgggattctttgcgagccttcacccggacattcattgctgttcctgctagcaattcagggctatgtattgtaaatgatgagctatttgtgcggaatgccagttctgaagagatccaaagagccttcgctatgcctgcacccacgccttcctccagcccggtgcccaccctctctccagagcagcaggaaatgttgcaagcattctctacccagtctggcatgaacctcgagtggtcccagaagtgccttcaggacaacaactgggactacaccagatctgcccaggccttcactcatctcaaggccaagggcgagatcccagaagtggcattcatgaagtgatcgtagtcatgcctcagaagcagtcccccctgtaaatagtccttggatattaccgtctggttgtcgtctgtcatctcctcctgtctggcccgaggccgccccgtgactgtgaccgagggagggagggctgcctgatccctctcctcgcctgccttctggaagacttcagaagattgagcctcactggtgccaggaagccaaagcttactttgtagaactgacactaaactacccgaaggacttaggtgctttgtgtacttaaccccaggacctccttactttttaatataaagagtgatgttgtatttcgtgttctgcactttttaatataaagagtgatgttgtatt

SEQ ID NO: 366128 - DNA, 1094 bp, Homo sapiens
ttcaagtggttctcctgcttcagcctcccgagtagctgggactacaggtgcgcactaccacgcccagctaatttttgtatttttagtagagaaggggtttcgccatgttggacaggatggtctcgatctcttgacctcgtgatctgcccacctcagcctcccaaagtgctgggattatacgcatgagacactgtgcccggccgtagttattactattgtcctttctgacctgacccttcaccccacctgtgcttcccttatacccttatatacttaatcattcctctctgacttgctaggattctttatatcaaagaccatgattcaagaagctgtttgtaaacataaagcactagtgaccctaaggtgttgttgctgttcttattgcagtggacggaaagtcccgggattctttgcgagccttcacccggacattcattgctgttcctgctagcaattcagggctatgtattgtaaatgatgagctatttgtgcggaatgccagttctgaagagatccaaagagccttcgctatgcctgcacccacgccttcctccagcccggtgcccaccctctctccagagcagcaggaaatgttgcaagcattctctacccagtctggcatgaacctcgagtggtcccagaagtgccttcaggacaacaactgggactacaccagatctgcccaggccttcactcatctcaaggccaagggcgagatcccagaagtggcattcatgaagtgatcgtagtcatgcctcagaagcagtcccccctgtaaatagtccttggatattaccgtctggttgtcgtctgtcatctcctcctgtctggcccgaggccgccccgtgactgtgaccgagggagggagggctgcctgatccctctcctcgcctgccttctggaagacttcagaagattgagcctcactggtgccaggaagccaaagcttactttgtagaactgacactaaactacccgaaggacttaggtgctttgtgtacttaaccccaggacctccttactttttaatataaagagtgatgttgtatttcgtgttctgcactttttaatataaagagtgatgttgtatt

SEQ ID NO: 366129 - DNA, 1486 bp, Homo sapiens
agcaggctggtcccggccggagttgtaggatgagcgcttgggagttaggttgtttgccggcgtagcggccagcgcctgagcccgcccttgatcttcgctgtggcatggcggacgaggggaagtcgtacagcggtaagtgctggtcttcgggtcgggaactggctatctggggcgcgggtgggcggcgccggcctaggcctcagcccccggggcgtgaggccgctaggggcccggcgtccgcggggagcggcgcgcggggggccgggcactcgaggtggacacccgagttgttgactcctggattcctgctggcatcctggtgttgggggacctgcggctcggagcggatggctcgggggtagggtgacgggattcctttgaactttgtgggtggttgatgcctgtcagttaggtttggcggcctgactcttcctttaatgtgagtgagtgccctgctcgtgggctgccctgatgccctattttttactgcgtccagtcggtcttgaactctcgggcctgggctttggcttaatattcgagacttacacatcaactggatattctagtctgaacactacactgggtgttagttctttgtagtaagttaggagtgcgtggtggaggttgaaaccgtgaatttaaaactctcgttttccacccccttaatgtggaataacaacagcatttcttaagagtgtgtgtggggaggggaaatgagatcattcctatcaagtgcctgaagcatagtggccggcactggagaaagttctcagtgaatgttagctgcgccttctatgttcttttttcctagggtcatttgttgacattcattgctgttcctgctagcaattcagggctatgtattgtaaatgatgagctatttgtgcggaatgccagttctgaagagatccaaagagccttcgctatgcctgcacccacgccttcctccagcccggtgcccaccctctctccagagcagcaggaaatgttgcaagcattctctacccagtctggcatgaacctcgagtggtcccagaagtgccttcaggacaacaactgggactacaccagatctgcccaggccttcactcatctcaaggccaagggcgagatcccagaagtggcattcatgaagtgatcgtagtcatgcctcagaagcagtcccccctgtaaatagtccttggatattaccgtctggttgtcgtctgtcatctcctcctgtctggcccgaggccgccccgtgactgtgaccgagggagggagggctgcctgatccctctcctcgcctgccttctggaagacttcagaagattgagcctcactggtgccaggaagccaaagcttactttgtagaactgacactaaactacccgaaggacttaggtgctttgtgtacttaaccccaggacctccttactttttaatataaagagtgatgttgtatttcgtgttctgcactttttaatataaagagtgatgttgtatt

SEQ ID NO: 366130 - DNA, 1588 bp, Homo sapiens
ttcaagtggttctcctgcttcagcctcccgagtagctgggactacaggtgcgcactaccacgcccagctaatttttgtatttttagtagagaaggggtttcgccatgttggacaggatggtctcgatctcttgacctcgtgatctgcccacctcagcctcccaaagtgctgggattatacgcatgagacactgtgcccggccgtagttattactattgtcctttctgacctgacccttcaccccacctgtgcttcccttatacccttatatacttaatcattcctctctgacttgctaggattctttatatcaaagaccatgattcaagaagctgtttgtaaacataaagcactagtgaccctaaggtgttgttgctgttcttattgcagtggacggaaagtcccgggattctttgcgagccttcacccggacattcattgctgttcctgctagcaattcagggtaagtattctgcttttcgcattggataccagtcctaatccatggccaacagtgtggtaattggagggtagagtcagtctttggggtgatttcagaaaggcaacaggaaatcagagaaagctcacatagtagttaagagccagttaatagcttggctctggaattgtaccgtctgggttttcatcctggctccaccacttctagcaagtaggctgctgcctcatctgaaaattcatataacaatattcatttcctaagtttgttgtgaggatgaattaaaagagctaaagtccatgcgttgggagaaccctagtgtgtttagtagataatccttccaaacattgattccatgggaggggataaatgataaaaggtaacaatagctaagagtgggagggggaccttgtggatattgaaagaatcagagaataggaatgatgttgggaggatgatgttatctctgtctagctttttaagtgctctttgtcctcaaggctatgtattgtaaatgatgagctatttgtgcggaatgccagttctgaagagatccaaagagccttcgctatgcctgcacccacgccttcctccagcccggtgcccaccctctctccagagcagcaggaaatgttgcaagcattctctacccagtctggcatgaacctcgagtggtcccagaagtgccttcaggacaacaactgggactacaccagatctgcccaggccttcactcatctcaaggccaagggcgagatcccagaagtggcattcatgaagtgatcgtagtcatgcctcagaagcagtcccccctgtaaatagtccttggatattaccgtctggttgtcgtctgtcatctcctcctgtctggcccgaggccgccccgtgactgtgaccgagggagggagggctgcctgatccctctcctcgcctgccttctggaagacttcagaagattgagcctcactggtgccaggaagccaaagcttactttgtagaactgacactaaactacccgaaggacttaggtgctttgtgtacttaaccccaggacctccttactttttaatataaagagtgatgttgtatttcgtgttctgcactttttaatataaagagtgatgttgtatt

SEQ ID NO: 366131 - DNA, 588 bp, Homo sapiens
cctagacctagtctccttgccaagcttccttctgcacccacgccttcctccagcccggtgcccaccctctctccagagcagcaggaaatgttgcaagcattctctacccagtctggcatgaacctcgagtggtcccagaagtgccttcaggacaacaactgggactacaccagatctgcccaggccttcactcatctcaaggccaagggcgagatcccagaagtggcattcatgaagtgatcgtagtcatgcctcagaagcagtcccccctgtaaatagtccttggatattaccgtctggttgtcgtctgtcatctcctcctgtctggcccgaggccgccccgtgactgtgaccgagggagggagggctgcctgatccctctcctcgcctgccttctggaagacttcagaagattgagcctcactggtgccaggaagccaaagcttactttgtagaactgacactaaactacccgaaggacttaggtgctttgtgtacttaaccccaggacctccttactttttaatataaagagtgatgttgtatttcgtgttctgcactttttaatataaagagtgatgttgtatt

SEQ ID NO: 366132 - DNA, 692 bp, Homo sapiens
cggcaccgcccacagcctgggacgtcagcggcgcgcgacgtgctttgctgtataaatgcggtggcgcccggcgtagggacacttcggtcctgagcgcttgggagttaggttgtttgccggcgtagcggccagcgcctgagcccgcccttgatcttcgctgtggcatggcggacgaggggaagtcgtacagcgaacacgatgatgaacgcgttaatttccctcaaagaaagaagaaaggccggggtcccttccggtggaaatatggtgaaggaaaccgtaggtctggaagaggcggttctggtattcggtcttcccgccttgaggaagatgatggagatgtggcaatgagtgatgcccaggatggtccccgagtacgatacaacccctataccacccgacctaaccgtcggggtgatacttggcatgatcgagatcgcattcatgttactgtgcggagagacagagctcctccagagagaggaggggctggcaccagccaggatgggacctcaaagaactggttcaagattacaattccttatggcagaaagtatgacaaggcatggctcctgagcatgattcagagcaagtgcagtgtgcccttcacccctattgagtttcactatgagatcacgagctggctcaatcactagtgaattcgcgccgcctgcaggtcgacaatatggaagcat

SEQ ID NO: 366133 - DNA, 454 bp, Homo sapiens
agcaggctggtcccggccggagttgtaggatgagcgcttgggagttaggttgtttgccggcgtagcggccagcgcctgagcccgcccttgatcttcgctgtggcatggcggacgaggggaagtcgtacagcgaacacgatgatgaacgcgttaatttccctcaaagaaagaagaaaggccggggtcccttccggtggaaatatggtgaaggaaaccgtaggtctggaggagggctgcctgatccctctcctcgcctgccttctggaagacttcagaagattgagcctcactggtgccaggaagccaaagcttactttgtagaactgacactaaactacccgaaggacttaggtgctttgtgtacttaaccccaggacctccttactttttaatataaagagtgatgttgtatttcgtgttctgcactttttaatataaagagtgatgttgtatt

SEQ ID NO: 366134 - DNA, 349 bp, Homo sapiens
tctggtttgaatttagtggctcatgagattatatggcccttttactgtccatgtcatttcctttcccacctgttagagtgagaaatgccaggactagcttagtgattaaacagtcttagttgtagtcccactaacagtgcaggaaggcctttgagaagactttcctagcatttgtggtcattttattctctgcttacccacagcaacccctataccacccgacctaaccgtcggggtgatacttggcatgatcgagatcgcattcatgttactgtgcggagagacagagctcctccagagagaggaggggctggcaccagccaggatgggacctcaaagaactggttca

SEQ ID NO: 366135 - DNA, 2313 bp, Homo sapiens
gcggctggtacggtcccgaagtccgtttgattgagcgcttgggagttaggttgtttgccggcgtagcggccagcgcctgagcccgcccttgatcttcgctgtggcatggcggacgaggggaagtcgtacagcgaacacgatgatgaacgcgttaatttccctcaaagaaagaagaaaggccggggtcccttccggtggaaatatggtgaaggaaaccgtaggtctggaagaggcggttctggtattcggtcttcccgccttgaggaagatgatggagatgtggcaatgagtgatgcccaggatggtccccgagtacgatacaacccctataccacccgacctaaccgtcggggtgatacttggcatgatcgagatcgcattcatgttactgtgcggagagacagagctcctccagagagaggaggggctggcaccagccaggatgggacctcaaagaactggttcaagattacaattccttatggcagaaagtatgacaaggcatggctcctgagcatgattcagagcaagtgcagtgtgcccttcacccctattgagtttcactatgagaatacacgggcccagttcttcgttgaagacgccagtactgcctctgcattgaaggctgtcaactataagattttggatcgggagaaccgaaggatatctatcatcatcaactcttctgctccaccccacactatactgaatgaactgaagccagaacaagtagaacagctaaagctgatcatgagcaaacgatacgatggctcccaacaagcccttgacctcaaaggcctccgttcagacccagatttggtggcccagaacattgacgttgtcctgaatcgcagaagctgtatggcagctaccctgaggatcattgaagagaacatccctgagctattgtccttgaacttgagcaacaacaggctgtacaggctggatgacatgtctagcattgttcagaaggcacccaacctgaagatcctaaacctttctggaaatgaattgaagtctgagcgggaattggacaagataaaggggctgaagctagaagagctctggctcgatggaaactccctgtgtgacaccttccgagaccagtccacctacatcagcgccattcgcgaacgatttcccaagttactacgcctggatggccatgagctacccccaccaattgcctttgatgttgaagcccccacgacgttaccgccctgcaagggaagctattttggaacagaaaacttgaagagtctggtcttgcacttcctgcaacagtactatgcaatttacgactctggagaccgacaagggctcctggatgcctaccatgatggggcctgctgttccctgagcattcctttcattcctcagaaccctgcccgaagcagcttagccgagtatttcaaggatagcagaaatgtgaagaagcttaaagaccctaccttgcggttccggctgctgaagcacacgcgtctcaacgttgttgccttcctcaatgagttgcccaaaacccagcacgacgtcaattccttcgtggtagacataagcgcccagacaagcacattgctgtgtttttctgtcaatggagtcttcaaggaagtggacggaaagtcccgggattctttgcgagccttcacccggacattcattgctgttcctgctagcaattcagggctatgtattgtaaatgatgagctatttgtgcggaatgccagttctgaagagatccaaagagccttcgctatgcctgcacccacgccttcctccagcccggtgcccaccctctctccagagcagcaggaaatgttgcaagcattctctacccagtctggcatgaacctcgagtggtcccagaagtgccttcaggacaacaactgggactacaccagatctgcccaggccttcactcatctcaaggccaagggcgagatcccagaagtggcattcatgaagtgatcgtagtcatgcctcagaagcagtcccccctgtaaatagtccttggatattaccgtctggttgtcgtctgtcatctcctcctgtctggcccgaggccgccccgtgactgtgaccgagggagggagggctgcctgatccctctcctcgcctgccttctggaagacttcagaagattgagcctcactggtgccaggaagccaaagcttactttgtagaactgacactaaactacccgaaggacttaggtgctttgtgtacttaaccccaggacctccttactttttaatataaagagtgatgttgtatttcgtgttctgcactttttaatataaagagtgatgttgtatt

SEQ ID NO: 366136 - DNA, 2645 bp, Homo sapiens
cggcaccgcccacagcctgggacgtcagcggcgcgcgacgtgctttgctgtataaatgcggtggcgcccggcgtagggacacttcggtcctgagcgcttgggagttaggttgtttgccggcgtagcggccagcgcctgagcccgcccttgatcttcgctgtggcatggcggacgaggggaagtcgtacagcgaacacgatgatgaacgcgttaatttccctcaaagaaagaagaaaggccggggtcccttccggtggaaatatggtgaaggaaaccgtaggtctggaagaggcggttctggtattcggtcttcccgccttgaggaagatgatggagatgtggcaatgagtgatgcccaggatggtccccgagtacgatacaacccctataccacccgacctaaccgtcggggtgatacttggcatgatcgagatcgcattcatgttactgtgcggagagacagagctcctccagagagaggaggggctggcaccagccaggatgggacctcaaagaactggttcaagattacaattccttatggcagaaagtatgacaaggcatggctcctgagcatgattcagagcaagtgcagtgtgcccttcacccctattgagtttcactatgagaatacacgggcccagttcttcgttgaagacgccagtactgcctctgcattgaaggctgtcaactataagattttggatcgggagaaccgaaggatatctatcatcatcaactcttctgctccaccccacactatactgaatgaactgaagccagaacaagtagaacagctaaagctgatcatgagcaaacgatacgatggctcccaacaagcccttgacctcaaaggcctccgttcagacccagatttggtggcccagaacattgacgttgtcctgaatcgcagaagctgtatggcagctaccctgaggatcattgaagagaacatccctgagctattgtccttgaacttgagcaacaacaggctgtacaggctggatgacatgtctagcattgttcagaaggcacccaacctgaagatcctaaacctttctggaaatgaattgaagtctgagcgggaattggacaagataaaggggctgaagctagaagagctctggctcgatggaaactccctgtgtgacaccttccgagaccagtccacctacatcagcgccattcgcgaacgatttcccaagttactacgcctggatggccatgagctacccccaccaattgcctttgatgttgaagcccccacgacgttaccgccctgcaagggaagctattttggaacagaaaacttgaagagtctggtcttgcacttcctgcaacagtactatgcaatttacgactctggagaccgacaagggctcctggatgcctaccatgatggggcctgctgttccctgagcattcctttcattcctcagaaccctgcccgaagcagcttagccgagtatttcaaggatagcagaaatgtgaagaagcttaaagaccctaccttgcggttccggctgctgaagcacacgcgtctcaacgttgttgccttcctcaatgagttgcccaaaacccagcacgacgtcaattccttcgtggtagacataagcgcccagacaagcacattgctgtgtttttctgtcaatggagtcttcaaggaagtggacggaaagtcccgggattctttgcgagccttcacccggacattcattgctgttcctgctagcaattcagggctatgtattgtaaatgatgagctatttgtgcggaatgccagttctgaagagatccaaagagccttcgctatgcctgcacccacgccttcctccagcccggtgcccaccctctctccagagcagcaggaaatgttgcaagcattctctacccagtctggcatgaacctcgagtggtcccagaagtgccttcaggacaacaactgggactacaccagatctgcccaggccttcactcatctcaaggccaagggcgagatcccagaagtggcattcatgaagtgatcgtagtcatgcctcagaagcagtcccccctgtaaatagtccttggatattaccgtctggttgtcgtctgtcatctcctcctgtctggcccgaggccgccccgtgactgtgaccgagggagggagggctgcctgatccctctcctcgcctgccttctggaagacttcagaagattgagcctcactggtgccaggaagccaaagcttactttgtagaactgacactaaactacccgaaggacttaggtgctttgtgtacttaaccccaggacctccttactttttaatataaagagtgatgttgtatttcgtgttctgcactttttaatataaagagtgatgttgtattaaaaaaaaaaacaacaaaaaaaaaaaaaaaaaaaaaaaaacatataataaataaatattataaaaacataataaacttaattacaatatatataaaaaaaaaaaaaaaactcgagggggggcccgtaccccaatcgccctatagggagccgattacaattactggcgtcgtttaacagcgttgggactgggggcgaataccaagaagcccgacccgacgcctttccaacagtggcaacctgaatggcattgcaaattgtagcgtaatttttta

SEQ ID NO: 366137 - DNA, 2285 bp, Homo sapiens
ggcgctagtagagtgtcgtagtaatgccggattagcgaggtaagcctgcatcacaggtccttgatcttcgctgtggcatggcggacgaggggaagtcgtacagcgaacacgatgatgaacgcgttaatttccctcaaagaaagaagaaaggccggggtcccttccggtggaaatatggtgaaggaaaccgtaggtctggaagaggcggttctggtattcggtcttcccgccttgaggaagatgatggagatgtggcaatgagtgatgcccaggatggtccccgagtacgatacaacccctataccacccgacctaaccgtcggggtgatacttggcatgatcgagatcgcattcatgttactgtgcggagagacagagctcctccagagagaggaggggctggcaccagccaggatgggacctcaaagaactggttcaagattacaattccttatggcagaaagtatgacaaggcatggctcctgagcatgattcagagcaagtgcagtgtgcccttcacccctattgagtttcactatgagaatacacgggcccagttcttcgttgaagacgccagtactgcctctgcattgaaggctgtcaactataagattttggatcgggagaaccgaaggatatctatcatcatcaactcttctgctccaccccacactatactgaatgaactgaagccagaacaagtagaacagctaaagctgatcatgagcaaacgatacgatggctcccaacaagcccttgacctcaaaggcctccgttcagacccagatttggtggcccagaacattgacgttgtcctgaatcgcagaagctgtatggcagctaccctgaggatcattgaagagaacatccctgagctattgtccttgaacttgagcaacaacaggctgtacaggctggatgacatgtctagcattgttcagaaggcacccaacctgaagatcctaaacctttctggaaatgaattgaagtctgagcgggaattggacaagataaaggggctgaagctagaagagctctggctcgatggaaactccctgtgtgacaccttccgagaccagtccacctacatcagcgccattcgcgaacgatttcccaagttactacgcctggatggccatgagctacccccaccaattgcctttgatgttgaagcccccacgacgttaccgccctgcaagggaagctattttggaacagaaaacttgaagagtctggtcttgcacttcctgcaacagtactatgcaatttacgactctggagaccgacaagggctcctggatgcctaccatgatggggcctgctgttccctgagcattcctttcattcctcagaaccctgcccgaagcagcttagccgagtatttcaaggatagcagaaatgtgaagaagcttaaagaccctaccttgcggttccggctgctgaagcacacgcgtctcaacgttgttgccttcctcaatgagttgcccaaaacccagcacgacgtcaattccttcgtggtagacataagcgcccagacaagcacattgctgtgtttttctgtcaatggagtcttcaaggaagtggacggaaagtcccgggattctttgcgagccttcacccggacattcattgctgttcctgctagcaattcagggctatgtattgtaaatgatgagctatttgtgcggaatgccagttctgaagagatccaaagagccttcgctatgcctgcacccacgccttcctccagcccggtgcccaccctctctccagagcagcaggaaatgttgcaagcattctctacccagtctggcatgaacctcgagtggtcccagaagtgccttcaggacaacaactgggactacaccagatctgcccaggccttcactcatctcaaggccaagggcgagatcccagaagtggcattcatgaagtgatcgtagtcatgcctcagaagcagtcccccctgtaaatagtccttggatattaccgtctggttgtcgtctgtcatctcctcctgtctggcccgaggccgccccgtgactgtgaccgagggagggagggctgcctgatccctctcctcgcctgccttctggaagacttcagaagattgagcctcactggtgccaggaagccaaagcttactttgtagaactgacactaaactacccgaaggacttaggtgctttgtgtacttaaccccaggacctccttactttttaatataaagagtgatgttgtatttcgtgttctgcactttttaatataaagagtgatgttgtatt

SEQ ID NO: 366138 - DNA, 2320 bp, Homo sapiens
cggcaccgcccacagcctgggacgtcagcggcgcgcgacgtgctttgctgtataaatgcggtggcgcccggcgtagggacacttcggtcctgagcgcttgggagttaggttgtttgccggcgtagcggccagcgcctgagcccgcccttgatcttcgctgtggcatggcggacgaggggaagtcgtacagcgaacacgatgatgaacgcgttaatttccctcaaagaaagaagaaaggccggggtcccttccggtggaaatatggtgaaggaaaccgtaggtctggaagaggcggttctggtattcggtcttcccgccttgaggaagatgatggagatgtggcaatgagtgatgcccaggatggtccccgagtacgatacaacccctataccacccgacctaaccgtcggggtgatacttggcatgatcgagatcgcattcatgttactgtgcggagagacagagctcctccagagagaggaggggctggcaccagccaggatgggacctcaaagaactggttcaagattacaattccttatggcagaaagtatgacaaggcatggctcctgagcatgattcagagcaagtgcagtgtgcccttcacccctattgagtttcactatgagaatacacgggcccagttcttcgttgaagacgccagtactgcctctgcattgaaggctgtcaactataagattttggatcgggagaaccgaaggatatctatcatcatcaactcttctgctccaccccacactatactgaatgaactgaagccagaacaagtagaacagctaaagctgatcatgagcaaacgatacgatggctcccaacaagcccttgacctcaaaggcctccgttcagacccagatttggtggcccagaacattgacgttgtcctgaatcgcagaagctgtatggcagctaccctgaggatcattgaagagaacatccctgagctattgtccttgaacttgagcaacaacaggctgtacaggctggatgacatgtctagcattgttcagaaggcacccaacctgaagatcctaaacctttctggaaatgaattgaagtctgagcgggaattggacaagataaaggggctgaagctagaagagctctggctcgatggaaactccctgtgtgacaccttccgagaccagtccacctacatcagcgccattcgcgaacgatttcccaagttactacgcctggatggccatgagctacccccaccaattgcctttgatgttgaagcccccacgacgttaccgccctgcaagggaagctattttggaacagaaaacttgaagagtctggtcttgcacttcctgcaacagtactatgcaatttacgactctggagaccgacaagggctcctggatgcctaccatgatggggcctgctgttccctgagcattcctttcattcctcagaaccctgcccgaagcagcttagccgagtatttcaaggatagcagaaatgtgaagaagcttaaagaccctaccttgcggttccggctgctgaagcacacgcgtctcaacgttgttgccttcctcaatgagttgccagcacattgctgtgtttttctgtcaatggagtcttcaaggaagtggacggaaagtcccgggattctttgcgagccttcacccggacattcattgctgttcctgctagcaattcagggctatgtattgtaaatgatgagctatttgtgcggaatgccagttctgaagagatccaaagagccttcgctatgcctgcacccacgccttcctccagcccggtgcccaccctctctccagagcagcaggaaatgttgcaagcattctctacccagtctggcatgaacctcgagtggtcccagaagtgccttcaggacaacaactgggactacaccagatctgcccaggccttcactcatctcaaggccaagggcgagatcccagaagtggcattcatgaagtgatcgtagtcatgcctcagaagcagtcccccctgtaaatagtccttggatattaccgtctggttgtcgtctgtcatctcctcctgtctggcccgaggccgccccgtgactgtgaccgagggagggagggctgcctgatccctctcctcgcctgccttctggaagacttcagaagattgagcctcactggtgccaggaagccaaagcttactttgtagaactgacactaaactacccgaaggacttaggtgctttgtgtacttaaccccaggacctccttactttttaatataaagagtgatgttgtatttcgtgttctgcactttttaatataaagagtgatgttgtatt

SEQ ID NO: 366139 - DNA, 2287 bp, Homo sapiens
cggcaccgcccacagcctgggacgtcagcggcgcgcgacgtgctttgctgtataaatgcggtggcgcccggcgtagggacacttcggtcctgagcgcttgggagttaggttgtttgccggcgtagcggccagcgcctgagcccgcccttgatcttcgctgtggcatggcggacgaggggaagtcgtacagcgaacacgatgatgaacgcgttaatttccctcaaagaaagaagaaaggccggggtcccttccggtggaaatatggtgaaggaaaccgtaggtctggaagaggcggttctggtattcggtcttcccgccttgaggaagatgatggagatgtggcaatgagtgatgcccaggatggtccccgagtacgatacaacccctataccacccgacctaaccgtcggggtgatacttggcatgatcgagatcgcattcatgttactgtgcggagagacagagctcctccagagagaggaggggctggcaccagccaggatgggacctcaaagaactggttcaagattacaattccttatggcagaaagtatgacaaggcatggctcctgagcatgattcagagcaagtgcagtgtgcccttcacccctattgagtttcactatgagaatacacgggcccagttcttcgttgaagacgccagtactgcctctgcattgaaggctgtcaactataagattttggatcgggagaaccgaaggatatctatcatcatcaactcttctgctccaccccacactatactgaatgaactgaagccagaacaagtagaacagctaaagctgatcatgagcaaacgatacgatggctcccaacaagcccttgacctcaaaggcctccgttcagacccagatttggtggcccagaacattgacgttgtcctgaatcgcagaagctgtatggcagctaccctgaggatcattgaagagaacatccctgagctattgtccttgaacttgagcaacaacaggctgtacaggctggatgacatgtctagcattgttcagaaggcacccaacctgaagatcctaaacctttctggaaatgaattgaagtctgagcgggaattggacaagataaaggggctgaagctagaagagctctggctcgatggaaactccctgtgtgacaccttccgagaccagtccacctacatcagcgccattcgcgaacgatttcccaagttactacgcctggatggccatgagctacccccaccaattgcctttgatgttgaagcccccacgacgttaccgccctgcaagggaagctattttggaacagaaaacttgaagagtctggtcttgcacttcctgcaacagtactatgcaatttacgactctggagaccgacaagggctcctggatgcctaccatgatggggcctgctgttccctgagcattcctttcattcctcagaaccctgcccgaagcagcttagccgagtatttcaaggatagcagaaatgtgaagaagcttaaagaccctaccttgcggttccggctgctgaagcacacgcgtctcaacgttgttgccttcctcaatgagttgcccaaaacccagcacgacgtcaattccttcgtggtagacataagcgcccagacaagcacattgctgtgtttttctgtcaatggagtcttcaaggaagtggacggaaagtcccgggattctttgcgagccttcacccggacattcattgctgttcctgctagcaattcaggttctgaagagatccaaagagccttcgctatgcctgcacccacgccttcctccagcccggtgcccaccctctctccagagcagcaggaaatgttgcaagcattctctacccagtctggcatgaacctcgagtggtcccagaagtgccttcaggacaacaactgggactacaccagatctgcccaggccttcactcatctcaaggccaagggcgagatcccagaagtggcattcatgaagtgatcgtagtcatgcctcagaagcagtcccccctgtaaatagtccttggatattaccgtctggttgtcgtctgtcatctcctcctgtctggcccgaggccgccccgtgactgtgaccgagggagggagggctgcctgatccctctcctcgcctgccttctggaagacttcagaagattgagcctcactggtgccaggaagccaaagcttactttgtagaactgacactaaactacccgaaggacttaggtgctttgtgtacttaaccccaggacctccttactttttaatataaagagtgatgttgta

SEQ ID NO: 366140 - DNA, 1543 bp, Homo sapiens
aactgatggatacctggtgaggcagcggagcccctgggctcccaccccattccctcctcccggggctgcacaggtgagtaggtggaaggtaaggggggcagggaggggaaagaggtcctgggcttaaagcctgggcttggagtactgctccttgacactcagggtcaggcagagagaaaagagacagccttcaaggcagtccatgtctgggtgccccgggtcaggtggggagtgggggccatttttccctgagcacaggctgggagggagtggagggatgagcaggatgggatgggctgtccctcgggtttggtatatttgctcctagagcagcccaggaggcacggtggctctgaagcatcactcacttctgtcccgttcttgacagcgccattcgcgaacgatttcccaagttactacgcctggatggccatgagctacccccaccaattgcctttgatgttgaagcccccacgacgttaccgccctgcaaggggaagctattttggaacagtactatgcaatttacgactctggagaccgacaagggctcctggatgcctaccatgatggggcctgctgttccctgagcattcctttcattcctcagaaccctgcccgaagcagcttagccgagtatttcaaggatagcagaaatgtgaagaagcttaaagaccctaccttgcggttccggctgctgaagcacacgcgtctcaacgttgttgccttcctcaatgagttgcccaaaacccagcacgacgtcaattccttcgtggtagacataagcgcccagacaagcacattgctgtgtttttctgtcaatggagtcttcaaggaagtggacggaaagtcccgggattctttgcgagccttcacccggacattcattgctgttcctgctagcaattcagggctatgtattgtaaatgatgagctatttgtgcggaatgccagttctgaagagatccaaagagccttcgctatgcctgcacccacgccttcctccagcccggtgcccaccctctctccagagcagcaggaaatgttgcaagcattctctacccagtctggcatgaacctcgagtggtcccagaagtgccttcaggacaacaactgggactacaccagatctgcccaggccttcactcatctcaaggccaagggcgagatcccagaagtggcattcatgaagtgatcgtagtcatgcctcagaagcagtcccccctgtaaatagtccttggatattaccgtctggttgtcgtctgtcatctcctcctgtctggcccgaggccgccccgtgactgtgaccgagggagggagggctgcctgatccctctcctcgcctgccttctggaagacttcagaagattgagcctcactggtgccaggaagccaaagcttactttgtagaactgacactaaactacccgaaggacttaggtgctttgtgtacttaaccccaggacctccttactttttaatataaagagtgatgttgtatttcgtgttctgcactttttaatataaagagtgatgttgtatt

SEQ ID NO: 366141 - DNA, 1147 bp, Homo sapiens
tctcactgtgtcacccaggctggagtgcaatggtgtgatcttggctcactgcaacctctgcctcccagggttcaagtgattctcctgcctcagcctccccagtagctgggactacaggtactatgcaatttacgactctggagaccgacaagggctcctggatgcctaccatgatggggcctgctgttccctgagcattcctttcattcctcagaaccctgcccgaagcagcttagccgagtatttcaaggatagcagaaatgtgaagaagcttaaagaccctaccttgcggttccggctgctgaagcacacgcgtctcaacgttgttgccttcctcaatgagttgcccaaaacccagcacgacgtcaattccttcgtggtagacataagcgcccagacaagcacattgctgtgtttttctgtcaatggagtcttcaaggaagtggacggaaagtcccgggattctttgcgagccttcacccggacattcattgctgttcctgctagcaattcagggctatgtattgtaaatgatgagctatttgtgcggaatgccagttctgaagagatccaaagagccttcgctatgcctgcacccacgccttcctccagcccggtgcccaccctctctccagagcagcaggaaatgttgcaagcattctctacccagtctggcatgaacctcgagtggtcccagaagtgccttcaggacaacaactgggactacaccagatctgcccaggccttcactcatctcaaggccaagggcgagatcccagaagtggcattcatgaagtgatcgtagtcatgcctcagaagcagtcccccctgtaaatagtccttggatattaccgtctggttgtcgtctgtcatctcctcctgtctggcccgaggccgccccgtgactgtgaccgagggagggagggctgcctgatccctctcctcgcctgccttctggaagacttcagaagattgagcctcactggtgccaggaagccaaagcttactttgtagaactgacactaaactacccgaaggacttaggtgctttgtgtacttaaccccaggacctccttactttttaatataaagagtgatgttgtatttcgtgttctgcactttttaatataaagagtgatgttgtatt

SEQ ID NO: 366142 - DNA, 1583 bp, Homo sapiens
cggcaccgcccacagcctgggacgtcagcggcgcgcgacgtgctttgctgtataaatgcggtggcgcccggcgtagggacacttcggtcctgagcgcttgggagttaggttgtttgccggcgtagcggccagcgcctgagcccgcccttgatcttcgctgtggcatggcggacgaggggaagtcgtacagcgaacacgatgatgaacgcgttaatttccctcaaagaaagaagaaaggccggggtcccttccggtggaaatatggtgaaggaaaccgtaggtctggaagaggcggttctggtattcggtcttcccgccttgaggaagatgatggagatgtggcaatgagtgatgcccaggatggtccccgagtacgatacaacccctataccacccgacctaaccgtcggggtgatacttggcatgatcgagatcgcattcatgttactgtgcggagagacagagctcctccagagagaggaggggctggcaccagccaggatgggacctcaaagaactggttcaagattacaattccttatggcagaaagtatgacaaggcatggctcctgagcatgattcagagcaagtgcagtgtgcccttcacccctattgagtttcactatgagaatacacgggcccagttcttcgttgaagacgccagtactgcctctgcattgaaggctgtcaactataagattttggatcgggagaaccgaaggatatctatcatcatcaactcttctgctccaccccacactatactgaatgaactgaagccagaacaagtagaacagctaaagctgatcatgagcaaacgatacgatggctcccaacaagcccttgacctcaaaggcctccgttcagacccagatttggtggcccagaacattgacgttgtcctgaatcgcagaagctgtatggcagctaccctgaggatcattgaagagaacatccctgagctattgtccttgaacttgagcaacaacaggctgtacaggctggatgacatgtctagcattgttcagaaggcacccaacctgaagatcctaaacctttctggaaatgaattgaagtctgagcgggaattggacaagataaaggggctgaagctagaagagctctggctcgatggaaactccctgtgtgacaccttccgagaccagtccacctacatcaggtcagttgtagcctgtgtctcccctcctggggaccttcaccccctgggaggctgagctaatgcatcctgaccagggcccgtctgcggagatgtgcagccctgagctggaaccacctgtcctttgagaggatcgcgtgctccccactttggtctgtctgtgtcttccagctttgtcctgagatgttctctcttctcttctgacttgactatctgtttgctgggtctgtggcctttctctttcttcctgaacacaaccttttctagaatctccctaccctgttgttccaggaaaggcatctcccctttctactctaaccagagggtatcttgtacataccctatagatggggttgccttgtgccaagagcctggtgtccatgggttgaggaagccctccctacct

SEQ ID NO: 366143 - DNA, 1443 bp, Homo sapiens
agcaggctggtcccggccggagttgtaggatgagcgcttgggagttaggttgtttgccggcgtagcggccagcgcctgagcccgcccttgatcttcgctgtggcatggcggacgaggggaagtcgtacagcggtaagtgctggtcttcgggtcgggaactggctatctggggcgcgggtgggcggcgccggcctaggcctcagcccccggggcgtgaggccgctaggggcccggcgtccgcggggagcggcgcgcggggggccgggcactcgaggtggacacccgagttgttgactcctggattcctgctggcatcctggtgttgggggacctgcggctcggagcggatggctcgggggtagggtgacgggattcctttgaactttgtgggtggttgatgcctgtcagttaggtttggcggcctgactcttcctttaatgtgagtgagtgccctgctcgtgggctgccctgatgccctattttttactgcgtccagtcggtcttgaactctcgggcctgggctttggcttaatattcgagacttacacatcaactggatattctagtctgaacactacactgggtgttagttctttgtagtaagttaggagtgcgtggtggaggttgaaaccgtgaatttaaaactctcgttttccacccccttaatgtggaataacaacagcatttcttaagagtgtgtgtggggaggggaaatgagatcattcctatcaagtgcctgaagcatagtggccggcactggagaaagttctcagtgaatgttagctgcgccttctatgttcttttttcctagggtcatttgttgacattcattgctgttcctgctagcaattcagggctatgtattgtaaatgatgagctatttgtgcggaatgccagttctgaagagatccaaagagccttcgctatgcctgcacccacgccttcctccagcccggtgcccaccctctctccagagcagcaggaaatgttgcaagcattctctacccagtctggcatgaacctcgagtggtcccagaagtgccttcaggacaacaactgggactacaccagatctgcccaggccttcactcatctcaaggccaagggcgagatcccagaagtggcattcatgaagtgatcgtagtcatgcctcagaagcagtcccccctgtaaatagtccttggatattaccgtctggttgtcgtctgtcatctcctcctgtctggcccgaggccgccccgtgactgtgaccgagggagggagggctgcctgatccctctcctcgcctgccttctggaagacttcagaagattgagcctcactggtgccaggaagccaaagcttactttgtagaactgacactaaactacccgaaggacttaggtgctttgtgtacttaaccccaggacctccttactttttaatataaagagtgatgttgta

SEQ ID NO: 366144 - DNA, 381 bp, Homo sapiens
gaaacaaacttgctgacacattgaccttttaacatctgacctccagaatcattaagagtataaatttgttgttttaagattggccagccaaggctgctgtgaaattcagatctgtgtgtccaggaaacccaggaaaacaactggactcacttttgctccgtagggttcaggaggacggatttttgcactggatttatggccccatgggctcccctcccagctccgtacactagcaattcagacattggccaagttgcttgacctgcctgtgccccacttccctcctctgaacggcaggatggtaacactacgtggcagagttctggagaggactgggtgcgatgccgtgtgctgagtccctggctcgtgtcagccttggca

SEQ ID NO: 366145 - DNA, 328 bp, Homo sapiens
  misc_feature (305)..(305): n is a, c, g, or t
agctcggtacccactagtccacggttggctactagtccacggttggctactagtccacggttggctactagtccacggttgtcttccagaaaatatatgtcttccaactaagctacgtcttccaacaaatccatgtcttcctatatctccaggtcttccagcatctccagggcttccagcatctgctcgtcttccaacatctccacgtcttccagcatctctgtgtcttccagcatcttcatgtcttccaacaactacccagtcttccatcaactggctcaatatccattccagcgtactaccanacccttagccaaccgtgactagt

SEQ ID NO: 366146 - DNA, 2164 bp, Homo sapiens
  misc_feature (62)..(62): n is a, c, g, or t
  misc_feature (65)..(65): n is a, c, g, or t
  misc_feature (67)..(67): n is a, c, g, or t
  misc_feature (71)..(71): n is a, c, g, or t
  misc_feature (74)..(74): n is a, c, g, or t
  misc_feature (77)..(79): n is a, c, g, or t
  misc_feature (103)..(103): n is a, c, g, or t
  misc_feature (2144)..(2146): n is a, c, g, or t
  misc_feature (2149)..(2150): n is a, c, g, or t
tacttttccacaggtcacaggtcttccaacgaactccgggtcttccagcgacttcaagtctnccngnaagngcncgnnntccaacaaagcctatgtcttccangactatccatgtcttccagaaaatccttgtcttccctcaaatccatagcttccgaaaaatccaggtcttccaggaaatccgtgtcttccagcaaatccacgtcttccaacaaagccatgtcttccatcaaattaatgtcttccagcctacttgtgtcttccaacaaaggtacgtcttccaacaaaggtacgtcttccaacaaaggtatgtcttccaacaaaggtacgtcttccagaaaatccacgtcttccaaccaagccatgtcttccagaaaatccacgtcttccagaaaatatatgtcttccaactaagctacgtcttccaacaaatccatgtcttcctatatctccaggtcttccagcatctccagggcttccagcatctgctcgtcttccaacatctccacgtcttccagcatctctgtgtcttccagcatcttcatgtcttccaacaactacccagtcttccatcaactggctcaatatccatgtcttccaacgtctccagtgtgctgatcttctgacattcaggtcttccagtgtctgcaatatccagggtttccgatggcacctgtgtcaaggtcttccaacaactccgggtcttccagcgacttcaagtcttccaataatctcaaggtcttccagataatcctgagcttccagaaaatccacatcttccagacaatccatgtcttccggacaatccatgtcttccaagaagctccaagtcttccagtaaatcaagtcttccagcaaatccagtcttccagcaattactggtcttccaccaaatccagatcttccaggaaaatccacgtcttccaggaaatccatgtcttccaataatttcaaggtcttccatcaaatacagatcttccagctaatccatgtcttccagaaaaatctgtgtcttccaccaaatccaagtcttccagtaaatctagttcttccagaaaaatctagatcttccagtcaatcagtgtcttccagaaagaaatccaggtcttccagtcaatcagtgtcttccagaaagaaatccaggtcttccagtcagtcagtgtcttccagaaaaatctacgtcttccaccaaatccaggtcttccagtcaatccacatcttccggaaaaaatccaggtcttccagccaatatatgtcttcctgaagatccacgtcttccagaaaatccatgtcttccagaaaatccatgtcttccagtaacctcccagtcttccagaaaatccacgtcttcccaacaatccaagtcttccggataatttgggtcttcctgaaaatctacgtcttccaaaaaagccatgtcttccagaaacacattcttccaacaaagccatgtcttccagactatccatgtcttccagaaaatccttgtcttccctcaaatccatagcttccgaaaaatccaggtcttccaggaaatccgtgtcttccagcaaatccacgtcttccaacaaagccatgtcttccatcaaattaatgtcttccagcctacttgtgtcttccaacaaaggtacgtcttccaacaaaggtacgtcttccaacaaaggtatgtcttccaacaaaggtacgtcttccagaaaatccacgtcttccaaccaagccatgtcttccagaaaatccacgtcttccagaaaatatatgtcttccaactaagctacgtcttccaacaaatccatgtcttcctatatctccaggtcttccagcatctccagggcttccagcatctgctcgtcttccaacatctccacgtcttccagcatctctgtgtcttccagcatcttcatgtcttccaacaactacccagtcttccatcaactggctcaatatccatgtcttccaacgtctccagtgtgctgatcttctgacattcaggtcttccagtgtctgcaatatccagggtttccgatggcacctgtgtcaaggtcttccaacaactccgggtcttccagcgacttcaagtcttccaataatctcaaggtcttccagataatcctgagcttccagaaaatccacatcttccagacaannnagnnccggacaatccatg

SEQ ID NO: 366147 - DNA, 2117 bp, Homo sapiens
  misc_feature (62)..(62): n is a, c, g, or t
  misc_feature (65)..(65): n is a, c, g, or t
  misc_feature (67)..(67): n is a, c, g, or t
  misc_feature (71)..(71): n is a, c, g, or t
  misc_feature (74)..(74): n is a, c, g, or t
  misc_feature (77)..(79): n is a, c, g, or t
  misc_feature (103)..(103): n is a, c, g, or t
  misc_feature (2097)..(2099): n is a, c, g, or t
  misc_feature (2102)..(2103): n is a, c, g, or t
tacttttccacaggtcacaggtcttccaacgaactccgggtcttccagcgacttcaagtctnccngnaagngcncgnnntccaacaaagcctatgtcttccangactatccatgtcttccagaaaatccttgtcttccctcaaatccatagcttccgaaaaatccaggtcttccaggaaatccgtgtcttccagcaaatccacgtcttccaacaaagccatgtcttccatcaaattaatgtcttccagcctacttgtgtcttccaacaaaggtacgtcttccaacaaaggtacgtcttccaacaaaggtatgtcttccaacaaaggtacgtcttccagaaaatccacgtcttccaaccaagccatgtcttccagaaaatccacgtcttccagaaaatatatgtcttccaactaagctacgtcttccaacaaatccatgtcttcctatatctccaggtcttccagcatctccagggcttccagcatctgctcgtcttccaacatctccacgtcttccagcatctctgtgtcttccagcatcttcatgtcttccaacaactacccagtcttccatcaactggctcaatatccatgtcttccaacgtctccagtgtgctgatcttctgacattcaggtcttccagtgtctgcaatatccagggtttccgatggcacctgtgtcaaggtcttccaacaactccgggtcttccagcgacttcaagtcttccaataatctcaaggtcttccagataatcctgagcttccagaaaatccacatcttccagacaatccatgtcttccggacaatccatgtcttccaagaagctccaagtcttccagtaaatcaagtcttccagcaaatccagtcttccagcaattactggtcttccaccaaatccagatcttccaggaaaatccacgtcttccaggaaatccatgtcttccaataatttcaaggtcttccatcaaatacagatcttccagctaatccatgtcttccagaaaaatctgtgtcttccaccaaatccaagtcttccagtaaatctagttcttccagaaaaatctagatcttccagtcaatcagtgtcttccagaaagaaatccaggtcttccagtcaatcagtgtcttccagaaagaaatccaggtcttccagtcagtcagtgtcttccagaaaaatctacgtcttccaccaaatccaggtcttccagtcaatccacatcttccggaaaaaatccaggtcttccagccaatatatgtcttcctgaagatccacgtcttccagaaaatccatgtcttccagaaaatccatgtcttccagtaacctcccagtcttccagaaaatccacgtcttcccaacaatccaagtcttccggataatttgggtcttcctgaaaatctacgtcttccaaaaaagccatgtcttccagaaacacattccacatcttccaatggcctccaggtcttccagactatccatgtcttccagaaaatccttgtcttcccttaaatctatagcttccaaaaaatccgggtcttccaggaaatccgtgtcttccagcaagtccacgtcttccaacaaagccatgtcttccagactatccatgtcttccagaaaatccttgtcttccctcaaatccatagcttccgaaaaatccaggtcttccaggaaatccgtgtcttccagcaaatccacgtcttccaacaaagccatgtcttccatcaaattaatgtcttccagcctacttgtgtcttccaacaaagccaggtcttccagcatctccagggcttccagcatctgctcgtcttccaacatctccacgtcttccagcatctctgtgtcttccagcatcttcatgtcttccaacaactacccagtcttccatcaactggctcaatatccatgtcttccaacgtctccagtgtgctgatcttctgacattcaggtcttccagtgtctgcaatatccagggtttccgatggcacctgtgtcaaggtcttccaacaactccgggtcttccagcgacttcaagtcttccaataatctcaaggtcttccagataatcctgagcttccagaaaatccacatcttccagacaannnagnnccggacaatccatg

SEQ ID NO: 366148 - DNA, 2117 bp, Homo sapiens
  misc_feature (62)..(62): n is a, c, g, or t
  misc_feature (65)..(65): n is a, c, g, or t
  misc_feature (67)..(67): n is a, c, g, or t
  misc_feature (71)..(71): n is a, c, g, or t
  misc_feature (74)..(74): n is a, c, g, or t
  misc_feature (77)..(79): n is a, c, g, or t
  misc_feature (103)..(103): n is a, c, g, or t
  misc_feature (2097)..(2099): n is a, c, g, or t
  misc_feature (2102)..(2103): n is a, c, g, or t
tacttttccacaggtcacaggtcttccaacgaactccgggtcttccagcgacttcaagtctnccngnaagngcncgnnntccaacaaagcctatgtcttccangactatccatgtcttccagaaaatccttgtcttccctcaaatccatagcttccgaaaaatccaggtcttccaggaaatccgtgtcttccagcaaatccacgtcttccaacaaagccatgtcttccatcaaattaatgtcttccagcctacttgtgtcttccaacaaaggtaggtcttccagcatctccagggcttccagcatctgctcgtcttccaacatctccacgtcttccagcatctctgtgtcttccagcatcttcatgtcttccaacaactacccagtcttccatcaactggctcaatatccatgtcttccaacgtctccagtgtgctgatcttctgacattcaggtcttccagtgtctgcaatatccagggtttccgatggcacctgtgtcaaggtcttccaacaactccgggtcttccagcgacttcaagtcttccaataatctcaaggtcttccagataatcctgagcttccagaaaatccacatcttccagacaatccatgtcttccggacaatccatgtcttccaagaagctccaagtcttccagtaaatcaagtcttccagcaaatccagtcttccagcaattactggtcttccaccaaatccagatcttccaggaaaatccacgtcttccaggaaatccatgtcttccaataatttcaaggtcttccatcaaatacagatcttccagctaatccatgtcttccagaaaaatctgtgtcttccaccaaatccaagtcttccagtaaatctagttcttccagaaaaatctagatcttccagtcaatcagtgtcttccagaaagaaatccaggtcttccagtcaatcagtgtcttccagaaagaaatccaggtcttccagtcagtcagtgtcttccagaaaaatctacgtcttccaccaaatccaggtcttccagtcaatccacatcttccggaaaaaatccaggtcttccagccaatatatgtcttcctgaagatccacgtcttccagaaaatccatgtcttccagaaaatccatgtcttccagtaacctcccagtcttccagaaaatccacgtcttcccaacaatccaagtcttccggataatttgggtcttcctgaaaatctacgtcttccaaaaaagccatgtcttccagaaacacattccacatcttccaatggcctccaggtcttccagactatccatgtcttccagaaaatccttgtcttcccttaaatctatagcttccaaaaaatccgggtcttccaggaaatccgtgtcttccagcaagtccacgtcttccaacaaagccatgtcttccagactatccatgtcttccagaaaatccttgtcttccctcaaatccatagcttccgaaaaatccaggtcttccaggaaatccgtgtcttccagcaaatccacgtcttccaacaaagccatgtcttccatcaaattaatgtcttccagcctacttgtgtcttccaacaaaggtacgtcttccaacaaaggtacgtcttccaacaaaggtatgtcttccaacaaaggtacgtcttccagaaaatccacgtcttccaaccaagccatgtcttccagaaaatccacgtcttccagaaaatatatgtcttccaactaagctacgtcttccaacaaatccatgtcttcctatatctccaggtcttccagcatctccagggcttccagcatctgctcgtcttccaacatctccacgtcttccagcatctctgtgtcttccagcatcttcatgtcttccaacaactacccagtcttccatcaactggctcaatatccatgtcttccaacgtctccagtgtgctgatcttctgacattcaggtcttccagtgtctgcaatatccagggtttccgatggcacctgtgtcaaggtcttccaacaactccgggtcttccagcgacttcaagtcttccaataatctcaaggtcttccagataatcctgagcttccagaaaatccacatcttccagacaannnagnnccggacaatccatg

SEQ ID NO: 366149 - DNA, 2153 bp, Homo sapiens
  misc_feature (62)..(62): n is a, c, g, or t
  misc_feature (65)..(65): n is a, c, g, or t
  misc_feature (67)..(67): n is a, c, g, or t
  misc_feature (71)..(71): n is a, c, g, or t
  misc_feature (74)..(74): n is a, c, g, or t
  misc_feature (77)..(79): n is a, c, g, or t
  misc_feature (103)..(103): n is a, c, g, or t
  misc_feature (2133)..(2135): n is a, c, g, or t
  misc_feature (2138)..(2139): n is a, c, g, or t
tacttttccacaggtcacaggtcttccaacgaactccgggtcttccagcgacttcaagtctnccngnaagngcncgnnntccaacaaagcctatgtcttccangactatccatgtcttccagaaaatccttgtcttccctcaaatccatagcttccgaaaaatccaggtcttccaggaaatccgtgtcttccagcaaatccacgtcttccaacaaagccatgtcttccatcaaattaatgtcttccagcctacttgtgtcttccaacaaaggtacgtcttccaacaaaggtacgtcttccaacaaaggtatgtcttccaacaaaggtacgtcttccagaaaatccacgtcttccaaccaagccatgtcttccagaaaatccacgtcttccagaaaatatatgtcttccaactactacccagtcttccatcaactggctcaatatccatgtcttccaacgtctccagtgtgctgatcttctgacattcaggtcttccagtgtctgcaatatccagggtttccgatggcacctgtgtcaaggtcttccaacaactccgggtcttccagcgacttcaagtcttccaataatctcaaggtcttccagataatcctgagcttccagaaaatccacatcttccagacaatccatgtcttccggacaatccatgtcttccaagaagctccaagtcttccagtaaatcaagtcttccagcaaatccagtcttccagcaattactggtcttccaccaaatccagatcttccaggaaaatccacgtcttccaggaaatccatgtcttccaataatttcaaggtcttccatcaaatacagatcttccagctaatccatgtcttccagaaaaatctgtgtcttccaccaaatccaagtcttccagtaaatctagttcttccagaaaaatctagatcttccagtcaatcagtgtcttccagaaagaaatccaggtcttccagtcaatcagtgtcttccagaaagaaatccaggtcttccagtcagtcagtgtcttccagaaaaatctacgtcttccaccaaatccaggtcttccagtcaatccacatcttccggaaaaaatccaggtcttccagccaatatatgtcttcctgaagatccacgtcttccagaaaatccatgtcttccagaaaatccatgtcttccagtaacctcccagtcttccagaaaatccacgtcttcccaacaatccaagtcttccggataatttgggtcttcctgaaaatctacgtcttccaaaaaagccatgtcttccagaaacacattccacatcttccaatggcctccaggtcttccagactatccatgtcttccagaaaatccttgtcttcccttaaatctatagcttccaaaaaatccgggtcttccaggaaatccgtgtcttccagcaagtccacgtcttccaacaaagccatgtcttccagactatccatgtcttccagaaaatccttgtcttccctcaaatccatagcttccgaaaaatccaggtcttccaggaaatccgtgtcttccagcaaatccacgtcttccaacaaagccatgtcttccatcaaattaatgtcttccagcctacttgtgtcttccaacaaaggtacgtcttccaacaaaggtacgtcttccaacaaaggtatgtcttccaacaaaggtacgtcttccagaaaatccacgtcttccaaccaagccatgtcttccagaaaatccacgtcttccagaaaatatatgtcttccaactaagctacgtcttccaacaaatccatgtcttcctatatctccaggtcttccagcatctccagggcttccagcatctgctcgtcttccaacatctccacgtcttccagcatctctgtgtcttccagcatcttcatgtcttccaacaactacccagtcttccatcaactggctcaatatccatgtcttccaacgtctccagtgtgctgatcttctgacattcaggtcttccagtgtctgcaatatccagggtttccgatggcacctgtgtcaaggtcttccaacaactccgggtcttccagcgacttcaagtcttccaataatctcaaggtcttccagataatcctgagcttccagaaaatccacatcttccagacaannnagnnccggacaatccatg

SEQ ID NO: 366150 - DNA, 1695 bp, Homo sapiens
  misc_feature (62)..(62): n is a, c, g, or t
  misc_feature (65)..(65): n is a, c, g, or t
  misc_feature (67)..(67): n is a, c, g, or t
  misc_feature (71)..(71): n is a, c, g, or t
  misc_feature (74)..(74): n is a, c, g, or t
  misc_feature (77)..(79): n is a, c, g, or t
  misc_feature (103)..(103): n is a, c, g, or t
tacttttccacaggtcacaggtcttccaacgaactccgggtcttccagcgacttcaagtctnccngnaagngcncgnnntccaacaaagcctatgtcttccangactatccatgtcttccagaaaatccttgtcttccctcaaatccatagcttccgaaaaatccaggtcttccaggaaatccgtgtcttccagcaaatccacgtcttccaacaaagccatgtcttccatcaaattaatgtcttccagcctacttgtgtcttccaacaaaggtacgtcttccaacaaaggtacgtcttccaacaaaggtatgtcttccaacaaaggtacgtcttccagaaaatccacgtcttccaaccaagccatgtcttccagaaaatccacgtcttccagaaaatatatgtcttccaactaagctacgtcttccaacaaatccatgtcttcctatatctccaggtcttccagcatctccagggcttccagcatctgctcgtcttccaacatctccacgtcttccagcatctctgtgtcttccagcatcttcatgtcttccaacaactacccagtcttccatcaactggctcaatatccatgtcttccaacgtctccagtgtgctgatcttctgacattcaggtcttccagtgtctgcaatatccagggtttccgatggcacctgtgtcaaggtcttccaacaactccgggtcttccagcgacttcaagtcttccaataatctcaaggtcttccagataatcctgagcttccagaaaatccacatcttccagacaatccatgtcttccggacaatccatgtcttccaagaagctccaagtcttccagtaaatcaagtcttccagcaaatccagtcttccagcaattactggtcttccaccaaatccagatcttccaggaaaatccacgtcttccaggaaatccatgtcttccaataatttcaaggtcttccatcaaatacagatcttccagctaatccatgtcttccagaaaaatctgtgtcttccaccaaatccaagtcttccagtaaatctagttcttccagaaaaatctagatcttccagtcaatcagtgtcttccagaaagaaatccaggtcttccagtcaatcagtgtcttccagaaagaaatccaggtcttccagtcagtcagtgtcttccagaaaaatctacgtcttccaccaaatccaggtcttccagtcaatccacatcttccggaaaaaatccaggtcttccagccaatatatgtcttcctgaagatccacgtcttccagaaaatccatgtcttccagaaaatccatgtcttccagtaacctcccagtcttccagaaaatccacgtcttcccaacaatccaagtcttccggataatttgggtcttcctgaaaatctacgtcttccaaaaaagccatgtcttccagaaacacattccacatcttccaatggcctccaggtcttccagactatccatgtcttccagaaaatccttgtcttcccttaaatctatagcttccaaaaaatccgggtcttccaggaaatccgtgtcttccagcaagtccacgtcttccaacaaagccatgtcttccagactgctggaagctctgtattcgaggaagacatggctttgctggaagacgtggatttgctggaagacacggatttcctggaagacctggatttgacggaagct

SEQ ID NO: 366151 - DNA, 1786 bp, Homo sapiens
  misc_feature (1766)..(1768): n is a, c, g, or t
  misc_feature (1771)..(1772): n is a, c, g, or t
aataacacgacaaaatgaaagcagaacagctgtatggttacaatattcttattaacctctctgcagcattttacacttactagggaaccttatgattacaccgtaatagtggagaatatacttgagttcgtgtcctaatggtctctaattcacattggatcgtgggcaaatcacctcacctctctgagcctgttccctcctcttagaccatcttactgttaccggaagattatcaccggcagcatgtcttccagaaaatccacatcttccagacaatccatgtcttccggacaatccatgtcttccaagaagctccaagtcttccagtaaatcaagtcttccagcaaatccagtcttccagcaattactggtcttccaccaaatccagatcttccaggaaaatccacgtcttccaggaaatccatgtcttccaataatttcaaggtcttccatcaaatacagatcttccagctaatccatgtcttccagaaaaatctgtgtcttccaccaaatccaagtcttccagtaaatctagttcttccagaaaaatctagatcttccagtcaatcagtgtcttccagaaagaaatccaggtcttccagtcaatcagtgtcttccagaaagaaatccaggtcttccagtcagtcagtgtcttccagaaaaatctacgtcttccaccaaatccaggtcttccagtcaatccacatcttccggaaaaaatccaggtcttccagccaatatatgtcttcctgaagatccacgtcttccagaaaatccatgtcttccagaaaatccatgtcttccagtaacctcccagtcttccagaaaatccacgtcttcccaacaatccaagtcttccggataatttgggtcttcctgaaaatctacgtcttccaaaaaagccatgtcttccagaaacacattccacatcttccaatggcctccaggtcttccagactatccatgtcttccagaaaatccttgtcttcccttaaatctatagcttccaaaaaatccgggtcttccaggaaatccgtgtcttccagcaagtccacgtcttccaacaaagccatgtcttccagactatccatgtcttccagaaaatccttgtcttccctcaaatccatagcttccgaaaaatccaggtcttccaggaaatccgtgtcttccagcaaatccacgtcttccaacaaagccatgtcttccatcaaattaatgtcttccagcctacttgtgtcttccaacaaaggtacgtcttccaacaaaggtacgtcttccaacaaaggtatgtcttccaacaaaggtacgtcttccagaaaatccacgtcttccaaccaagccatgtcttccagaaaatccacgtcttccagaaaatatatgtcttccaactaagctacgtcttccaacaaatccatgtcttcctatatctccaggtcttccagcatctccagggcttccagcatctgctcgtcttccaacatctccacgtcttccagcatctctgtgtcttccagcatcttcatgtcttccaacaactacccagtcttccatcaactggctcaatatccatgtcttccaacgtctccagtgtgctgatcttctgacattcaggtcttccagtgtctgcaatatccagggtttccgatggcacctgtgtcaaggtcttccaacaactccgggtcttccagcgacttcaagtcttccaataatctcaaggtcttccagataatcctgagcttccagaaaatccacatcttccagacaannnagnnccggacaatccatg

SEQ ID NO: 366152 - DNA, 1368 bp, Homo sapiens
  misc_feature (1348)..(1350): n is a, c, g, or t
  misc_feature (1353)..(1354): n is a, c, g, or t
cgtgcgcggtcgctctagagatcccactagtccacggtgggctacagattcagctaatccatgtcttccagaaaaatctgtgtcttccaccaaatccaagtcttccagtaaatctagttcttccagaaaaatctagatcttccagtcaatcagtgtcttccagaaagaaatccaggtcttccagtcaatcagtgtcttccagaaagaaatccaggtcttccagtcagtcagtgtcttccagaaaaatctacgtcttccaccaaatccaggtcttccagtcaatccacatcttccggaaaaaatccaggtcttccagccaatatatgtcttcctgaagatccacgtcttccagaaaatccatgtcttccagaaaatccatgtcttccagtaacctcccagtcttccagaaaatccacgtcttcccaacaatccaagtcttccggataatttgggtcttcctgaaaatctacgtcttccaaaaaagccatgtcttccagaaacacattccacatcttccaatggcctccaggtcttccagactatccatgtcttccagaaaatccttgtcttcccttaaatctatagcttccaaaaaatccgggtcttccaggaaatccgtgtcttccagcaagtccacgtcttccaacaaagccatgtcttccagactatccatgtcttccagaaaatccttgtcttccctcaaatccatagcttccgaaaaatccaggtcttccaggaaatccgtgtcttccagcaaatccacgtcttccaacaaagccatgtcttccatcaaattaatgtcttccagcctacttgtgtcttccaacaaaggtacgtcttccaacaaaggtacgtcttccaacaaaggtatgtcttccaacaaaggtacgtcttccagaaaatccacgtcttccaaccaagccatgtcttccagaaaatccacgtcttccagaaaatatatgtcttccaactaagctacgtcttccaacaaatccatgtcttcctatatctccaggtcttccagcatctccagggcttccagcatctgctcgtcttccaacatctccacgtcttccagcatctctgtgtcttccagcatcttcatgtcttccaacaactacccagtcttccatcaactggctcaatatccatgtcttccaacgtctccagtgtgctgatcttctgacattcaggtcttccagtgtctgcaatatccagggtttccgatggcacctgtgtcaaggtcttccaacaactccgggtcttccagcgacttcaagtcttccaataatctcaaggtcttccagataatcctgagcttccagaaaatccacatcttccagacaannnagnnccggacaatccatg

SEQ ID NO: 366153 - DNA, 1980 bp, Homo sapiens
  misc_feature (62)..(62): n is a, c, g, or t
  misc_feature (65)..(65): n is a, c, g, or t
  misc_feature (67)..(67): n is a, c, g, or t
  misc_feature (71)..(71): n is a, c, g, or t
  misc_feature (74)..(74): n is a, c, g, or t
  misc_feature (77)..(79): n is a, c, g, or t
  misc_feature (103)..(103): n is a, c, g, or t
  misc_feature (1960)..(1962): n is a, c, g, or t
  misc_feature (1965)..(1966): n is a, c, g, or t
tacttttccacaggtcacaggtcttccaacgaactccgggtcttccagcgacttcaagtctnccngnaagngcncgnnntccaacaaagcctatgtcttccangactatccatgtcttccagaaaatccttgtcttccctcaaatccatagcttccgaaaaatccaggtcttccaggaaatccgtgtcttccagcaaatccacgtcttccaacaaagccatgtcttccatcaaattaatgtcttccagcctacttgtgtcttccaacaaaggtacgtcttccaacaaaggtacgtcttccaacaaaggtatgtcttccaacaaaggtacgtcttccagaaaatccacgtcttccaaccaagccatgtcttccagaaaatccacgtcttccagaaaatatatgtcttccaactaagctacgtcttccaacaaatccatgtcttcctatatctccaggtcttccagcatctccagggcttccagcatctgctcgtcttccaacatctccacgtcttccagcatctctgtgtcttccagcatcttcatgtcttccaacaactacccagtcttccatcaactggctcaatatccatgtcttccaacgtctccagtgtgctgatcttctgacattcaggtcttccagtgtctgcaatatccagggtttccgatggcacctgtgtcaaggtcttccaacaactccgggtcttccagcgacttcaagtcttccaataatctcaaggtcttccagataatcctgagcttccagaaaatccacatcttccagacaatccatgtcttccggacaatccatgtcttccaagaagctccaagtcttccagtaaatcaagtcttccagcaaatccagtcttccagcaattactggtcttccaccaaatccagatcttccggaaaaaatccaggtcttccagccaatatatgtcttcctgaagatccacgtcttccagaaaatccatgtcttccagaaaatccatgtcttccagtaacctcccagtcttccagaaaatccacgtcttcccaacaatccaagtcttccggataatttgggtcttcctgaaaatctacgtcttccaaaaaagccatgtcttccagaaacacattccacatcttccaatggcctccaggtcttccagactatccatgtcttccagaaaatccttgtcttcccttaaatctatagcttccaaaaaatccgggtcttccaggaaatccgtgtcttccagcaagtccacgtcttccaacaaagccatgtcttccagactatccatgtcttccagaaaatccttgtcttccctcaaatccatagcttccgaaaaatccaggtcttccaggaaatccgtgtcttccagcaaatccacgtcttccaacaaagccatgtcttccatcaaattaatgtcttccagcctacttgtgtcttccaacaaaggtacgtcttccaacaaaggtacgtcttccaacaaaggtatgtcttccaacaaaggtacgtcttccagaaaatccacgtcttccaaccaagccatgtcttccagaaaatccacgtcttccagaaaatatatgtcttccaactaagctacgtcttccaacaaatccatgtcttcctatatctccaggtcttccagcatctccagggcttccagcatctgctcgtcttccaacatctccacgtcttccagcatctctgtgtcttccagcatcttcatgtcttccaacaactacccagtcttccatcaactggctcaatatccatgtcttccaacgtctccagtgtgctgatcttctgacattcaggtcttccagtgtctgcaatatccagggtttccgatggcacctgtgtcaaggtcttccaacaactccgggtcttccagcgacttcaagtcttccaataatctcaaggtcttccagataatcctgagcttccagaaaatccacatcttccagacaannnagnnccggacaatccatg

SEQ ID NO: 366154 - DNA, 1367 bp, Homo sapiens
  misc_feature (1347)..(1349): n is a, c, g, or t
  misc_feature (1352)..(1353): n is a, c, g, or t
aagacatggatagtctggaagacatggcttcgttggaagacgtggacttgctagaagacacggatttcctggaatccccggtcttccaccaaatccaagtcttccagtaaatctagttcttccagaaaaatctagatcttccagtcaatcagtgtcttccagaaagaaatccaggtcttccagtcaatcagtgtcttccagaaagaaatccaggtcttccagtcagtcagtgtcttccagaaaaatctacgtcttccaccaaatccaggtcttccagtcaatccacatcttccggaaaaaatccaggtcttccagccaatatatgtcttcctgaagatccacgtcttccagaaaatccatgtcttccagaaaatccatgtcttccagtaacctcccagtcttccagaaaatccacgtcttcccaacaatccaagtcttccggataatttgggtcttcctgaaaatctacgtcttccaaaaaagccatgtcttccagaaacacattccacatcttccaatggcctccaggtcttccagactatccatgtcttccagaaaatccttgtcttcccttaaatctatagcttccaaaaaatccgggtcttccaggaaatccgtgtcttccagcaagtccacgtcttccaacaaagccatgtcttccagactatccatgtcttccagaaaatccttgtcttccctcaaatccatagcttccgaaaaatccaggtcttccaggaaatccgtgtcttccagcaaatccacgtcttccaacaaagccatgtcttccatcaaattaatgtcttccagcctacttgtgtcttccaacaaaggtacgtcttccaacaaaggtacgtcttccaacaaaggtatgtcttccaacaaaggtacgtcttccagaaaatccacgtcttccaaccaagccatgtcttccagaaaatccacgtcttccagaaaatatatgtcttccaactaagctacgtcttccaacaaatccatgtcttcctatatctccaggtcttccagcatctccagggcttccagcatctgctcgtcttccaacatctccacgtcttccagcatctctgtgtcttccagcatcttcatgtcttccaacaactacccagtcttccatcaactggctcaatatccatgtcttccaacgtctccagtgtgctgatcttctgacattcaggtcttccagtgtctgcaatatccagggtttccgatggcacctgtgtcaaggtcttccaacaactccgggtcttccagcgacttcaagtcttccaataatctcaaggtcttccagataatcctgagcttccagaaaatccacatcttccagacaannnagnnccggacaatccatg

SEQ ID NO: 366155 - DNA, 998 bp, Homo sapiens
  misc_feature (37)..(37): n is a, c, g, or t
  misc_feature (978)..(980): n is a, c, g, or t
  misc_feature (983)..(984): n is a, c, g, or t
tactgctgtgtgatggagaaggagcttcaattgaggncgctgtgctatcctccctgacaggagagtataagccactcatttctgccactctcggaatatcgtcttccaaaaaagccatgtcttccagaaacacattccacatcttccaatggcctccaggtcttccagactatccatgtcttccagaaaatccttgtcttcccttaaatctatagcttccaaaaaatccgggtcttccaggaaatccgtgtcttccagcaagtccacgtcttccaacaaagccatgtcttccagactatccatgtcttccagaaaatccttgtcttccctcaaatccatagcttccgaaaaatccaggtcttccaggaaatccgtgtcttccagcaaatccacgtcttccaacaaagccatgtcttccatcaaattaatgtcttccagcctacttgtgtcttccaacaaaggtacgtcttccaacaaaggtacgtcttccaacaaaggtatgtcttccaacaaaggtacgtcttccagaaaatccacgtcttccaaccaagccatgtcttccagaaaatccacgtcttccagaaaatatatgtcttccaactaagctacgtcttccaacaaatccatgtcttcctatatctccaggtcttccagcatctccagggcttccagcatctgctcgtcttccaacatctccacgtcttccagcatctctgtgtcttccagcatcttcatgtcttccaacaactacccagtcttccatcaactggctcaatatccatgtcttccaacgtctccagtgtgctgatcttctgacattcaggtcttccagtgtctgcaatatccagggtttccgatggcacctgtgtcaaggtcttccaacaactccgggtcttccagcgacttcaagtcttccaataatctcaaggtcttccagataatcctgagcttccagaaaatccacatcttccagacaannnagnnccggacaatccatg

SEQ ID NO: 366156 - DNA, 1253 bp, Homo sapiens
  misc_feature (62)..(62): n is a, c, g, or t
  misc_feature (65)..(65): n is a, c, g, or t
  misc_feature (67)..(67): n is a, c, g, or t
  misc_feature (71)..(71): n is a, c, g, or t
  misc_feature (74)..(74): n is a, c, g, or t
  misc_feature (77)..(79): n is a, c, g, or t
  misc_feature (103)..(103): n is a, c, g, or t
  misc_feature (1233)..(1235): n is a, c, g, or t
  misc_feature (1238)..(1239): n is a, c, g, or t
tacttttccacaggtcacaggtcttccaacgaactccgggtcttccagcgacttcaagtctnccngnaagngcncgnnntccaacaaagcctatgtcttccangactatccatgtcttccagaaaatccttgtcttccctcaaatccatagcttccgaaaaatccaggtcttccaggaaatccgtgtcttccagcaaatccacgtcttccaacaaagccatgtcttccatcaaattaatgtcttccagcctacttgtgtcttccaacaaaggtacgtcttccaacaaaggtacgtcttccaacaaaggtatgtcttccaacaaaggtacgtcttccagaaaatccacgtcttccaaccaagccatgtcttccagaaaatccacgtcttccagaaaatatatgtcttccaactaagctacgtcttccaacaaatccatgtcttcctatatctccaggtcttccagcatctccagggcttccagcatctgctcgtcttccaacatctccacgtcttccagcatctctgtgtcttccagcatcttcatgtcttccaacaactacccagtcttccatcaactggctcaatatccatgtcttccaacgtctccagtgtgctgatcttctgacattcaggtcttccagtgtctgcaatatccagggtttccgatggcacctgtgtcaaggtcttccaacaactccgggtcttccagcgacttcaagtcttccaataatctcaaggtcttccagataatcctgagcttccagaaaatccacatcttccagacaatccatgtcttccggacaatccatgtcttccaagaagctccaagtcttccagtaaatcaagtcttccatcaaattaatgtcttccagcctacttgtgtcttccaacaaagccaggtcttccagcatctccagggcttccagcatctgctcgtcttccaacatctccacgtcttccagcatctctgtgtcttccagcatcttcatgtcttccaacaactacccagtcttccatcaactggctcaatatccatgtcttccaacgtctccagtgtgctgatcttctgacattcaggtcttccagtgtctgcaatatccagggtttccgatggcacctgtgtcaaggtcttccaacaactccgggtcttccagcgacttcaagtcttccaataatctcaaggtcttccagataatcctgagcttccagaaaatccacatcttccagacaannnagnnccggacaatccatg

SEQ ID NO: 366157 - DNA, 912 bp, Homo sapiens
  misc_feature (892)..(894): n is a, c, g, or t
  misc_feature (897)..(898): n is a, c, g, or t
agaggaagacctggatttgtttctggaagacatgatggactggaagatctagattttactggaagaactagatatactggaagactgggattgggtggaagacagagatttttctggaagacatggattagctggaagatctgtattggatggaagacctggaaattattggaagagatggatttcctgaaaaatctgtgtcttccacctaatccatgtcttccagaaaatccttgtcttccctcaaatccatagcttccgaaaaatccaggtcttccaggaaatccgtgtcttccagcaaatccacgtcttccaacaaagccatgtcttccatcaaattaatgtcttccagcctacttgtgtcttccaacaaaggtacgtcttccaacaaaggtacgtcttccaacaaaggtatgtcttccaacaaaggtacgtcttccagaaaatccacgtcttccaaccaagccatgtcttccagaaaatccacgtcttccagaaaatatatgtcttccaactaagctacgtcttccaacaaatccatgtcttcctatatctccaggtcttccagcatctccagggcttccagcatctgctcgtcttccaacatctccacgtcttccagcatctctgtgtcttccagcatcttcatgtcttccaacaactacccagtcttccatcaactggctcaatatccatgtcttccaacgtctccagtgtgctgatcttctgacattcaggtcttccagtgtctgcaatatccagggtttccgatggcacctgtgtcaaggtcttccaacaactccgggtcttccagcgacttcaagtcttccaataatctcaaggtcttccagataatcctgagcttccagaaaatccacatcttccagacaannnagnnccggacaatccatg

SEQ ID NO: 366158 - DNA, 2297 bp, Homo sapiens
  misc_feature (62)..(62): n is a, c, g, or t
  misc_feature (65)..(65): n is a, c, g, or t
  misc_feature (67)..(67): n is a, c, g, or t
  misc_feature (71)..(71): n is a, c, g, or t
  misc_feature (74)..(74): n is a, c, g, or t
  misc_feature (77)..(79): n is a, c, g, or t
  misc_feature (103)..(103): n is a, c, g, or t
  misc_feature (2277)..(2279): n is a, c, g, or t
  misc_feature (2282)..(2283): n is a, c, g, or t
tacttttccacaggtcacaggtcttccaacgaactccgggtcttccagcgacttcaagtctnccngnaagngcncgnnntccaacaaagcctatgtcttccangactatccatgtcttccagaaaatccttgtcttccctcaaatccatagcttccgaaaaatccaggtcttccaggaaatccgtgtcttccagcaaatccacgtcttccaacaaagccatgtcttccatcaaattaatgtcttccagcctacttgtgtcttccaacaaaggtacgtcttccaacaaaggtacgtcttccaacaaaggtatgtcttccaacaaaggtacgtcttccagaaaatccacgtcttccaaccaagccatgtcttccagaaaatccacgtcttccagaaaatatatgtcttccaactaagctacgtcttccaacaaatccatgtcttcctatatctccaggtcttccagcatctccagggcttccagcatctgctcgtcttccaacatctccacgtcttccagcatctctgtgtcttccagcatcttcatgtcttccaacaactacccagtcttccatcaactggctcaatatccatgtcttccaacgtctccagtgtgctgatcttctgacattcaggtcttccagtgtctgcaatatccagggtttccgatggcacctgtgtcaaggtcttccaacaactccgggtcttccagcgacttcaagtcttccaataatctcaaggtcttccagataatcctgagcttccagaaaatccacatcttccagacaatccatgtcttccggacaatccatgtcttccaagaagctccaagtcttccagtaaatcaagtcttccagcaaatccagtcttccagcaattactggtcttccaccaaatccagatcttccaggaaaatccacgtcttccaggaaatccatgtcttccaataatttcaaggtcttccatcaaatacagatcttccagctaatccatgtcttccagaaaaatctgtgtcttccaccaaatccaagtcttccagtaaatctagttcttccagaaaaatctagatcttccagtcaatcagtgtcttccagaaagaaatccaggtcttccagtcaatcagtgtcttccagaaagaaatccaggtcttccagtcagtcagtgtcttccagaaaaatctacgtcttccaccaaatccaggtcttccagtcaatccacatcttccggaaaaaatccaggtcttccagccaatatatgtcttcctgaagatccacgtcttccagaaaatccatgtcttccagaaaatccatgtcttccagtaacctcccagtcttccagaaaatccacgtcttcccaacaatccaagtcttccggataatttgggtcttcctgaaaatctacgtcttccaaaaaagccatgtcttccagaaacacattccacatcttccaatggcctccaggtcttccagactatccatgtcttccagaaaatccttgtcttcccttaaatctatagcttccaaaaaatccgggtcttccaggaaatccgtgtcttccagcaagtccacgtcttccaacaaagccatgtcttccagactatccatgtcttccagaaaatccttgtcttccctcaaatccatagcttccgaaaaatccaggtcttccaggaaatccgtgtcttccagcaaatccacgtcttccaacaaagccatgtcttccatcaaattaatgtcttccagcctacttgtgtcttccaacaaaggtacgtcttccaacaaaggtacgtcttccaacaaaggtatgtcttccaacaaaggtacgtcttccagaaaatccacgtcttccaaccaagccatgtcttccagaaaatccacgtcttccagaaaatatatgtcttccaactaagctacgtcttccaacaaatccatgtcttcctatatctccaggtcttccagcatctccagggcttccagcatctgctcgtcttccaacatctccacgtcttccagcatctctgtgtcttccagcatcttcatgtcttccaacaactacccagtcttccatcaactggctcaatatccatgtcttccaacgtctccagtgtgctgatcttctgacattcaggtcttccagtgtctgcaatatccagggtttccgatggcacctgtgtcaaggtcttccaacaactccgggtcttccagcgacttcaagtcttccaataatctcaaggtcttccagataatcctgagcttccagaaaatccacatcttccagacaannnagnnccggacaatccatg

SEQ ID NO: 366159 - DNA, 1574 bp, Homo sapiens
  misc_feature (62)..(62): n is a, c, g, or t
  misc_feature (65)..(65): n is a, c, g, or t
  misc_feature (67)..(67): n is a, c, g, or t
  misc_feature (71)..(71): n is a, c, g, or t
  misc_feature (74)..(74): n is a, c, g, or t
  misc_feature (77)..(79): n is a, c, g, or t
  misc_feature (103)..(103): n is a, c, g, or t
tacttttccacaggtcacaggtcttccaacgaactccgggtcttccagcgacttcaagtctnccngnaagngcncgnnntccaacaaagcctatgtcttccangactatccatgtcttccagaaaatccttgtcttccctcaaatccatagcttccgaaaaatccaggtcttccaggaaatccgtgtcttccagcaaatccacgtcttccaacaaagccatgtcttccatcaaattaatgtcttccagcctacttgtgtcttccaacaaaggtacgtcttccaacaaaggtacgtcttccaacaaaggtatgtcttccaacaaaggtacgtcttccagaaaatccacgtcttccaaccaagccatgtcttccagaaaatccacgtcttccagaaaatatatgtcttccaactaagctacgtcttccaacaaatccatgtcttcctatatctccaggtcttccagcatctccagggcttccagcatctgctcgtcttccaacatctccacgtcttccagcatctctgtgtcttccagcatcttcatgtcttccaacaactacccagtcttccatcaactggctcaatatccatgtcttccaacgtctccagtgtgctgatcttctgacattcaggtcttccagtgtctgcaatatccagggtttccgatggcacctgtgtcaaggtcttccaacaactccgggtcttccagcgacttcaagtcttccaataatctcaaggtcttccagataatcctgagcttccagaaaatccacatcttccagacaatccatgtcttccggacaatccatgtcttccaagaagctccaagtcttccagtaaatcaagtcttccagcaaatccagtcttccagcaattactggtcttccaccaaatccagatcttccaggaaaatccacgtcttccaggaaatccatgtcttccaataatttcaaggtcttccatcaaatacagatcttccagctaatccatgtcttccagaaaaatctgtgtcttccaccaaatccaagtcttccagtaaatctagttcttccagaaaaatctagatcttccagtcaatcagtgtcttccagaaagaaatccaggtcttccagtcaatcagtgtcttccagaaagaaatccaggtcttccagtcagtcagtgtcttccagaaaaatctacgtcttccaccaaatccaggtcttccagtcaatccacatcttccggaaaaaatccaggtcttccagccaatatatgtcttcctgaagatccacgtcttccagaaaatccatgtcttccagaaaatccatgtcttccagtaacctcccagtcttccagaaaatccacgtcttcccaacaatccaagtcttccggataatttgggtcttcctgaaaatctacgtcttccaaaaaagccatgtcttccagaaacacattccattttcacggctcaggcttcaaattcagggttccgaaacctgtgtcctaactaactccaaatcggtctcgaaacggggtaccaacagtttccagacagtcccaacttgttcaacactttgccaaccggcgattcacg

SEQ ID NO: 366160 - DNA, 2104 bp, Homo sapiens
  misc_feature (62)..(62): n is a, c, g, or t
  misc_feature (65)..(65): n is a, c, g, or t
  misc_feature (67)..(67): n is a, c, g, or t
  misc_feature (71)..(71): n is a, c, g, or t
  misc_feature (74)..(74): n is a, c, g, or t
  misc_feature (77)..(79): n is a, c, g, or t
  misc_feature (103)..(103): n is a, c, g, or t
  misc_feature (2084)..(2086): n is a, c, g, or t
  misc_feature (2089)..(2090): n is a, c, g, or t
tacttttccacaggtcacaggtcttccaacgaactccgggtcttccagcgacttcaagtctnccngnaagngcncgnnntccaacaaagcctatgtcttccangactatccatgtcttccagaaaatccttgtcttccctcaaatccatagcttccgaaaaatccaggtcttccaggaaatccgtgtcttccagcaaatccacgtcttccaacaaagccatgtcttccatcaaattaatgtcttccagcctacttgtgtcttccaacaaaggtacgtcttccaacaaaggtacgtcttccaacaaaggtatgtcttccaacaaaggtacgtcttccagaaaatccacgtcttccaaccaagccatgtcttccagaaaatccacgtcttccagaaaatatatgtcttccaactaagctacgtcttccaacaaatccatgtcttcctatatctccaggtcttccagcatctccagggcttccagcatctgctcgtcttccaacatctccacgtcttccagcatctctgtgtcttccagcatcttcatgtcttccaacaactacccagtcttccatcaactggctcaatatccatgtcttccaacgtctccagtgtgctgatcttccaagaagctccaagtcttccagtaaatcaagtcttccagcaaatccagtcttccagcaattactggtcttccaccaaatccagatcttccaggaaaatccacgtcttccaggaaatccatgtcttccaataatttcaaggtcttccatcaaatacagatcttccagctaatccatgtcttccagaaaaatctgtgtcttccaccaaatccaagtcttccagtaaatctagttcttccagaaaaatctagatcttccagtcaatcagtgtcttccagaaagaaatccaggtcttccagtcaatcagtgtcttccagaaagaaatccaggtcttccagtcagtcagtgtcttccagaaaaatctacgtcttccaccaaatccaggtcttccagtcaatccacatcttccggaaaaaatccaggtcttccagccaatatatgtcttcctgaagatccacgtcttccagaaaatccatgtcttccagaaaatccatgtcttccagtaacctcccagtcttccagaaaatccacgtcttcccaacaatccaagtcttccggataatttgggtcttcctgaaaatctacgtcttccaaaaaagccatgtcttccagaaacacattccacatcttccaatggcctccaggtcttccagactatccatgtcttccagaaaatccttgtcttcccttaaatctatagcttccaaaaaatccgggtcttccaggaaatccgtgtcttccagcaagtccacgtcttccaacaaagccatgtcttccagactatccatgtcttccagaaaatccttgtcttccctcaaatccatagcttccgaaaaatccaggtcttccaggaaatccgtgtcttccagcaaatccacgtcttccaacaaagccatgtcttccatcaaattaatgtcttccagcctacttgtgtcttccaacaaaggtacgtcttccaacaaaggtacgtcttccaacaaaggtatgtcttccaacaaaggtacgtcttccagaaaatccacgtcttccaaccaagccatgtcttccagaaaatccacgtcttccagaaaatatatgtcttccaactaagctacgtcttccaacaaatccatgtcttcctatatctccaggtcttccagcatctccagggcttccagcatctgctcgtcttccaacatctccacgtcttccagcatctctgtgtcttccagcatcttcatgtcttccaacaactacccagtcttccatcaactggctcaatatccatgtcttccaacgtctccagtgtgctgatcttctgacattcaggtcttccagtgtctgcaatatccagggtttccgatggcacctgtgtcaaggtcttccaacaactccgggtcttccagcgacttcaagtcttccaataatctcaaggtcttccagataatcctgagcttccagaaaatccacatcttccagacaannnagnnccggacaatccatg

SEQ ID NO: 366161 - DNA, 1233 bp, Homo sapiens
  misc_feature (62)..(62): n is a, c, g, or t
  misc_feature (65)..(65): n is a, c, g, or t
  misc_feature (67)..(67): n is a, c, g, or t
  misc_feature (71)..(71): n is a, c, g, or t
  misc_feature (74)..(74): n is a, c, g, or t
  misc_feature (77)..(79): n is a, c, g, or t
  misc_feature (103)..(103): n is a, c, g, or t
  misc_feature (1213)..(1215): n is a, c, g, or t
  misc_feature (1218)..(1219): n is a, c, g, or t
tacttttccacaggtcacaggtcttccaacgaactccgggtcttccagcgacttcaagtctnccngnaagngcncgnnntccaacaaagcctatgtcttccangactatccatgtcttccagaaaatccttgtcttccctcaaatccatagcttccgaaaaatccaggtcttccaggaaatccgtgtcttccagcaaatccacgtcttccaacaaagccatgtcttccatcaaattaatgtcttccagcctacttgtgtcttccaacaaaggtacgtcttccaacaaaggtacgtcttccaacaaaggtatgtcttccaacaaaggtacgtcttccagaaaatccacgtcttccaaccaagccatgtcttccagaaaatccacgtcttccagaaaatatatgtcttccaactaagctacgtcttccaacaaatccatgtcttcctatatctccaggtcttccagcatctccagggcttccagcatctgctcgtcttccaacatctccacgtcttccagcatctctgtgtcttccagcatcttcatgtcttccaacaactacccagtcttccatcaactggctcaatatccatgtcttccaacgtctccagtgtgctgatcttctgacattcaggtcttccagtgtctgcaatatccagggtttccgatggcacctgtgtcaaggtcttccaacaactccgggtcttccagcgacttcaagtcttccaataatctcaaggtcttccagataatcctgagcttccagaaaatccacatcttccagacaatccatgtcttccggacaatccatgtcttccaagaagctccaagtcttccagtaaatcaagtcttccagcaaatccagtcttccagcaattactggtcttccaccaaatccagatcttccaggaaaatccacgtcttccaggaaatccatgtcttccaataatttcaaggtcttccatcaaatacagatcttccagctaatccatgtcttccagaaaaatctgtgtcttccaccaaatccaagtcttccagtaaatctagttcttccagaaaaatctagatcttccagtcaatcagtggtttccgatggcacctgtgtcaaggtcttccaacaactccgggtcttccagcgacttcaagtcttccaataatctcaaggtcttccagataatcctgagcttccagaaaatccacatcttccagacaannnagnnccggacaatccatg

SEQ ID NO: 366162 - DNA, 1685 bp, Homo sapiens
  misc_feature (62)..(62): n is a, c, g, or t
  misc_feature (65)..(65): n is a, c, g, or t
  misc_feature (67)..(67): n is a, c, g, or t
  misc_feature (71)..(71): n is a, c, g, or t
  misc_feature (74)..(74): n is a, c, g, or t
  misc_feature (77)..(79): n is a, c, g, or t
  misc_feature (103)..(103): n is a, c, g, or t
  misc_feature (1665)..(1667): n is a, c, g, or t
  misc_feature (1670)..(1671): n is a, c, g, or t
tacttttccacaggtcacaggtcttccaacgaactccgggtcttccagcgacttcaagtctnccngnaagngcncgnnntccaacaaagcctatgtcttccangactatccatgtcttccagaaaatccttgtcttccctcaaatccatagcttccgaaaaatccaggtcttccaggaaatccgtgtcttccagcaaatccacgtcttccaacaaagccatgtcttccatcaaattaatgtcttccagcctacttgtgtcttccaacaaaggtacgtcttccaacaaaggtacgtcttccaacaaaggtatgtcttccaacaaaggtacgtcttccagaaaatccacgtcttccaaccaagccatgtcttccagaaaatccacgtcttccagaaaatatatgtcttccaactaagctacgtcttccaacaaatccatgtcttcctatatctccaggtcttccagcatctccagggcttccagcatctgctcgtcttccaacatctccacgtcttccagcatctctgtgtcttccagcatcttcatgtcttccaacaactacccagtcttccatcaactggctcaatatccatgtcttccaacgtctccagtgtgctgatcttctgacattcaggtcttccagtgtctgcaatatccagggtttccgatggcacctgtgtcaaggtcttccaacaactccgggtcttccagcgacttcaagtcttccaataatctcaaggtcttccagataatcctgagcttccagaaaatccacatcttccagacaatccatgtcttccggacaatccatgtcttccaagaagctccaagtcttccagtaaatcaagtcttccagcaaatccagtcttccagcaattactggtcttccaccaaatccagatcttccaggaaaatccacgtcttccaggaaatccatgtcttccaataatttcaagtcttccaacaaagccatgtcttccagactatccatgtcttccagaaaatccttgtcttccctcaaatccatagcttccgaaaaatccaggtcttccaggaaatccgtgtcttccagcaaatccacgtcttccaacaaagccatgtcttccatcaaattaatgtcttccagcctacttgtgtcttccaacaaaggtacgtcttccaacaaaggtacgtcttccaacaaaggtatgtcttccaacaaaggtacgtcttccagaaaatccacgtcttccaaccaagccatgtcttccagaaaatccacgtcttccagaaaatatatgtcttccaactaagctacgtcttccaacaaatccatgtcttcctatatctccaggtcttccagcatctccagggcttccagcatctgctcgtcttccaacatctccacgtcttccagcatctctgtgtcttccagcatcttcatgtcttccaacaactacccagtcttccatcaactggctcaatatccatgtcttccaacgtctccagtgtgctgatcttctgacattcaggtcttccagtgtctgcaatatccagggtttccgatggcacctgtgtcaaggtcttccaacaactccgggtcttccagcgacttcaagtcttccaataatctcaaggtcttccagataatcctgagcttccagaaaatccacatcttccagacaannnagnnccggacaatccatg

SEQ ID NO: 366163 - DNA, 1483 bp, Homo sapiens
  misc_feature (62)..(62): n is a, c, g, or t
  misc_feature (65)..(65): n is a, c, g, or t
  misc_feature (67)..(67): n is a, c, g, or t
  misc_feature (71)..(71): n is a, c, g, or t
  misc_feature (74)..(74): n is a, c, g, or t
  misc_feature (77)..(79): n is a, c, g, or t
  misc_feature (103)..(103): n is a, c, g, or t
  misc_feature (1463)..(1465): n is a, c, g, or t
  misc_feature (1468)..(1469): n is a, c, g, or t
tacttttccacaggtcacaggtcttccaacgaactccgggtcttccagcgacttcaagtctnccngnaagngcncgnnntccaacaaagcctatgtcttccangactatccatgtcttccagaaaatccttgtcttccctcaaatccatagcttccgaaaaatccaggtcttccaggaaatccgtgtcttccagcaaatccacgtcttccaacaaagccatgtcttccatcaaattaatgtcttccagcctacttgtgtcttccaacaaaggtacgtcttccaacaaaggtacgtcttccaacaaaggtatgtcttccaacaaaggtacgtcttccagaaaatccacgtcttccaaccaagccatgtcttccagaaaatccacgtcttccagaaaatatatgtcttccaactaagctacgtcttccaacaaatccatgtcttcctatatctccaggtcttccagcatctccagggcttccagcatctgctcgtcttccaacatctccacgtcttccagcatctctgtgtcttccagcatcttcatgtcttccaacaactacccagtcttccatcaactggctcaatatccatgtcttccaacgtctccagtgtgctgatcttctgacattcaggtcttccagtgtctgcaatatccagggtttccgatggcacctgtgtcaaggtcttccaacaactccgggtcttccagcgacttcaagtcttccaataatctcaaggtcttccagataatcctgagcttccagaaaatccacatcttccagacaatccatgtcttccggacaatccatgtcttccaagaagctccaagtcttccagtaaatcaagtcttccagcaaatccagtcttccagcaattactggtcttccaccaaatccagatcttccaggaaaatccacgtcttccaggaaatccatgtcttccaataatttcaagtcttccaacaaagccatgtcttccagactatccatgtcttccagaaaatccttgtcttccctcaaatccatagcttccgaaaaatccaggtcttccaggaaatccgtgtcttccagcaaatccacgtcttccaacaaagccatgtcttccatcaaattaatgtcttccagcccaggtcttccagcatctccagggcttccagcatctgctcgtcttccaacatctccacgtcttccagcatctctgtgtcttccagcatcttcatgtcttccaacaactacccagtcttccatcaactggctcaatatccatgtcttccaacgtctccagtgtgctgatcttctgacattcaggtcttccagtgtctgcaatatccagggtttccgatggcacctgtgtcaaggtcttccaacaactccgggtcttccagcgacttcaagtcttccaataatctcaaggtcttccagataatcctgagcttccagaaaatccacatcttccagacaannnagnnccggacaatccatg

SEQ ID NO: 366164 - DNA, 804 bp, Homo sapiens
  misc_feature (784)..(786): n is a, c, g, or t
  misc_feature (789)..(790): n is a, c, g, or t
agctcggtacccactagtccacggttggctactccgggtcttccaggaaatccgtgtcttccagcaagtccacgtcttccaacaaagccatgtcttccagactatccatgtcttccagaaaatccttgtcttccctcaaatccatagcttccgaaaaatccaggtcttccaggaaatccgtgtcttccagcaaatccacgtcttccaacaaagccatgtcttccatcaaattaatgtcttccagcctacttgtgtcttccaacaaaggtacgtcttccaacaaaggtacgtcttccaacaaaggtatgtcttccaacaaaggtacgtcttccagaaaatccacgtcttccaaccaagccatgtcttccagaaaatccacgtcttccagaaaatatatgtcttccaactaagctacgtcttccaacaaatccatgtcttcctatatctccaggtcttccagcatctccagggcttccagcatctgctcgtcttccaacatctccacgtcttccagcatctctgtgtcttccagcatcttcatgtcttccaacaactacccagtcttccatcaactggctcaatatccatgtcttccaacgtctccagtgtgctgatcttctgacattcaggtcttccagtgtctgcaatatccagggtttccgatggcacctgtgtcaaggtcttccaacaactccgggtcttccagcgacttcaagtcttccaataatctcaaggtcttccagataatcctgagcttccagaaaatccacatcttccagacaannnagnnccggacaatccatg

SEQ ID NO: 366165 - DNA, 1718 bp, Homo sapiens
atgtttttggtccccctacatgacagctgtttatagataatgtctgcagtttctgtttgagagagataattatgacacttagcattggaaaactaagaagaacgtaagcaggtcagctatcagaagtcttcagactggagagattcctggagggggagtggccctttaatccatcagctgaagccatctggtaggacgctcgttgcagaaatggttagttctgaaatgttgtagctcagcaacatcactgaatgtcacagaattgacaggcacggagctaaaagggcctctagccacccccacaactccgctctacctctgtctccctaacacatgacttggaacaaatacactctaggtacaaagatggctacctgaagtttatgatccctactcatggagctgcttgaggacttcacattttttaaaaagctgctttgggcacccccattcctgaggagttttgtagcttggtttctctttgccacattacgtttgtaagactaacattttataaccataagcagttaggcctttttattttgagaaatttatctgtagcttccttttatttacacttggggactatttttaagtaaccgattgaaatatttttgtttctccattgcaagtgaaatccttgttgctaatcttttgccacatgtaaaattgttcacttgttatcaagcaggtagttcaatatctgtaattcttgagttcttttcaactagcatgatgctaggtgtcactcactgttttttaattgtgggagattgatgcgtcagtgcatgaagtggggggtggtcaccagcatctaactcaaagtgtgattatagctatcttaccacattttttttttctttctcactctgtcacccaggctggagtgcagtggtgtaatctcagctcactgcagcctcgacctcctgggctcaagcgatcctcctacctcagcctcccaaatagctgggaccacaggcgcatgccaccccactaagctaatttttctattttttgcagagacagggttttgccgtgttgcctaggttgttctcaaactcctgagctcaagcctgcctcagcctcccaaagtgctgggattacatgtgtgagccaccatgcctggccgtcactaatcttcaaggttaatatttggaggacccatccagagtccaaaggtggtcttcgagggatagcacgaggtggtctgacaggactaacacttaccagcctctatgcactatataataactgggagcacatgaaaggctccttgctccaacagtcactctgaagattttgccaactcatgaatggaggacacttcagtagtcatctagatccttttataagacagtttggagttattctctctcttctacctacaattagtttgaaaaattggagattttgatttgctgtgatgaaaatcctggatggctgaccaagactggcacttgttccagccattagtgagttgaagccaaagccctttggtgactcactgagtaccatggttctgttctcctctggagatcttgcacgtatctgttttcctcccccatgaactagaaaaccacttactcccagaattcaggtcgtgcttgttagtactatatcaccaagtccattcatttaatgatccaaaactgtaatgttgcactgtattccaaataaagggtaaaaacagaaccaaagttataactccaacacaaaaa

SEQ ID NO: 366166 - DNA, 744 bp, Homo sapiens
  misc_feature (733)..(733): n is a, c, g, or t
gcacattgccgcaaagcggaagtgtggcgcttaacgggaaccggcgcccggaaggtcagcgtgtgaagtaggcgctggcaacgcggggttacccgctgttattgaggagtaacggcccagcggaccacccaggcttgaggcagcggcgggaaccactcggtttgctgcgataccatggaaggaggcgggggaagcggcaacaaaaccacagggggattggccggctttttcggagccggcggagcaggttactcgcacgcggatttggctggcgtcccgctaactggtatgaaccctctgtctccttatttaaatgtggatccacgatacctcgtgcaggatacagatgagtttattttacctaccggagctaataaaacccggggcagatttgagctggccttctttacgattggaggatgttgcatgacaggggctgcgtttggtgcaatgaatggtcttcggctaggattgaaggaaacccagaacatggcctggtccaaaccaagaaatgtacagattttgaatatggtgactaggcaaggggcactttgggctaatactctaggttctctggctttgctctatagtgcatttggtgtcatcattgagaaaacacgaggtgcagaagatgaccttaacacagtagcagctggaaccatgacaggcatgttgtataaatgtacagaaacggggtttcaccatggtgcccaggctggtcttacaggtggtncttcgaggcaa

SEQ ID NO: 366167 - DNA, 936 bp, Homo sapiens
  misc_feature (935)..(935): n is a, c, g, or t
gcacattgccgcaaagcggaagtgtggcgcttaacgggaaccggcgcccggaaggtcagcgtgtgaagtaggcgctggcaacgcggggttacccgctgttattgaggagtaacggcccagcggaccacccaggcttgaggcagcggcgggaaccactcggtttgctgcgataccatggaaggaggcgggggaagcggcaacaaaaccacagggggattggccggctttttcggagccggcggagcaggttactcgcacgcggatttggctggcgtcccgcagtcaggacctcgttctgtcacccatattggggtgcggtggcatgattatagttcactgaagcctcgcactcctgagctcaaacaatcctcccctctaagcctcctaagtagctgggactctagtaactggtatgaaccctctgtctccttatttaaatgtggatccacgatacctcgtgcaggatacagatgagtttattttacctaccggagctaataaaacccggggcagatttgagctggccttctttacgattggaggatgttgcatgacaggggctgcgtttggtgcaatgaatggtcttcggctaggattgaaggaaacccagaacatggcctggtccaaaccaagaaatgtacagattttgaatatggtgactaggcaaggggcactttgggctaatactctaggttctctggctttgctctatagtgcatttggtgtcatcattgagaaaacacgaggtgcagaagatgaccttaacacagtagcagctggaaccatgacaggcatgttgtataaatgtacagctggagtgcagtggcgtgatctcggctagctacaacctccacctcccagccgcctgccttggcctcccaaagtgccgagattgcagcctctgcccggctgccaccccgtctgggaagtgaggng

SEQ ID NO: 366168 - DNA, 1324 bp, Homo sapiens
  misc_feature (1252)..(1254): n is a, c, g, or t
  misc_feature (1272)..(1272): n is a, c, g, or t
  misc_feature (1274)..(1274): n is a, c, g, or t
  misc_feature (1276)..(1276): n is a, c, g, or t
  misc_feature (1288)..(1288): n is a, c, g, or t
  misc_feature (1297)..(1297): n is a, c, g, or t
  misc_feature (1299)..(1299): n is a, c, g, or t
  misc_feature (1302)..(1304): n is a, c, g, or t
gcacattgccgcaaagcggaagtgtggcgcttaacgggaaccggcgcccggaaggtcagcgtgtgaagtaggcgctggcaacgcggggttacccgctgttattgaggagtaacggcccagcggaccacccaggcttgaggcagcggcgggaaccactcggtttgctgcgataccatggaaggaggcgggggaagcggcaacaaaaccacagggggattggccggctttttcggagccggcggagcaggttactcgcacgcggatttggctggcgtcccgctaactggtatgaaccctctgtctccttatttaaatgtggatccacgatacctcgtgcaggatacagatgagtttattttacctaccggagctaataaaacccggggcagatttgagctggccttctttacgattggaggatgttgcatgacaggggctgcgtttggtgcaatgaatggtcttcggctaggattgaaggaaacccagaacatggcctggtccaaaccaagaaatgtacagattttgaatatggtgactaggcaaggggcactttgggctaatactctaggttctctggctttgctctatagtgcatttggtgtcatcattgagaaaacacgaggtgcagaagatgaccttaacacagtagcagctggaaccatgacaggcatgttgtataaatgtacaggtggtcttcgagggatagcacgaggtggtctgacaggactaacacttaccagcctctatgcactatataataactgggagcacatgaaaggctccttgctccaacagtcactctgaagattttgccaactcatgaatggaggacacttcagtagtcatctagatccttttataagacagtttggagttattctctctcttctacctacaattagtttgaaaaattggagattttgatttgctgtgatgaaaatcctggatggctgaccaagactggcacttgttccagccattagtgagttgaagccaaagccctttggtgactcactgagtaccatggttctgttctcctctggagatcttgcacgtatctgttttcctcccccatgaactagaaaaccacttactcccagaattcaggtcgtgcttgttagtactatatcaccaagtccattcatttaatgatccaaaactgtaatgttgcactgtattccaaataaagggtaaaaacagaaccaaagttataactccaacacaaaaaaaaaaaaaaaaaaaaaaaaatttnnngggcgggcatagggcccnananagaaggtttctnaaaacccantncgnnnggggcgcggcgggcgcccca

SEQ ID NO: 366169 - DNA, 1384 bp, Homo sapiens
gcacattgccgcaaagcggaagtgtggcgcttaacgggaaccggcgcccggaaggtcagcgtgtgaagtaggcgctggcaacgcggggttacccgctgttattgaggagtaacggcccagcggaccacccaggcttgaggcagcggcgggaaccactcggtttgctgcgataccatggaaggaggcgggggaagcggcaacaaaaccacagggggattggccggctttttcggagccggcggagcaggttactcgcacgcggatttggctggcgtcccgctaactggtatgaaccctctgtctccttatttaaatgtggatccacgatacctcgtgcaggatacagatgagtttattttacctaccggagctaataaaacccggggcagatttgagctggccttctttacgattggaggatgttgcatgacaggggctgcgtttggtgcaatgaatggtcttcggctaggattgaaggaaacccagaacatggcctggtccaaaccaagaaatgtacagattttgaatatggtgactaggcaaggggcactttgggctaatactctaggttctctggctttgctctatagtgcatttggtgtcatcattgagaaaacacgaggtgcagaagatgaccttaacacagtagcagctggaaccatgacaggcatgttgtataaatgtacagacagggttttgccgtgttgcctaggttgttctcaaactcctgagctcaagcctgcctcagcctcccaaagtgctgggattacatgtgtgagccaccatgcctggccgtcactaatcttcaaggttaatatttggaggacccatccagagtccaaaggtggtcttcgagggatagcacgaggtggtctgacaggactaacacttaccagcctctatgcactatataataactgggagcacatgaaaggctccttgctccaacagtcactctgaagattttgccaactcatgaatggaggacacttcagtagtcatctagatccttttataagacagtttggagttattctctctcttctacctacaattagtttgaaaaattggagattttgatttgctgtgatgaaaatcctggatggctgaccaagactggcacttgttccagccattagtgagttgaagccaaagccctttggtgactcactgagtaccatggttctgttctcctctggagatcttgcacgtatctgttttcctcccccatgaactagaaaaccacttactcccagaattcaggtcgtgcttgttagtactatatcaccaagtccattcatttaatgatccaaaactgtaatgttgcactgtattccaaataaagggtaaaaacagaaccaaagttataactccaacacaaaaa

SEQ ID NO: 366170 - DNA, 1267 bp, Homo sapiens
gcacattgccgcaaagcggaagtgtggcgcttaacgggaaccggcgcccggaaggtcagcgtgtgaagtaggcgctggcaacgcggggttacccgctgttattgaggagtaacggcccagcggaccacccaggcttgaggcagcggcgggaaccactcggtttgctgcgataccatggaaggaggcgggggaagcggcaacaaaaccacagggggattggccggctttttcggagccggcggagcaggttactcgcacgcggatttggctggcgtcccgctaactggtatgaaccctctgtctccttatttaaatgtggatccacgatacctcgtgcaggatacagatgagtttattttacctaccggagctaataaaacccggggcagatttgagctggccttctttacgattggaggatgttgcatgacaggggctgcgtttggtgcaatgaatggtcttcggctaggattgaaggaaacccagaacatggcctggtccaaaccaagaaatgtacagattttgaatatggtgactaggcaaggggcactttgggctaatactctaggttctctggctttgctctatagtgcatttggtgtcatcattgagggcatgttgtataaatgtacagagacggggtttcaccatggtgcccaggctagtctcaaactcctgagctcaagcgatccaccctgccttggcctcccaagtattgggattacaggtggtcttcgagggatagcacgaggtggtctgacaggactaacacttaccagcctctatgcactatataataactgggagcacatgaaaggctccttgctccaacagtcactctgaagattttgccaactcatgaatggaggacacttcagtagtcatctagatccttttataagacagtttggagttattctctctcttctacctacaattagtttgaaaaattggagattttgatttgctgtgatgaaaatcctggatggctgaccaagactggcacttgttccagccattagtgagttgaagccaaagccctttggtgactcactgagtaccatggttctgttctcctctggagatcttgcacgtatctgttttcctcccccatgaactagaaaaccacttactcccagaattcaggtcgtgcttgttagtactatatcaccaagtccattcatttaatgatccaaaactgtaatgttgcactgtattccaaataaagggtaaaaacagaaccaaagttataactccaacacaaaaa

SEQ ID NO: 366171 - DNA, 1171 bp, Homo sapiens
gcacattgccgcaaagcggaagtgtggcgcttaacgggaaccggcgcccggaaggtcagcgtgtgaagtaggcgctggcaacgcggggttacccgctgttattgaggagtaacggcccagcggaccacccaggcttgaggcagcggcgggaaccactcggtttgctgcgataccatggaaggaggcgggggaagcggcaacaaaaccacagggggattggccggctttttcggagccggcggagcaggttactcgcacgcggatttggctggcgtcccgctaactggtatgaaccctctgtctccttatttaaatgtggatccacgatacctcgtgcaggatacagatgagtttattttacctaccggagctaatagggctgcgtttggtgcaatgaatggtcttcggctaggattgaaggaaacccagaacatggcctggtccaaaccaagaaatgtacagattttgaatatggtgactaggcaaggggcactttgggctaatactctaggttctctggctttgctctatagtgcatttggtgtcatcattgagaaaacacgaggtgcagaagatgaccttaacacagtagcagctggaaccatgacaggcatgttgtataaatgtacaggtggtcttcgagggatagcacgaggtggtctgacaggactaacacttaccagcctctatgcactatataataactgggagcacatgaaaggctccttgctccaacagtcactctgaagattttgccaactcatgaatggaggacacttcagtagtcatctagatccttttataagacagtttggagttattctctctcttctacctacaattagtttgaaaaattggagattttgatttgctgtgatgaaaatcctggatggctgaccaagactggcacttgttccagccattagtgagttgaagccaaagccctttggtgactcactgagtaccatggttctgttctcctctggagatcttgcacgtatctgttttcctcccccatgaactagaaaaccacttactcccagaattcaggtcgtgcttgttagtactatatcaccaagtccattcatttaatgatccaaaactgtaatgttgcactgtattccaaataaagggtaaaaacagaaccaaagttataactccaacacaaaaa

SEQ ID NO: 366172 - DNA, 1194 bp, Homo sapiens
gcacattgccgcaaagcggaagtgtggcgcttaacgggaaccggcgcccggaaggtcagcgtgtgaagtaggcgctggcaacgcggggttacccgctgttattgaggagtaacggcccagcggaccacccaggcttgaggcagcggcgggaaccactcggtttgctgcgataccatggaaggaggcgggggaagcggcaacaaaaccacagggggattggccggctttttcggagccggcggagcaggttactcgcacgcggatttggctggcgtcccgctaactggtatgaaccctctgtctccttatttaaatgtggatccacgatacctcgtgcaggatacagatgagtttattttacctaccggagctaataaaacccggggcagatttgagctggccttctttacgattggaggatgttgcatgacaggggctgcgtttggtgcaatgaatggtcttcggctaggattgaaggaaacccgattttgaatatggtgactaggcaaggggcactttgggctaatactctaggttctctggctttgctctatagtgcatttggtgtcatcattgagaaaacacgaggtgcagaagatgaccttaacacagtagcagctggaaccatgacaggcatgttgtataaatgtacaggtggtcttcgagggatagcacgaggtggtctgacaggactaacacttaccagcctctatgcactatataataactgggagcacatgaaaggctccttgctccaacagtcactctgaagattttgccaactcatgaatggaggacacttcagtagtcatctagatccttttataagacagtttggagttattctctctcttctacctacaattagtttgaaaaattggagattttgatttgctgtgatgaaaatcctggatggctgaccaagactggcacttgttccagccattagtgagttgaagccaaagccctttggtgactcactgagtaccatggttctgttctcctctggagatcttgcacgtatctgttttcctcccccatgaactagaaaaccacttactcccagaattcaggtcgtgcttgttagtactatatcaccaagtccattcatttaatgatccaaaactgtaatgttgcactgtattccaaataaagggtaaaaacagaaccaaagttataactccaacacaaaaa

SEQ ID NO: 366173 - DNA, 1117 bp, Homo sapiens
gcacattgccgcaaagcggaagtgtggcgcttaacgggaaccggcgcccggaaggtcagcgtgtgaagtaggcgctggcaacgcggggttacccgctgttattgaggagtaacggcccagcggaccacccaggcttgaggcagcggcgggaaccactcggtttgctgcgataccatggaaggaggcgggggaagcggcaacaaaaccacagggggattggccggctttttcggagccggcggagcaggttactcgcacgcggatttggctggcgtcccgctaactggtatgaaccctctgtctccttatttaaatgtggatccacgatacctcgtgcaggatacagatgagtttattttacctaccggagctaataaaacccggggcagatttgagctggccttctttacgattggaggatgttgcatgacaggggcactttgggctaatactctaggttctctggctttgctctatagtgcatttggtgtcatcattgagaaaacacgaggtgcagaagatgaccttaacacagtagcagctggaaccatgacaggcatgttgtataaatgtacaggtggtcttcgagggatagcacgaggtggtctgacaggactaacacttaccagcctctatgcactatataataactgggagcacatgaaaggctccttgctccaacagtcactctgaagattttgccaactcatgaatggaggacacttcagtagtcatctagatccttttataagacagtttggagttattctctctcttctacctacaattagtttgaaaaattggagattttgatttgctgtgatgaaaatcctggatggctgaccaagactggcacttgttccagccattagtgagttgaagccaaagccctttggtgactcactgagtaccatggttctgttctcctctggagatcttgcacgtatctgttttcctcccccatgaactagaaaaccacttactcccagaattcaggtcgtgcttgttagtactatatcaccaagtccattcatttaatgatccaaaactgtaatgttgcactgtattccaaataaagggtaaaaacagaaccaaagttataactccaacacaaaaa

SEQ ID NO: 366174 - DNA, 888 bp, Homo sapiens
gcacattgccgcaaagcggaagtgtggcgcttaacgggaaccggcgcccggaaggtcagcgtgtgaagtaggcgctggcaacgcggggttacccgctgttattgaggagtaacggcccagcggaccacccaggcttgaggcagcggcgggaaccactcggtttgctgcgataccatggaaggaggcgggggaagcggcaacaaaaccacagggggattggccggctttttcggagccggcggagcaggttactcgcacgcggatttggctggcgtcccgctaactggtatgaaccctctgtctccttatttaaatgtggatccacgatacctcgtgcaggatacagatgagtttattttacctaccggagctaataaaacccggggcagatttgagctggccttctttacgattggaggatgttgcatgacaggggctgcgtttggtgcaatgaatggtcttcggctaggattgaaggaaacccagaacatggcctggtccaaaccaagaaatgtacagattttgaatatggtgactaggcaaggggcactttgggctaatactctaggttctctggctttgctctatagtgcatttggtgtcatcattgagaaaacacgaggtgcagaagatgaccttaacacagtagcagctggaaccatgacaggcatgttgtataaatgtacaggtgagtactgttgaatggggagccatctcttaatatacttgaagtgcgctttttaaaattcatggttttcaaggaaattacactctgttgcagtataatctagtgttctaactttatggttattttggtttggtttggtttttaattgtggtaaaataaacataagatttacccatcttaaccatttttaagtatacagt

SEQ ID NO: 366175 - DNA, 630 bp, Homo sapiens
gcacattgccgcaaagcggaagtgtggcgcttaacgggaaccggcgcccggaaggtcagcgtgtgaagtaggcgctggcaacgcggggttacccgctgttattgaggagtaacggcccagcggaccacccaggcttgaggcagcggcgggaaccactcggtttgctgcgataccatggaaggaggcgggggaagcggcaacaaaaccacagggggattggccggctttttcggagccggcggagcaggttactcgcacgcggatttggctggcgtcccgctaactggtatgaaccctctgtctccttatttaaatgtggatccacgatacctcgtgcaggatacagatgagtttattttacctaccggagctaataaaacccggggcagatttgagctggccttctttacgattggaggatgttgcatgacaggggctgcgtttggtgcaatgaatggtcttcggctaggattgaaggaaacccaaaaccacttactcccagaattcaggtcgtgcttgttagtactatatcaccaagtccattcatttaatgatccaaaactgtaatgttgcactgtattccaaataaagggtaaaaacagaaccaaagttataactccaacacaaaaa

SEQ ID NO: 366176 - DNA, 169 bp, Homo sapiens
tttttttttaatatttacatttgtctttttctattaaataaaaatgaaaaagaatcagaagtgtagttatgcagatttgagtttgtttttttaatataaagctgtctttatctgggtgaattgttatgatttaccagggctgcgtttggtgcaatgaatggtcttcggc

SEQ ID NO: 366177 - DNA, 439 bp, Homo sapiens
caagactggcacttgttccagccattagtgagttgaagccaaagccctttggtgactcactgagtaccatggttctgttctcctctggagatcttgcacgtatctgttttcctcccccatgaactagaaaaccacttactcccagaattcaggtcgtgcttgttagtactatatcaccaagtccattcatttaatgatccaaaactgtaatgttgcactgtattccaaataaagggtaaaaacagaaccaaagttataactccaacacaaaaacaaacatagtggttgtctcaatttaaaagtatctacctgggtataaagtgaaaggtacccttggcattttttgtcccagtgggcaaaacaacatcttcgtgtttgtgttaaaatgagctacttggtggccgggtgtggtggctcacgcctgtaatccctgtacttt

SEQ ID NO: 366178 - DNA, 1270 bp, Homo sapiens
gcacattgccgcaaagcggaagtgtggcgcttaacgggaaccggcgcccggaaggtcagcgtgtgaagtaggcgctggcaacgcggggttacccgctgttattgaggagtaacggcccagcggaccacccaggcttgaggcagcggcgggaaccactcggtttgctgcgataccatggaaggaggcgggggaagcggcaacaaaaccacagggggattggccggctttttcggagccggcggagcaggttactcgcacgcggatttggctggcgtcccgctaactggtatgaaccctctgtctccttatttaaatgtggatccacgatacctcgtgcaggatacagatgagtttattttacctaccggagctaataaaacccggggcagatttgagctggccttctttacgattggaggatgttgcatgacaggggctgcgtttggtgcaatgaatggtcttcggctaggattgaaggaaacccagaacatggcctggtccaaaccaagaaatgtacagattttgaatatggtgactaggcaaggggcactttgggctaatactctaggttctctggctttgctctatagtgcatttggtgtcatcattgagaaaacacgaggtgcagaagatgaccttaacacagtagcagctggaaccatgacaggcatgttgtataaatgtacagtgtcagagatggctttggattccccgttctgtgtgctgctgtctggctcctgaacccagctgtagaggtgtgtgtcaatcccaactggtgaagtactgagaagaagctacacaaaaggcagcaaagtattagtaagtgtacctctgacattttaaccacctctgacttttccatggaatggacaagtagtagtctctgtcagagctacattttaaaggagaaaaagaaacgtgaagtcatgaactgtttatttatgctgttatttttgtgtttactcacctcatttatattgacttgtaaattagtaatttctgaactattatttatcaattcattgcctacatgtcagcaaacaaattttcttcttaataaagaatccagttgctgggcacaatggttcacacctgtaatctcagcacgttggagggcaaggcaggaggattccttggggctaggagttcacgaccagcctgggaatatagcaagattccatctctacaaaaaatgaaaacattggctgggcatgggggtccattcctaaagttcagggtacggggggctgatgttgagggtccctgaacc

SEQ ID NO: 366179 - DNA, 1228 bp, Homo sapiens
gcacattgccgcaaagcggaagtgtggcgcttaacgggaaccggcgcccggaaggtcagcgtgtgaagtaggcgctggcaacgcggggttacccgctgttattgaggagtaacggcccagcggaccacccaggcttgaggcagcggcgggaaccactcggtttgctgcgataccatggaaggaggcgggggaagcggcaacaaaaccacagggggattggccggctttttcggagccggcggagcaggttactcgcacgcggatttggctggcgtcccgctaactggtatgaaccctctgtctccttatttaaatgtggatccacgatacctcgtgcaggatacagatgagtttattttacctaccggagctaataaaacccggggcagatttgagctggccttctttacgattggaggatgttgcatgacaggggctgcgtttggtgcaatgaatggtcttcggctaggattgaaggaaacccagaacatggcctggtccaaaccaagaaatgtacagattttgaatatggtgactaggcaaggggcactttgggctaatactctaggttctctggctttgctctatagtgcatttggtgtcatcattgagaaaacacgaggtgcagaagatgaccttaacacagtagcagctggaaccatgacaggcatgttgtataaatgtacaggtggtcttcgagggatagcacgaggtggtctgacaggactaacacttaccagcctctatgcactatataataactgggagcacatgaaaggctccttgctccaacagtcactctgaagattttgccaactcatgaatggaggacacttcagtagtcatctagatccttttataagacagtttggagttattctctctcttctacctacaattagtttgaaaaattggagattttgatttgctgtgatgaaaatcctggatggctgaccaagactggcacttgttccagccattagtgagttgaagccaaagccctttggtgactcactgagtaccatggttctgttctcctctggagatcttgcacgtatctgttttcctcccccatgaactagaaaaccacttactcccagaattcaggtcgtgcttgttagtactatatcaccaagtccattcatttaatgatccaaaactgtaatgttgcactgtattccaaataaagggtaaaaacagaaccaaagttataactccaacacaaaaa

SEQ ID NO: 366180 - DNA, 1321 bp, Homo sapiens
gcacattgccgcaaagcggaagtgtggcgcttaacgggaaccggcgcccggaaggtcagcgtgtgaagtaggcgctggcaacgcggggttacccgctgttattgaggagtaacggcccagcggaccacccaggcttgaggcagcggcgggaaccactcggtttgctgcgataccatggaaggaggcgggggaagcggcaacaaaaccacagggggattggccggctttttcggagccggcggagcaggttactcgcacgcggatttggctggcgtcccgctaactggtatgaaccctctgtctccttatttaaatgtggatccacgatacctcgtgcaggatacagatgagtttattttacctaccggagctaataaaacccggggcagatttgagctggccttctttacgattggaggatgttgcatgacaggggctgcgtttggtgcaatgaatggtcttcggctaggattgaaggaaacccagaacatggcctggtccaaaccaagaaatgtacagattttgaatatggtgactaggcaaggggcactttgggctaatactctaggttctctggctttgctctatagtgcatttggtgtcatcattgagaaaacacgaggtgcagaagatgaccttaacacagtagcagctggaaccatgacaggcatgttgtataaatgtacagagacggggtttcaccatggtgcccaggctagtctcaaactcctgagctcaagcgatccaccctgccttggcctcccaagtattgggattacaggtggtcttcgagggatagcacgaggtggtctgacaggactaacacttaccagcctctatgcactatataataactgggagcacatgaaaggctccttgctccaacagtcactctgaagattttgccaactcatgaatggaggacacttcagtagtcatctagatccttttataagacagtttggagttattctctctcttctacctacaattagtttgaaaaattggagattttgatttgctgtgatgaaaatcctggatggctgaccaagactggcacttgttccagccattagtgagttgaagccaaagccctttggtgactcactgagtaccatggttctgttctcctctggagatcttgcacgtatctgttttcctcccccatgaactagaaaaccacttactcccagaattcaggtcgtgcttgttagtactatatcaccaagtccattcatttaatgatccaaaactgtaatgttgcactgtattccaaataaagggtaaaaacagaaccaaagttataactccaacacaaaaa

SEQ ID NO: 366181 - DNA, 1169 bp, Homo sapiens
gcacattgccgcaaagcggaagtgtggcgcttaacgggaaccggcgcccggaaggtcagcgtgtgaagtaggcgctggcaacgcggggttacccgctgttattgaggagtaacggcccagcggaccacccaggcttgaggcagcggcgggaaccactcggtttgctgcgataccatggaaggaggcgggggaagcggcaacaaaaccacagggggattggccggctttttcggagccggcggagcaggttactcgcacgcggatttggctggcgtcccgcgatacagatgagtttattttacctaccggagctaataaaacccggggcagatttgagctggccttctttacgattggaggatgttgcatgacaggggctgcgtttggtgcaatgaatggtcttcggctaggattgaaggaaacccagaacatggcctggtccaaaccaagaaatgtacagattttgaatatggtgactaggcaaggggcactttgggctaatactctaggttctctggctttgctctatagtgcatttggtgtcatcattgagaaaacacgaggtgcagaagatgaccttaacacagtagcagctggaaccatgacaggcatgttgtataaatgtacaggtggtcttcgagggatagcacgaggtggtctgacaggactaacacttaccagcctctatgcactatataataactgggagcacatgaaaggctccttgctccaacagtcactctgaagattttgccaactcatgaatggaggacacttcagtagtcatctagatccttttataagacagtttggagttattctctctcttctacctacaattagtttgaaaaattggagattttgatttgctgtgatgaaaatcctggatggctgaccaagactggcacttgttccagccattagtgagttgaagccaaagccctttggtgactcactgagtaccatggttctgttctcctctggagatcttgcacgtatctgttttcctcccccatgaactagaaaaccacttactcccagaattcaggtcgtgcttgttagtactatatcaccaagtccattcatttaatgatccaaaactgtaatgttgcactgtattccaaataaagggtaaaaacagaaccaaagttataactccaacacaaaaa

SEQ ID NO: 366182 - DNA, 861 bp, Homo sapiens
aattcggcacgatgaccaatctgaagtgggagctggccttctttacgattggaggatgttgcatgagggctgcgtttggtgcaatgaatggtcttcggctaggattgaaggaaacccagaacatggcctggtccaaaccaagaaatgtacagattttgaatatggtgactaggcaaggggcactttgggctaatactctaggttctctggctttgctctatagtgcatttggtgtcatcattgagaaaacacgaggtgcagaagatgaccttaacacagtagcagctggaaccatgacaggcatgttgtataaatgtacaggtggtcttcgagggatagcacgaggtggtctgacaggactaacacttaccagcctctatgcactatataataactgggagcacatgaaaggctccttgctccaacagtcactctgaagattttgccaactcatgaatggaggacacttcagtagtcatctagatccttttataagacagtttggagttattctctctcttctacctacaattagtttgaaaaattggagattttgatttgctgtgatgaaaatcctggatggctgaccaagactggcacttgttccagccattagtgagttgaagccaaagccctttggtgactcactgagtaccatggttctgttctcctctggagatcttgcacgtatctgttttcctcccccatgaactagaaaaccacttactcccagaattcaggtcgtgcttgttagtactatatcaccaagtccattcatttaatgatccaaaactgtaatgttgcactgtattccaaataaagggtaaaaacagaaccaaagttataactccaacacaaaaa

SEQ ID NO: 366183 - DNA, 1169 bp, Homo sapiens
gcacattgccgcaaagcggaagtgtggcgcttaacgggaaccggcgcccggaaggtcagcgtgtgaagtaggcgctggcaacgcggggttacccgctgttattgaggagtaacggcccagcggaccacccaggcttgaggcagcggcgggaaccactcggtttgctgcgataccatggaaggaggcgggggaagcggcaacaaaaccacagggggattggccggctttttcggagccggcggagcaggttactcgcacgcggatttggctggcgtcccgctaactggtatgaaccctctgtctccttatttaaatgtggatccacgatacctcgtgcaggatacagatgagtttattttacctaccggagctaataaaacccggggcagatttgagctggccttctttacgattggaggatgttgcatgacaggggctgcgtttggtgcaatgaatggtcttcggctaggattgaaggaaacccagaacatggcctggtccaaaccaagaaatgtacactttgctctatagtgcatttggtgtcatcattgagaaaacacgaggtgcagaagatgaccttaacacagtagcagctggaaccatgacaggcatgttgtataaatgtacaggtggtcttcgagggatagcacgaggtggtctgacaggactaacacttaccagcctctatgcactatataataactgggagcacatgaaaggctccttgctccaacagtcactctgaagattttgccaactcatgaatggaggacacttcagtagtcatctagatccttttataagacagtttggagttattctctctcttctacctacaattagtttgaaaaattggagattttgatttgctgtgatgaaaatcctggatggctgaccaagactggcacttgttccagccattagtgagttgaagccaaagccctttggtgactcactgagtaccatggttctgttctcctctggagatcttgcacgtatctgttttcctcccccatgaactagaaaaccacttactcccagaattcaggtcgtgcttgttagtactatatcaccaagtccattcatttaatgatccaaaactgtaatgttgcactgtattccaaataaagggtaaaaacagaaccaaagttataactccaacacaaaaa

SEQ ID NO: 366184 - DNA, 1133 bp, Homo sapiens
gcacattgccgcaaagcggaagtgtggcgcttaacgggaaccggcgcccggaaggtcagcgtgtgaagtaggcgctggcaacgcggggttacccgctgttattgaggagtaacggcccagcggaccacccaggcttgaggcagcggcgggaaccactcggtttgctgcgataccatggaaggaggcgggggaagcggcaacaaaaccacagggggattggccggctttttcggagccggcggagcaggttactcgcacgcggatttggctggcgtcccgctaactggtatgaaccctctgtctccttatttaaatgtggatccacgatacctcgtgcaggatacagatgagtttattttacctaccggagctaataaaacccggggcagatttgagctggccttctttacgattggaggatgttgcatgacaggggctgcgtttggtgcaatgaatggtcttcggctaggattgaaggaaacccagaacatggcctggtccaaaccaagaaatgtacagattttgaatatggtgactaggcaaggggcactttgggctaatactctaggttctctggctttgctctatagtgcatttggtgtcatcattgagaaaacacgaggtgcagaagatgaccttaacacagtagcagctggaaccatgacaggcatgttgtataaatgtacagacagggttttgccgtgttgcctaggttgttctcaaactcctgagctcaagcctgcctcagcctcccaaagtgctgggattacatgtgtgagccaccatgcctggccgtcactaatcttcaaggttaatatttggaggacccatccagagtccaaaggttgttaatactctttccaaatagggtgtcaccttgtttacattacagacttaaatccattgacagtgctagtggagttctaaatcatattactagcaggaaacgactgttctagttggaactccgtaataaactgccataggaacaaattggaaagtagggggaaaaaaattatgaatatgaaaatgttaagtcatatgtattacacaagtggtattactttaaaaacgttgtctcctttttgagatggaatattgatttatttttaaaatggtctctccatttcata

SEQ ID NO: 366185 - DNA, 872 bp, Homo sapiens
gcacattgccgcaaagcggaagtgtggcgcttaacgggaaccggcgcccggaaggtcagcgtgtgaagtaggcgctggcaacgcggggttacccgctgttattgaggagtaacggcccagcggaccacccaggcttgaggcagcggcgggaaccactcggtttgctgcgataccatggaaggaggcgggggaagcggcaacaaaaccacagggggattggccggctttttcggagccggcggagcaggttactcgcacgcggatttggctggcgtcccgctaactggtatgaaccctctgtctccttatttaaatgtggatccacgatacctcgtgcaggatacagatgagtttattttacctaccggagctaataaaacccggggcagatttgagctggccttctttacgattggaggatgttgcatgacaggggctgcgtttggtgcaatgaatggtcttcggctaggattgaaggaaacccagaacatggcctggtccaaaccaagaaatgtacagtaagtctcttgtaaccatctgatgtagtgatacttgaatattaagctctgttgtattggtttgatgagtacaaccttgagattacagatggttagcatagttatgtgcttttttgtctttgttttttaatcttaatcaaaataaaagcaactaaggaatcagattactgactctaagcttttaaaaaggagtgatttttttaatcagtgtccctcagtcagctagtgctatgccagcctgacttctcagctgcacctgttacattctccaaccctatgtgacttgcttttcaaattgttgagttgctaatgggaattttggattgtttgggggcatgcagatccataggaaat

SEQ ID NO: 366186 - DNA, 714 bp, Homo sapiens
tgaaaaggagccagtcttgcaaacagccgggcaaagagtgagcaagagttttttgggaagaggtgcacacagcaagtgctgagacccagaggaaggaaggggcttgtctgctgaaggacccaggtgccctgggagaggtagccagaggcgcttagtaagcttcaatcaggattttaatcttaatatagtgctgagggttttaagcagaagagtgatagaagagagttagcttttgtgcaagcactattattcatggaagtcccctttcgatggggtagtggggactcctcactaagctgtccttctatctctgtggctgtctcagagaagcactgtggaactccagggtgctacgtagctcaccacggtgacccccaatgcaggccacttacagaagcttgaagatctgtgatttgctcacccaggctcccatgccgagtgttcttgtcattaactcaaaagccaaatgctgttatttctgttcttacttgcttgattgtttgtttaccagttctcaacatcttcagtgtccacttggttactaaaatgtttactccttagcccggtgtgtaggcatgtgcctgtaatcccagctactcaggaggctgaggcagaagaatctcttgaacctgggaggtagagattgaagtgagccaagattgtgccactgcaatccagcctgggcaacacagcgggactctgtctccaaagaaa

SEQ ID NO: 366187 - DNA, 461 bp, Homo sapiens
atatgtagagcacaaatgtgcagacttgtttagggaatagaaagaatttttgtttggtttcagagtggagtgcttagagttactgtgacagataaaactggagaaatacatcagaccaggtcctaatgccacaccaagtaaggagttctgtgttctggtgacttcataacagattgaattctgcgaaatcacagaggtttgcactagttaagccaaatgggagaactgaacaagatgcatggatgtatttagatgactagcaactcaacagaagagactagagctagcctctggtttcaactgagtttcagaggagaaatatctgggccaacctgactaggatgctagcaaacttttgaattcagcatataatttatcttgtaaatgtgactattttagaaaaaacaaaatacatttgtggagagcaccacacaattaacttcattcagatttggcatttg

SEQ ID NO: 366188 - DNA, 1397 bp, Homo sapiens
tcggaaaggaaagctgtgggaccatcctggcaaccccggtgtttggctgggttctagcgtagccgtctgtgtggccggtgggggacctgcggtcggagtgggagggccagtctgcacccaagaggtggaagaggacgggctttaggctggaagcgccttagaggagccatttttccaggtggggccccaggcagaggctccgacagggagcctggccatagtcgcgcagccggggaggtggagcgcgtcccagacccgagcccccgacctcagccaaacccattccttctgtccttggaggccagaggggactctgagcatcggaaaggatgcctggtttgcttttatgtgaaccgacagagctttacaacatcctgaatcaggccacaaaactctccagattaacagaccccaactatctctgtttattggatgtccgttccaaatgggagtatgacgaaagccatgtgatcactgcccttcgagtgaagaagaaaaataatgaatatcttctcccggagtctgtggacctggagtgtgtgaagtactgcgtggtgtatgataacaacagcagcaccctggagatactcttaaaagatgatgatgatgattcagactctgatggtgatggcaaagatcttgtgcctcaagcagccattgagtatggcaggatcctgacccgcctcacccaccaccccgtctacatcctgaaagggggctatgagcgcttctcaggcacgtaccactttctccggacccagaagatcatctggatgcctcaggaactggatgcatttcagccataccccattgaaatcgtgccagggaaggtcttcgttggcaatttcagtcaagcctgtgaccccaagattcagaaggacttgaaaatcaaagcccatgtcaatgtctccatggatacagggcccttttttgcaggcgatgctgacaagcttctgcacatccggatagaagattccccggaagcccagattcttcccttcttacgccacatgtgtcacttcattgaaattcaccatcaccttggctctgtcattctgatcttttccacccagggtatcagccgcagttgtgccgccatcatagcctacctcatgcatagtaacgagcagaccttgcagaggtcctgggcctatgtcaagaagtgcaaaaacaacatgtgtccaaatcggggattggtgagccagctgctggaatgggagaagactatccttggagattccatcacaaacatcatggatccgctctactgatcttctccgaggcccaccgaagggtactgaagagcctcacctgggggcattttgtgggtggagggccagagtgtgtatacccaggcttgtctggaaggagaaggcctttgctgcctgaaagtctca

SEQ ID NO: 366189 - DNA, 1101 bp, Homo sapiens
tcggaaaggaaagctgtgggaccatcctggcaaccccggtgtttggctgggttctagcgtagccgtctgtgtggccggtgggggacctgcggtcggagtgggagggccagtctgcacccaagaggtggaagaggacgggctttaggctggaagcgccttagaggagccatttttccaggatgcctggtttgcttttatgtgaaccgacagagctttacaacatcctgaatcaggccacaaaactctccagattaacagaccccaactatctctgtttattggatgtccgttccaaatgggagtatgacgaaagccatgtgatcactgcccttcgagtgaagaagaaaaataatgaatatcttctcccggagtctgtggacctggagtgtgtgaagtactgcgtggtgtatgataacaacagcagcaccctggagatactcttaaaagatgatgatgatgattcagactctgatggtgatggcaaaggaactggatgcatttcagccataccccattgaaatcgtgccagggaaggtcttcgttggcaatttcagtcaagcctgtgaccccaagattcagaaggacttgaaaatcaaagcccatgtcaatgtctccatggatacagggcccttttttgcaggcgatgctgacaagcttctgcacatccggatagaagattccccggaagcccagattcttcccttcttacgccacatgtgtcacttcattgaaattcaccatcaccttggctctgtcattctgatcttttccacccagggtatcagccgcagttgtgccgccatcatagcctacctcatgcatagtaacgagcagaccttgcagaggtcctgggcctatgtcaagaagtgcaaaaacaacatgtgtccaaatcggggattggtgagccagctgctggaatgggagaagactatccttggagattccatcacaaacatcatggatccgctctactgatcttctccgaggcccaccgaagggtactgaagagcctcacctgggggcattttgtgggtggagggccagagtgtgtatacccaggcttgtctggaaggagaaggcctttgctgcctgaaagtctca

SEQ ID NO: 366190 - DNA, 709 bp, Homo sapiens
tcggaaaggaaagctgtgggaccatcctggcaaccccggtgtttggctgggttctagcgtagccgtctgtgtggccggtgggggacctgcggtcggagtgggagggccagtctgcacccaagaggtggaagaggacgggctttaggctggaagcgccttagaggagccatttttccaggatgcctggtttgcttttatgtgaaccgacagagctttacaacatcctgaatcaggccacaaaactctccagattaacagaccccaactatctctgtttattggatgtccgttccaaatgggagtatgacgaaagccatgtgatcactgcccttcgagtgaagaagaaaaataatgaatatcttctcccggagtctgtggacctggagtgtgtgaagtactgcgtggtgtatgataacaacagcagcaccctggagatactcttaaaagatgatgatgatgattcagactctgatggtgatggcaaagatcttgtgcctcaagcagccattgagtatggcaggatcctgacccgcctcacccaccaccccgtctacatcctgaaagggggctatgagcgcttctcaggcacgtaccactttctccggacccagaagatcatctggatgcctcagaagagacgaggtttcaccgtgttagccaggatggtctcgatctcctgacctcgtgatccgcccacctcagcctccca

SEQ ID NO: 366191 - DNA, 660 bp, Homo sapiens
tcggaaaggaaagctgtgggaccatcctggcaaccccggtgtttggctgggttctagcgtagccgtctgtgtggccggtgggggacctgcggtcggagtgggagggccagtctgcacccaagaggtggaagaggacgggctttaggctggaagcgccttagaggagccatttttccaggtggggccccaggcagaggctccgacagggagcctggccatagtcgcgcagccggggaggtggagcgcgtcccagacccgagcccccgacctcagccaaacccattccttctgtccttggaggccagaggggactctgagcatcggaaaggtagggtcagggaggctgagagtccttaggcggggtgggaggaaggggccatctcctcagatccgggccgtcgtttcccaagttgcagagacccttgggttcaggtttagtgacaccactgctgataatggcgacctccagccctgcaagctttagaggaccactattctgtgttccagatgagcaaataggttgtagggacaacaacttccgtggtcatacagttcctgtcttctctcgcctgcccggcagtgctctgacggtcccactgtttctgctttacgaataaagacactgtggctgaggccaagtggatttgtagagtttaaaaa

SEQ ID NO: 366192 - DNA, 1247 bp, Homo sapiens
tcggaaaggaaagctgtgggaccatcctggcaaccccggtgtttggctgggttctagcgtagccgtctgtgtggccggtgggggacctgcggtcggagtgggagggccagtctgcacccaagaggtggaagaggacgggctttaggctggaagcgccttagaggagccatttttccaggatgcctggtttgcttttatgtgaaccgacagagctttacaacatcctgaatcaggccacaaaactctccagattaacagaccccaactatctctgtttattggatgtccgttccaaatgggagtatgacgaaagccatgtgatcactgcccttcgagtgaagaagaaaaataatgaatatcttctcccggagtctgtggacctggagtgtgtgaagtactgcgtggtgtatgataacaacagcagcaccctggagatactcttaaaagatgatgatgatgattcagactctgatggtgatggcaaagatcttgtgcctcaagcagccattgagtatggcaggatcctgacccgcctcacccaccaccccgtctacatcctgaaagggggctatgagcgcttctcaggcacgtaccactttctccggacccagaagatcatctggatgcctcaggaactggatgcatttcagccataccccattgaaatcgtgccagggaaggtcttcgttggcaatttcagtcaagcctgtgaccccaagattcagaaggacttgaaaatcaaagcccatgtcaatgtctccatggatacagggcccttttttgcaggcgatgctgacaagcttctgcacatccggatagaagattccccggaagcccagattcttcccttcttacgccacatgtgtcacttcattgaaattcaccatcaccttggctctgtcattctgatcttttccacccagggtatcagccgcagttgtgccgccatcatagcctacctcatgcatagtaacgagcagaccttgcagaggtcctgggcctatgtcaagaagtgcaaaaacaacatgtgtccaaatcggggattggtgagccagctgctggaatgggagaagactatccttggagattccatcacaaacatcatggatccgctctactgatcttctccgaggcccaccgaagggtactgaagagcctcacctgggggcattttgtgggtggagggccagagtgtgtatacccaggcttgtctggaaggagaaggcctttgctgcctgaaagtctca

SEQ ID NO: 366193 - DNA, 1289 bp, Homo sapiens
tcggaaaggaaagctgtgggaccatcctggcaaccccggtgtttggctgggttctagcgtagccgtctgtgtggccggtgggggacctgcggtcggagtgggagggccagtctgcacccaagaggtggaagaggacgggctttaggctggaagcgccttagaggagccatttttccaggtggggccccaggcagaggctccgacagggagcctggccatagtcgcgcagccggggaggtggagcgcgtcccagacccgagcccccgacctcagccaaacccattccttctgtccttggaggccagaggggactctgagcatcggaaaggatgcctggtttgcttttatgtgaaccgacagagctttacaacatcctgaatcaggccacaaaactctccagattaacagaccccaactatctctgtttattggatgtccgttccaaatgggagtatgacgaaagccatgtgatcactgcccttcgagtgaagaaggggctgaactactttacattcccaccaacagtatatcttgtgcctcaagcagccattgagtatggcaggatcctgacccgcctcacccaccaccccgtctacatcctgaaagggggctatgagcgcttctcaggcacgtaccactttctccggacccagaagatcatctggatgcctcaggaactggatgcatttcagccataccccattgaaatcgtgccagggaaggtcttcgttggcaatttcagtcaagcctgtgaccccaagattcagaaggacttgaaaatcaaagcccatgtcaatgtctccatggatacagggcccttttttgcaggcgatgctgacaagcttctgcacatccggatagaagattccccggaagcccagattcttcccttcttacgccacatgtgtcacttcattgaaattcaccatcaccttggctctgtcattctgatcttttccacccagggtatcagccgcagttgtgccgccatcatagcctacctcatgcatagtaacgagcagaccttgcagaggtcctgggcctatgtcaagaagtgcaaaaacaacatgtgtccaaatcggggattggtgagccagctgctggaatgggagaagactatccttggagattccatcacaaacatcatggatccgctctactgatcttctccgaggcccaccgaagggtactgaagagcctcacctgggggcattttgtgggtggagggccagagtgtgtatacccaggcttgtctggaaggagaaggcctttgctgcctgaaagtctca

SEQ ID NO: 366194 - DNA, 1057 bp, Homo sapiens
tcggaaaggaaagctgtgggaccatcctggcaaccccggtgtttggctgggttctagcgtagccgtctgtgtggccggtgggggacctgcggtcggagtgggagggccagtctgcacccaagaggtggaagaggacgggctttaggctggaagcgccttagaggagccatttttccaggatgcctggtttgcttttatgtgaaccgacagagctttacaacatcctgaatcaggccacaaaactctccagattaacagaccccaactatctctgtttattggatgtccgttccaaatgggagtatgacgaaagccatgtgatcactgcccttcgagtgaagaagatcttgtgcctcaagcagccattgagtatggcaggatcctgacccgcctcacccaccaccccgtctacatcctgaaagggggctatgagcgcttctcaggcacgtaccactttctccggacccagaagatcatctggatgcctcaggaactggatgcatttcagccataccccattgaaatcgtgccagggaaggtcttcgttggcaatttcagtcaagcctgtgaccccaagattcagaaggacttgaaaatcaaagcccatgtcaatgtctccatggatacagggcccttttttgcaggcgatgctgacaagcttctgcacatccggatagaagattccccggaagcccagattcttcccttcttacgccacatgtgtcacttcattggtatcagccgcagttgtgccgccatcatagcctacctcatgcatagtaacgagcagaccttgcagaggtcctgggcctatgtcaagaagtgcaaaaacaacatgtgtccaaatcggggattggtgagccagctgctggaatgggagaagactatccttggagattccatcacaaacatcatggatccgctctactgatcttctccgaggcccaccgaagggtactgaagagcctcacctgggggcattttgtgggtggagggccagagtgtgtatacccaggcttgtctggaaggagaaggcctttgctgcctgaaagtctca

SEQ ID NO: 366195 - DNA, 221 bp, Homo sapiens
ctgatccaagtggaaagggcccaggaccaatcgtgaagttcactttctctctttgtattcatagaggtcctgggcctatgtcaagaagtgcaaaaacaacatgtgtccaaatcggggattggtgagccagctgctggaatgggagaagactatccttggagattccatcacaaacatcatggatccgctctactgatcttctccgaggcccaccgaagggt

SEQ ID NO: 366196 - DNA, 959 bp, Homo sapiens
tcggaaaggaaagctgtgggaccatcctggcaaccccggtgtttggctgggttctagcgtagccgtctgtgtggccggtgggggacctgcggtcggagtgggagggccagtctgcacccaagaggtggaagaggacgggctttaggctggaagcgccttagaggagccatttttccaggatgcctggtttgcttttatgtgaaccgacagagctttacaacatcctgaatcaggccacaaaactctccagattaacagaccccaactatctctgtttattggatgtccgttccaaatgggagtatgacgaaagccatgtgatcactgcccttcgagtgaagaaggaactggatgcatttcagccataccccattgaaatcgtgccagggaaggtcttcgttggcaatttcagtcaagcctgtgaccccaagattcagaaggacttgaaaatcaaagcccatgtcaatgtctccatggatacagggcccttttttgcaggcgatgctgacaagcttctgcacatccggatagaagattccccggaagcccagattcttcccttcttacgccacatgtgtcacttcattgaaattcaccatcaccttggctctgtcattctgatcttttccacccagggtatcagccgcagttgtgccgccatcatagcctacctcatgcatagtaacgagcagaccttgcagaggtcctgggcctatgtcaagaagtgcaaaaacaacatgtgtccaaatcggggattggtgagccagctgctggaatgggagaagactatccttggagattccatcacaaacatcatggatccgctctactgatcttctccgaggcccaccgaagggtactgaagagcctcacctgggggcattttgtgggtggagggccagagtgtgtatacccaggcttgtctggaaggagaaggcctttgctgcctgaaagtctca

SEQ ID NO: 366197 - DNA, 1134 bp, Homo sapiens
tcggaaaggaaagctgtgggaccatcctggcaaccccggtgtttggctgggttctagcgtagccgtctgtgtggccggtgggggacctgcggtcggagtgggagggccagtctgcacccaagaggtggaagaggacgggctttaggctggaagcgccttagaggagccatttttccaggatgcctggtttgcttttatgtgaaccgacagagctttacaacatcctgaatcaggccacaaaactctccagattaacagaccccaactatctctgtttattggatgtccgttccaaatgggagtatgacgaaagccatgtgatcactgcccttcgagtgaagaagaaaaataatgaatatcttctcccggagtctgtggacctggagtgtgtgaagtactgcgtggtgtatgataacaacagcagcaccctggagatactcttaaaagatgatgatgatgattcagactctgatggtgatggcaaagatcttgtgcctcaagcagccattgagtatggcaggatcctgacccgcctcacccaccaccccgtctacatcctgaaagggggctatgagcgcttctcaggcacgtaccactttctccggacccagaagatcatctggatgcctcaggaactggatgcatttcagccataccccattgaaatcgtgccagggaaggtcttcgttggcaatttcagtcaagcctgtgaccccaagattcagaaggacttgaaaatcaaagcccatgtcaatgtctccatggatacagggcccttttttgcaggcgatgctgacaagcttctgcacatccggatagaagattccccggaagcccagattcttcccttcttacgccacatgtgtcacttcattgaggtcctgggcctatgtcaagaagtgcaaaaacaacatgtgtccaaatcggggattggtgagccagctgctggaatgggagaagactatccttggagattccatcacaaacatcatggatccgctctactgatcttctccgaggcccaccgaagggtactgaagagcctcacctgggggcattttgtgggtggagggccagagtgtgtatacccaggcttgtctggaaggagaaggcctttgctgcctgaaagtctca

SEQ ID NO: 366198 - DNA, 988 bp, Homo sapiens
tcggaaaggaaagctgtgggaccatcctggcaaccccggtgtttggctgggttctagcgtagccgtctgtgtggccggtgggggacctgcggtcggagtgggagggccagtctgcacccaagaggtggaagaggacgggctttaggctggaagcgccttagaggagccatttttccaggatgcctggtttgcttttatgtgaaccgacagagctttacaacatcctgaatcaggccacaaaactctccagattaacagaccccaactatctctgtttattggatgtccgttccaaatgggagtatgacgaaagccatgtgatcactgcccttcgagtgaagaagaaaaataatgaatatcttctcccggagtctgtggacctggagtgtgtgaagtactgcgtggtgtatgataacaacagcagcaccctggagatactcttaaaagatgatgatgatgattcagactctgatggtgatggcaaaggaactggatgcatttcagccataccccattgaaatcgtgccagggaaggtcttcgttggcaatttcagtcaagcctgtgaccccaagattcagaaggacttgaaaatcaaagcccatgtcaatgtctccatggatacagggcccttttttgcaggcgatgctgacaagcttctgcacatccggatagaagattccccggaagcccagattcttcccttcttacgccacatgtgtcacttcattgaggtcctgggcctatgtcaagaagtgcaaaaacaacatgtgtccaaatcggggattggtgagccagctgctggaatgggagaagactatccttggagattccatcacaaacatcatggatccgctctactgatcttctccgaggcccaccgaagggtactgaagagcctcacctgggggcattttgtgggtggagggccagagtgtgtatacccaggcttgtctggaaggagaaggcctttgctgcctgaaagtctca

SEQ ID NO: 366199 - DNA, 1199 bp, Homo sapiens
tcggaaaggaaagctgtgggaccatcctggcaaccccggtgtttggctgggttctagcgtagccgtctgtgtggccggtgggggacctgcggtcggagtgggagggccagtctgcacccaagaggtggaagaggacgggctttaggctggaagcgccttagaggagccatttttccaggatgcctggtttgcttttatgtgaaccgacagagctttacaacatcctgaatcaggccacaaaactctccagattaacagaccccaactatctctgtttattggatgtccgttccaaatgggagtatgacgaaagccatgtgatcactgcccttcgagtgaagaagaaaaataatgaatatcttctcccggagtctgtggacctggagtgtgtgaagtactgcgtggtgtatgataacaacagcagcaccctggagatactcttaaaagatgatgatgatgattcagactctgatggtgatggcaaagatcttgtgcctcaagcagccattgagtatggcaggatcctgacccgcctcacccaccaccccgtctacatcctgaaagggggctatgagcgcttctcaggcacgtaccactttctccggacccagaagatcatctggatgcctcaggaactggatgcatttcagccataccccattgaaatcgtgccagggaaggtcttcgttggcaatttcagtcaagcctgtgaccccaagattcagaaggacttgaaaatcaaagcccatgtcaatgtctccatggatacagggcccttttttgcaggcgatgctgacaagcttctgcacatccggatagaagattccccggaagcccagattcttcccttcttacgccacatgtgtcacttcattggtatcagccgcagttgtgccgccatcatagcctacctcatgcatagtaacgagcagaccttgcagaggtcctgggcctatgtcaagaagtgcaaaaacaacatgtgtccaaatcggggattggtgagccagctgctggaatgggagaagactatccttggagattccatcacaaacatcatggatccgctctactgatcttctccgaggcccaccgaagggtactgaagagcctcacctgggggcattttgtgggtggagggccagagtgtgtatacccaggcttgtctggaaggagaaggcctttgctgcctgaaagtctca

SEQ ID NO: 366200 - DNA, 1255 bp, Homo sapiens
tcggaaaggaaagctgtgggaccatcctggcaaccccggtgtttggctgggttctagcgtagccgtctgtgtggccggtgggggacctgcggtcggagtgggagggccagtctgcacccaagaggtggaagaggacgggctttaggctggaagcgccttagaggagccatttttccaggtggggccccaggcagaggctccgacagggagcctggccatagtcgcgcagccggggaggtggagcgcgtcccagacccgagcccccgacctcagccaaacccattccttctgtccttggaggccagaggggactctgagcatcggaaaggatgcctggtttgcttttatgtgaaccgacagagctttacaacatcctgaatcaggccacaaaactctccagattaacagaccccaactatctctgtttattggatgtccgttccaaatgggagtatgacgaaagccatgtgatcactgcccttcgagtgaagaagatcttgtgcctcaagcagccattgagtatggcaggatcctgacccgcctcacccaccaccccgtctacatcctgaaagggggctatgagcgcttctcaggcacgtaccactttctccggacccagaagatcatctggatgcctcaggaactggatgcatttcagccataccccattgaaatcgtgccagggaaggtcttcgttggcaatttcagtcaagcctgtgaccccaagattcagaaggacttgaaaatcaaagcccatgtcaatgtctccatggatacagggcccttttttgcaggcgatgctgacaagcttctgcacatccggatagaagattccccggaagcccagattcttcccttcttacgccacatgtgtcacttcattgaaattcaccatcaccttggctctgtcattctgatcttttccacccagggtatcagccgcagttgtgccgccatcatagcctacctcatgcatagtaacgagcagaccttgcagaggtcctgggcctatgtcaagaagtgcaaaaacaacatgtgtccaaatcggggattggtgagccagctgctggaatgggagaagactatccttggagattccatcacaaacatcatggatccgctctactgatcttctccgaggcccaccgaagggtactgaagagcctcacctgggggcattttgtgggtggagggccagagtgtgtatacccaggcttgtctggaaggagaaggcctttgctgcctgaaagtctca

SEQ ID NO: 366201 - DNA, 789 bp, Homo sapiens
ggctggagtgcagtggcatagtcatagctcactgcagcctcgatttcctgggatcaaaccatcctcccacctcagcctccggagtggctggaactgcaagcatgaggccccacgcctgttcgctcccaggaccccgggcagcggcgggtgctggaccgggctgcccggcagcgtcgcatcaaccggcagctggaggccctggagaatgacaacttccaggatgacccccacgcgggactccctcagctcggcaagagactgcctcagtttgatgacgatgcggacactggaaagaaaaagaagaaaacccgaggtgatcattttaaacttcgcttccgaaaaaactttcaggccctgttggaggagcagaacttgagtgtggccgagggccctaactacctgacggcctgtgcgggacccccatcgcggccccagcgccccttctgtgctgtctgtggcttcccatccccctacacctgtgtcagctgcggtgcccggtactgcactgtgcgctgtctggggacccaccaggagaccaggtgtctgaagtggactgtgtgagcctgggcattcccagagaggaagggccgctgtgcactgcccggccttcagaaagacagaatttcatcacccaatgcagggggagctcttcctggaccaagggaggagccgctcattcacccaacaaaactgtgtcttatctgccaggaaagaccagcctcactcctgggaactgtctggcaggtaggctgggccccccagtgctgttagaataaaaagcctcgtgcc

SEQ ID NO: 366202 - DNA, 1173 bp, Homo sapiens
  misc_feature (458)..(459): n is a, c, g, or t
  misc_feature (464)..(464): n is a, c, g, or t
  misc_feature (466)..(466): n is a, c, g, or t
gctgcatctgaccagcctgactcagctgccaccactgagaaagccaagaagataaagaacctaaagaagaaactccggcaggtggaagagctgcagcagcggatccaggctggggaagtcagccagcccagcaaagagcagctagaaaagctagcaaggaggagggcgctagaagaggagttagaggacttggagttaggcctctgaggccttggggaatagggaatggactgcagaacaaaccgtggggctctctggggtctgggggaatacgggcaacagcagtcaggaggggtaccccccatactggcttccacctcctgcggcccagctctgtcctccagagcctagcgtctccctcaatccttcccttttcttcccaacttctacttttggactttcccccacccacctgattttcttttaaacaagacacccaaatcagcagcaaaggaccnngggtngnccacgcgtcggccaatggtggagaagaaaacttcggttcgctcccaggaccccgggcagcggcgggtgctggaccgggctgcccggcagcgtcgcatcaaccggcagctggaggccctggagaatgacaacttccaggatgacccccacgcgggactccctcagctcggcaagagactgcctcagtttgatgacgatgcggacactggaaagaaaaagaagaaaacccgaggtgatcattttaaacttcgcttccgaaaaaactttcaggccctgttggaggagcagaacttgagtgtggccgagggccctaactacctgacggcctgtgcgggacccccatcgcggccccagcgccccttctgtgctgtctgtggcttcccatccccctacacctgtgtcagctgcggtgcccggtactgcactgtgcgctgtctggggacccaccaggagaccaggtgtctgaagtggactgtgtgagcctgggcattcccagagaggaagggccgctgtgcactgcccggccttcagaaagacagaatttcatcacccaatgcagggggagctcttcctggaccaagggaggagccgctcattcacccaacaaaactgtgtcttatctgccaggaaagaccagcctcactcctgggaactgtctggcaggtaggctgggccccccagtgctgttagaataaaaagcctcgtgcc

SEQ ID NO: 366203 - DNA, 1481 bp, Homo sapiens
tggcggcgacagggagggaggaagcctaggagtccgccgcgggacggaggcctgggggaactgggagttcagctttctgcagagggccactaggaacctcggattgcccacggaagccagccactttctttgacagtccagcccacctcctcttctgcccggagaagctccaggggctgcctttgtgatcacagcatcttcacaaggaccaaaggaaaataagatttcttgtaagaacaccgtgaccacatctttaaaatgacccatttcgtggctcccacaagatttacacctccacactgaggccggaagtggttttgcccctataaaacatggcgaaaagctttcttgtctccaaggaaacgccacgtaatgagtcaaagctgtggcgcacgcgcagaagtacaagctaccggaagtgatggcgcccctactaaagccttggggttagtacgcgtgcgcagcagtttcttccgacagttgtgttgtgccaatggtggagaagaaaacttcggttcgctcccaggaccccgggcagcggcgggtgctggaccgggctgcccggcagcgtcgcatcaaccggcagctggaggccctggagaatgacaacttccaggatgacccccacgcgggactccctcagctcggcaagagactgcctcagtttgatgacgatgcggacactggaaagaaaaagaagaaaacccgaggtgatcattttaaacttcgcttccgaaaaaactttcaggccctgttggaggagcagaacttgagtgtggccgagggccctaactacctgacggcctgtgcgggacccccatcgcggccccagcgccccttctgtgctgtctgtggcttcccatccccctacacctgtgtcagctgcggtgcccggtactgcactgtgcgctgtctggggacccaccaggagaccaggtgtctgaagtggactgtgtgagcctgggcattcccagagaggaagggccgctgtgcactgcccggccttcagaaagacagaatttcatcacccaatgcagggggagctcttcctggaccaagggaggagccgctcattcacccaacaaaactgtgtcttatctgccaggaaagaccagcctcactcctgggaactgtctggcaggtaggctgggccccccagtgctgttagaataaaaagcctcgtgccggaaaaaaaaaaaaaaaaaaaaaaaaaaccggggaatccgtgcggggaaagaagggtagcgccctgagggaggagcacaccgggcggttgtaaaaccattagaaacggcccattagggggggcaagagcccaatatctcgacattttgtaacaggaggagggggccccggaagagggagcgatactcaggaccctaaggtttgaaggcatattggcctcggtggagttcaaattgacagatccaacgaaggagagaagccgtgggcggggagtgccaagagagcgccaatgtggc

SEQ ID NO: 366204 - DNA, 1744 bp, Homo sapiens
tggcggcgacagggagggaggaagcctaggagtccgccgcgggacggaggcctgggggaactgggagttcagctttctgcagagggccactaggaacctcggattgcccacggaagccagccactttctttgacagtccagcccacctcctcttctgcccggagaagctccaggggctgcctttgtgatcacagcatcttcacaaggaccaaaggaaaataagatttcttgtaagaacaccgtgaccacatctttaaaatgacccatttcgtggctcccacaagatttacacctccacactgaggccggaagtggttttgcccctataaaacatggcgaaaagctttcttgtctccaaggaaacgccacgtaatgagtcaaagctgtggcgcacgcgcagaagtacaagctaccggaagtgatggcgcccctactaaagccttggggttagtacgcgtgcgcagcagtttcttccgacagttgtgttgtgccaatggtggagaagaaaacttcggttcgctcccaggaccccgggcagcggcgggtgctggaccgggctgcccggcagcgtcgcatcaaccggcagctggaggccctggagaatgacaacttccaggatgacccccacgcgggactccctcagctcggcaagagactgcctcagtttgatgacgatgcggacactggaaagaaaaagaagaaaacccgaggtgatcattttaaacttcgcttccgaaaaaactttcaggccctgttggaggagcagaacttgagtgtggccgagggccctaactacctgacggcctgtgcgggacccccatcgcggccccagcgccccttctgtgctgtctgtggcttcccatccccctacacctgtgtcagctgcggtgcccggtactgcactgtgcgctgtctggggacccaccaggagaccaggtgtctgaagtggactgtgtgagcctgggcattcccagagaggaagggccgctgtgcactgcccggccttcagaaagacagaatttcatcacccaatgcagggggagctcttcctggaccaagggaggagccgctcattcacccaacaaaactgtgtcttatctgccaggaaagaccagcctcactcctgggaactgtctggcaggtaggctgggccccccagtgctgttagaataaaaagcctcgtgccggaaaaaaaaaaaaaaaaaaaaaaaaaaaaaaaaaaaaaaaaaaaaaaaaaaaaaaaaaaaaaaaaaaaaaagagaggggagggagaggaaaaagagaagaaacaaaagagagggggcacaagagaagaaggggaaaaagatagaaacaaaacggggggaaaacacaagagggagacgacaaaaaagaagcggagaaaggaggcaggacaaaaaaaacaggagagaggaagaggggaacagaagggaggcgacggggagaaaagggaggacaagagagcaccacaaaagagcgcgggggggcgggaaaaaccgggggaggaaaagaagagaggaggagaagaaaaaacagggccgcacgagggaagcagaaaacaaaagaccaagaaagagggaggcagccaaacgggtgcaatacaaacacacacgagagacgataataggtatattgagaggagaatggagaggagacgagagagagtattgcgagaggcagaagaaagataaagaagagaaaaaattgatatatgtcggagagggaggacacgcgaaaaaataga

SEQ ID NO: 366205 - DNA, 3190 bp, Homo sapiens
caaagtgctgagataacaggcatgagccactgcgcctggcaaggtcatgctttttgatgctgggtagttctttgactcctgacctggccacttgttagctatgtgaactttggacacatttcttaatctctgaatgttggtaaattggggatgatgatactgtcccatacagctgttgtaagggttaaatggttcaagtgttgcaaagagctgagcacgtgcctggctcatagtaagtgtccaacaagtgatagctactggggctgctgctgttattattatgcttaacaggtggttaatgaataaagagatatattatgcaaaattatcagaatctggcaaacagctgataaggcaatgaggaaagaggttttttgttttttgtttttgagacagggtctctctctgttgcccaggctggaatgcaatggcgcgatctcagctcgctgcaacctccacctcccgggttcaagcgattcttgtgcctcagcctcccgcgtagctgggattacaggcatgtgccaccacaccctgctaatttttgtatttttagtagagacatggtttcaccacgttggtcaggctggtctcgaactcctgacctgaagtgatgagcccacctcagcctcccaaagtgctgggattgcaggggtgagccactatgtccagccgaggaaagaggtttaaaataacttctaggtttctggtttggatgtctgcatagacggttccatttgcgtagagagaatctgcaggagaagcagacttggatgggaatttttttttttttggagttgcagtgtccacagggccagtgggtgatttcttttttccttctttctttttttttttttttggagacagtcttgctttgtcactcaggctggagtggtggcgcgatcacggcttgctgcacactgcagcctcaacctcccgggcccatgtagtcctcccaccgcagcctcccaagtaactgggactacaggcatgtgcaaccacgcctggcttattttttaattttttgtagagatggggtttggctatgctgcccaggctggtttctaactcctggcatcaagcgatcctttggcctcccaaagtgctgagattacaggcgtgcgccaccacacccggcctcaccaggcgctggctgcatggccagtttctggagcccgggagcaggttctgtgttgagggagtcactctgggagtcatttgcttgtgggtgatcatcagagccctttgtttggagtcaaaatcccaggaagagtgcatagactgagcagagaagagggccagccacctccatagaggcagggagagcagccgagctggagccggaggattcctggacatggagaaggcctgcagttttgtcaaggaagcaagcaaagggtctctttctactcgatgaaggtagtcggcaccgccacagggtggacagggctcaggtccaaggaggaggaggaaggcacactggagccgctctggggcccagagcgtgggtgggtggtcccccaggatgaccaggcaggtgtcagattttggggttcaaggagaggatgggaggtgaaaaagtgacacatcacgtgagttgctgtgaaggagaaggagctgtgaagccgagtagacacatgagcgtcgccagctctttgatggaaagtgccggttgaggaggaggggttgaagatgggagagggagggaatgggctggaggtgaaggctcggggtcagtggtgggacttggggcgctccagggcaggggtgtgcccacttggcatcacgtttgtgggtaggtggcctggaagatgagcgtatccaagcatgggtggcccctggttcctttgaggtaggaggtgagatgctgagtgtgagggccatgtgtattgagggcccaggacagcctggaagccccagggcgctgtgacctccccagtcagcagtgagctgtctccaggccggggctcactggctgggactgggattgagaggaaggcggagaaaacaggcaggagaaactgaaagggtctcagctggcgggacaggaagtgtgggcccaggggcttggcccgggaggagacaaggggaccaagggcttggcaatggggatgagatcagagagctgcagcttccaccccgggtgccttcctcgccctgcccagagcggcggccacactgctctttcttggaagccctgtaactttgcgtgccctgctccatccagttcgctcccaggaccccgggcagcggcgggtgctggaccgggctgcccggcagcgtcgcatcaaccggcagctggaggccctggagaatgacaacttccaggatgacccccacgcgggactccctcagctcggcaagagactgcctcagtttgatgacgatgcggacactggaaagaaaaagaagaaaacccgaggtgatcattttaaacttcgcttccgaaaaaactttcaggccctgttggaggagcagaacttgagtgtggccgagggccctaactacctgacggcctgtgcgggacccccatcgcggccccagcgccccttctgtgctgtctgtggcttcccatccccctacacctgtgtcagctgcggtgcccggtactgcactgtgcgctgtctggggacccaccaggagaccaggtgtctgaagtggactgtgtgagcctgggcattcccagagaggaagggccgctgtgcactgcccggccttcagaaagacagaatttcatcacccaatgcagggggagctcttcctggaccaagggaggagccgctcattcacccaacaaaactgtgtcttatctgccaggaaagaccagcctcactcctgggaactgtctggcaggtaggctgggccccccagtgctgttagaataaaaagcctcgtgccggaaaaaaaaaaaaaaaaaaaaaaaaaaccggggaatccgtgcggggaaagaagggtagcgccctgagggaggagcacaccgggcggttgtaaaaccattagaaacggcccattagggggggcaagagcccaatatctcgacattttgtaacaggaggagggggccccggaagagggagcgatactcaggaccctaaggtttgaaggcatattggcctcggtggagttcaaattgacagatccaacgaaggagagaagccgtgggcggggagtgccaagagagcgccaatgtggc

SEQ ID NO: 366206 - DNA, 3309 bp, Homo sapiens
tggcggcgacagggagggaggaagcctaggagtccgccgcgggacggaggcctgggggaactgggagttcagctttctgcagagggccactaggaacctcggattgcccacggaagccagccactttctttgacagtccagcccacctcctcttctgcccggagaagctccaggggctgcctttgtgatcacagcatcttcacaaggaccaaaggaaaataagatttcttgtaagaacaccgtgaccacatctttaaaatgacccatttcgtggctcccacaagatttacacctccacactgaggccggaagtggttttgcccctataaaacatggcgaaaagctttcttgtctccaaggaaacgccacgtaatgagtcaaagctgtggcgcacgcgcagaagtacaagctaccggaagtgatggcgcccctactaaagccttggggttagtacgcgtgcgcagcagtttcttccgacagttgtgttgtgccaatggtggagaagaaaacttcggggtctctctctgttgcccaggctggaatgcaatggcgcgatctcagctcgctgcaacctccacctcccgggttcaagcgattcttgtgcctcagcctcccgcgtagctgggattacaggcatgtgccaccacaccctgctaatttttgtatttttagtagagacatggtttcaccacgttggtcaggctggtctcgaactcctgacctgaagtgatgagcccacctcagcctcccaaagtgctgggattgcaggggtgagccactatgtccagccgaggaaagaggtttaaaataacttctaggtttctggtttggatgtctgcatagacggttccatttgcgtagagagaatctgcaggagaagcagacttggatgggaatttttttttttttggagttgcagtgtccacagggccagtgggtgatttcttttttccttctttctttttttttttttttggagacagtcttgctttgtcactcaggctggagtggtggcgcgatcacggcttgctgcacactgcagcctcaacctcccgggcccatgtagtcctcccaccgcagcctcccaagtaactgggactacaggcatgtgcaaccacgcctggcttattttttaattttttgtagagatggggtttggctatgctgcccaggctggtttctaactcctggcatcaagcgatcctttggcctcccaaagtgctgagattacaggcgtgcgccaccacacccggcctcaccaggcgctggctgcatggccagtttctggagcccgggagcaggttctgtgttgagggagtcactctgggagtcatttgcttgtgggtgatcatcagagccctttgtttggagtcaaaatcccaggaagagtgcatagactgagcagagaagagggccagccacctccatagaggcagggagagcagccgagctggagccggaggattcctggacatggagaaggcctgcagttttgtcaaggaagcaagcaaagggtctctttctactcgatgaaggtagtcggcaccgccacagggtggacagggctcaggtccaaggaggaggaggaaggcacactggagccgctctggggcccagagcgtgggtgggtggtcccccaggatgaccaggcaggtgtcagattttggggttcaaggagaggatgggaggtgaaaaagtgacacatcacgtgagttgctgtgaaggagaaggagctgtgaagccgagtagacacatgagcgtcgccagctctttgatggaaagtgccggttgaggaggaggggttgaagatgggagagggagggaatgggctggaggtgaaggctcggggtcagtggtgggacttggggcgctccagggcaggggtgtgcccacttggcatcacgtttgtgggtaggtggcctggaagatgagcgtatccaagcatgggtggcccctggttcctttgaggtaggaggtgagatgctgagtgtgagggccatgtgtattgagggcccaggacagcctggaagccccagggcgctgtgacctccccagtcagcagtgagctgtctccaggccggggctcactggctgggactgggattgagaggaaggcggagaaaacaggcaggagaaactgaaagggtctcagctggcgggacaggaagtgtgggcccaggggcttggcccgggaggagacaaggggaccaagggcttggcaatggggatgagatcagagagctgcagcttccaccccgggtgccttcctcgccctgcccagagcggcggccacactgctctttcttggaagccctgtaactttgcgtgccctgctccatccagttcgctcccaggaccccgggcagcggcgggtgctggaccgggctgcccggcagcgtcgcatcaaccggcagctggaggccctggagaatgacaacttccaggatgacccccacgcgggactccctcagctcggcaagagactgcctcagtttgatgacgatgcggacactggaaagaaaaagaagaaaacccgaggtgatcattttaaacttcgcttccgaaaaaactttcaggccctgttggaggagcagaacttgagtgtggccgagggccctaactacctgacggcctgtgcgggacccccatcgcggccccagcgccccttctgtgctgtctgtggcttcccatccccctacacctgtgtcagctgcggtgcccggtactgcactgtgcgctgtctggggacccaccaggagaccaggtgtctgaagtggactgtgtgagcctgggcattcccagagaggaagggccgctgtgcactgcccggccttcagaaagacagaatttcatcacccaatgcagggggagctcttcctggaccaagggaggagccgctcattcacccaacaaaactgtgtcttatctgccaggaaagaccagcctcactcctgggaactgtctggcaggtaggctgggccccccagtgctgttagaataaaaagcctcgtgccggaaaaaaaaaaaaaaaaaaaaaaaaaaccggggaatccgtgcggggaaagaagggtagcgccctgagggaggagcacaccgggcggttgtaaaaccattagaaacggcccattagggggggcaagagcccaatatctcgacattttgtaacaggaggagggggccccggaagagggagcgatactcaggaccctaaggtttgaaggcatattggcctcggtggagttcaaattgacagatccaacgaaggagagaagccgtgggcggggagtgccaagagagcgccaatgtggc

SEQ ID NO: 366207 - DNA, 2501 bp, Homo sapiens
tggcggcgacagggagggaggaagcctaggagtccgccgcgggacggaggcctgggggaactgggagttcagctttctgcagagggccactaggaacctcggattgcccacggaagccagccactttctttgacagtccagcccacctcctcttctgcccggagaagctccaggggctgcctttgtgatcacagcatcttcacaaggaccaaaggaaaataagatttcttgtaagaacaccgtgaccacatctttaaaatgacccatttcgtggctcccacaagatttacacctccacactgaggccggaagtggttttgcccctataaaacatggcgaaaagctttcttgtctccaaggaaacgccacgtaatgagtcaaagctgtggcgcacgcgcagaagtacaagctaccggaagtgatggcgcccctactaaagccttggggttagtacgcgtgcgcagcagtttcttccgacagttgtgttgtgccaatggtggagaagaaaacttcggggtctctctctgttgcccaggctggaatgcaatggcgcgatctcagctcgctgcaacctccacctcccgggttcaagcgattcttgtgcctcagcctcccgcgtagctgggattacaggcatgtgccaccacaccctgctaatttttgtatttttagtagagacatggtttcaccacgttggtcaggctggtctcgaactcctgacctgaagtgatgagcccacctcagcctcccaaagtgctgggattgcaggggtgagccactatgtccagccgaggaaagaggtttaaaataacttctaggtttctggtttggatgtctgcatagacggttccatttgcgtagagagaatctgcaggagaagcagacttggatgggaatttttttttttttggagttgcagtgtccacagggccagtgggtgatttcttttttccttctttctttttttttttttttggagacagtcttgctttgtcactcaggctggagtggtggcgcgatcacggcttgctgcacactgcagcctcaacctcccgggcccatgtagtcctcccaccgcagcctcccaagtaactgggactacaggcatgtgcaaccacgcctggcttattttttaattttttgtagagatggggtttggctatgctgcccaggctggtttctaactcctggcatcaagcgatcctttggcctcccaaagtgctgagattacaggcgtgcgccaccacacccggcctcaccaggcgctggctgcatggccagtttctggagcccgggagcaggttctgtgttgagggagtcactctgggagtcatttgcttgtgggtgatcatcagagccctttgtttggagtcaaaatcccaggaagagtgcatagactgagcagagaagagggccagccacctccatagaggcagggagagcagccgagctggagccggaggattcctggacatggagaaggcctgcagttttgtcaaggaagcaagcaaagggtctctttctactcgatgaagttcgctcccaggaccccgggcagcggcgggtgctggaccgggctgcccggcagcgtcgcatcaaccggcagctggaggccctggagaatgacaacttccaggatgacccccacgcgggactccctcagctcggcaagagactgcctcagtttgatgacgatgcggacactggaaagaaaaagaagaaaacccgaggtgatcattttaaacttcgcttccgaaaaaactttcaggccctgttggaggagcagaacttgagtgtggccgagggccctaactacctgacggcctgtgcgggacccccatcgcggccccagcgccccttctgtgctgtctgtggcttcccatccccctacacctgtgtcagctgcggtgcccggtactgcactgtgcgctgtctggggacccaccaggagaccaggtgtctgaagtggactgtgtgagcctgggcattcccagagaggaagggccgctgtgcactgcccggccttcagaaagacagaatttcatcacccaatgcagggggagctcttcctggaccaagggaggagccgctcattcacccaacaaaactgtgtcttatctgccaggaaagaccagcctcactcctgggaactgtctggcaggtaggctgggccccccagtgctgttagaataaaaagcctcgtgccggaaaaaaaaaaaaaaaaaaaaaaaaaaccggggaatccgtgcggggaaagaagggtagcgccctgagggaggagcacaccgggcggttgtaaaaccattagaaacggcccattagggggggcaagagcccaatatctcgacattttgtaacaggaggagggggccccggaagagggagcgatactcaggaccctaaggtttgaaggcatattggcctcggtggagttcaaattgacagatccaacgaaggagagaagccgtgggcggggagtgccaagagagcgccaatgtggc

SEQ ID NO: 366208 - DNA, 1134 bp, Homo sapiens
ggctggagtgcagtggcatagtcatagctcactgcagcctcgatttcctgggatcaaaccatcctcccacctcagcctccggagtggctggaactgcaagcatgaggccccacgcctggttaatttttaatttgttatgtggtgacgggctctcgctatgttgcccagttcgctcccaggaccccgggcagcggcgggtgctggaccgggctgcccggcagcgtcgcatcaaccggcagctggaggccctggagaatgacaacttccaggatgacccccacgcgggactccctcagctcggcaagagactgcctcagtttgatgacgatgcggacactggaaagaaaaagaagaaaacccgaggtgatcattttaaacttcgcttccgaaaaaactttcaggccctgttggaggagcagaacttgagtgtggccgagggccctaactacctgacggcctgtgcgggacccccatcgcggccccagcgccccttctgtgctgtctgtggcttcccatccccctacacctgtgtcagctgcggtgcccggtactgcactgtgcgctgtctggggacccaccaggagaccaggtgtctgaagtggactgtgtgagcctgggcattcccagagaggaagggccgctgtgcactgcccggccttcagaaagacagaatttcatcacccaatgcagggggagctcttcctggaccaagggaggagccgctcattcacccaacaaaactgtgtcttatctgccaggaaagaccagcctcactcctgggaactgtctggcaggtaggctgggccccccagtgctgttagaataaaaagcctcgtgccggaaaaaaaaaaaaaaaaaaaaaaaaaaccggggaatccgtgcggggaaagaagggtagcgccctgagggaggagcacaccgggcggttgtaaaaccattagaaacggcccattagggggggcaagagcccaatatctcgacattttgtaacaggaggagggggccccggaagagggagcgatactcaggaccctaaggtttgaaggcatattggcctcggtggagttcaaattgacagatccaacgaaggagagaagccgtgggcggggagtgccaagagagcgccaatgtggc

SEQ ID NO: 366209 - DNA, 1084 bp, Homo sapiens
ggctggagtgcagtggcatagtcatagctcactgcagcctcgatttcctgggatcaaaccatcctcccacctcagcctccggagtggctggaactgcaagcatgaggccccacgcctgttcgctcccaggaccccgggcagcggcgggtgctggaccgggctgcccggcagcgtcgcatcaaccggcagctggaggccctggagaatgacaacttccaggatgacccccacgcgggactccctcagctcggcaagagactgcctcagtttgatgacgatgcggacactggaaagaaaaagaagaaaacccgaggtgatcattttaaacttcgcttccgaaaaaactttcaggccctgttggaggagcagaacttgagtgtggccgagggccctaactacctgacggcctgtgcgggacccccatcgcggccccagcgccccttctgtgctgtctgtggcttcccatccccctacacctgtgtcagctgcggtgcccggtactgcactgtgcgctgtctggggacccaccaggagaccaggtgtctgaagtggactgtgtgagcctgggcattcccagagaggaagggccgctgtgcactgcccggccttcagaaagacagaatttcatcacccaatgcagggggagctcttcctggaccaagggaggagccgctcattcacccaacaaaactgtgtcttatctgccaggaaagaccagcctcactcctgggaactgtctggcaggtaggctgggccccccagtgctgttagaataaaaagcctcgtgccggaaaaaaaaaaaaaaaaaaaaaaaaaaccggggaatccgtgcggggaaagaagggtagcgccctgagggaggagcacaccgggcggttgtaaaaccattagaaacggcccattagggggggcaagagcccaatatctcgacattttgtaacaggaggagggggccccggaagagggagcgatactcaggaccctaaggtttgaaggcatattggcctcggtggagttcaaattgacagatccaacgaaggagagaagccgtgggcggggagtgccaagagagcgccaatgtggc

SEQ ID NO: 366210 - DNA, 1294 bp, Homo sapiens
  misc_feature (1198)..(1198): n is a, c, g, or t
tggcggcgacagggagggaggaagcctaggagtccgccgcgggacggaggcctgggggaactgggagttcagctttctgcagagggccactaggaacctcggattgcccacggaagccagccactttctttgacagtccagcccacctcctcttctgcccggagaagctccaggggctgcctttgtgatcacagcatcttcacaaggaccaaaggaaaataagatttcttgtaagaacaccgtgaccacatctttaaaatgacccatttcgtggctcccacaagatttacacctccacactgaggccggaagtggttttgcccctataaaacatggcgaaaagctttcttgtctccaaggaaacgccacgtaatgagtcaaagctgtggcgcacgcgcagaagtacaagctaccggaagtgatggcgcccctactaaagccttggggttagtacgcgtgcgcagcagtttcttccgacagttgtgttgtgccaatggtggagaagaaaacttcggttcgctcccaggaccccgggcagcggcgggtgctggaccgggctgcccggcagcgtcgcatcaaccggcagctggaggccctggagaatgacaacttccaggatgacccccacgcgggactccctcagctcggcaagagactgcctcagtttgatgacgatgcggacactggaaagaaaaagaagaaaacccgaggtgatcattttaaacttcgcttccgaaaaaactttcaggccctgttggaggagcagaacttgagtgtggccgagggccctaactacctgacggcctgtgcgggacccccatcgcggccccagcgccccttctgtgctgtctgtggcttcccatccccctacacctgtgtcagctgcggtgcccggtactgcactgtgcgctgtctggggacccaccaggagaccaggtgtctgaagtggactgtgtgagcctgggcattcccagagaggaagggccgctgtgcactgcccggccttcagaaagacagaatttcatcacccaatgcagggggagctcttcctggaccaagggaggagccgctcattcacccaacaaaactgtgtcttatctgccaggaaagaccagcctcactcctgggaactgtctggcaggtaggctgggccccccagtgctgttagaataaaaagcctcgtgcccggacaacaaanccaacacaaaccctgcagggcctcaacgtccgggacgcggcaaacagacggcacccgcacccggcccactggccacataccggtcccgggccccag

SEQ ID NO: 366211 - DNA, 1483 bp, Homo sapiens
tggcggcgacagggagggaggaagcctaggagtccgccgcgggacggaggcctgggggaactgggagttcagctttctgcagagggccactaggaacctcggattgcccacggaagccagccactttctttgacagtccagcccacctcctcttctgcccggagaagctccaggggctgcctttgtgatcacagcatcttcacaaggaccaaaggaaaataagatttcttgtaagaacaccgtgaccacatctttaaaatgacccatttcgtggctcccacaagatttacacctccacactgaggccggaagtggttttgcccctataaaacatggcgaaaagctttcttgtctccaaggaaacgccacgtaatgagtcaaagctgtggcgcacgcgcagaagtacaagctaccggaagtgatggcgcccctactaaagccttggggttagtacgcgtgcgcagcagtttcttccgacagttgtgttgtgccaatggtggagaagaaaacttcggttcgctcccaggaccccgggcagcggcgggtgctggaccgggctgcccggcagcgtcgcatcaaccggcagctggaggccctggagaatgacaacttccaggatgacccccacgcgggactccctcagctcggcaagagactgcctcagtttgatgacgatgcggacactggaaagaaaaagaagaaaacccgaggtgatcattttaaacttcgcttccgaaaaaactttcaggccctgttggaggagcagaacttgagtgtggccgagggccctaactacctgacggcctgtgcgggacccccatcgcggccccagcgccccttctgtgctgtctgtggcttcccatccccctacacctgtgtcagctgcggtgcccggtactgcactgtgcgctgtctggggacccaccaggagaccaggtgtctgaagtggactgtgtgagcctgggcattcccagagaggaagggccgctgtgcactgcccggccttcagaaagacagaatttcatcacccaatgcagggggagctcttcctggaccaagggaggagccgctcattcacccaacaaaactgtgtcttatctgccagggcaaaggacccaggaccttcacttcctggggacactggttctgtgcaagggtaagggcactgggggccccccccccaggttggcctggattaagcaacattatacacacaagcgcgccctatccgagttgtggcccccgggggaacatagcccagacaccagaccgtactaatcatccaagcgtcactacacattccccctaccgcccctacccccacacccccacccccacactaaatccaatcaaaaccactagacatcccccccactccttcatcacaacactactcaaccaactacctcttatctactctctttatttcactgtatggccgctcaacgccacccctctacccaccaccacctacaatccatct

SEQ ID NO: 366212 - DNA, 1236 bp, Homo sapiens
ccccagcgcttgtggggcgcttgttggaaaataatcaatatcgttataaaaacttcacagaccaccaagagaaggcagctgttaacatctcataggatagaactttattaagactgaaatgaaaatactattctctcttctctactctctttatgtctttgacataaaataagtcatccaaatccataaatcagtatgagatgcagtgtgtagagataagtaccaacaagcgcctccaggcgcttgttggaggagcagaacttgagtgtggccgagggccctaactacctgacggcctgtgcgggacccccatcgcggccccagcgccccttctgtgctgtctgtggcttcccatccccctacacctgtgtcagctgcggtgcccggtactgcactgtgcgctgtctggggacccaccaggagaccaggtgtctgaagtggactgtgtgagcctgggcattcccagagaggaagggccgctgtgcactgcccggccttcagaaagacagaatttcatcacccaatgcagggggagctcttcctggaccaagggaggagccgctcattcacccaacaaaactgtgtcttatctgccaggaaagaccagcctcactcctgggaactgtctggcaggtaggctgggccccccagtgctgttagaataaaaagcctcgtgccggaaaaaaaaaaaaaaaaaaaaaaaaaaaaaaaaaaaaaaaaaaaaaaaaaaaaaaaaaaaaaaaaaaaaaagagaggggagggagaggaaaaagagaagaaacaaaagagagggggcacaagagaagaaggggaaaaagatagaaacaaaacggggggaaaacacaagagggagacgacaaaaaagaagcggagaaaggaggcaggacaaaaaaaacaggagagaggaagaggggaacagaagggaggcgacggggagaaaagggaggacaagagagcaccacaaaagagcgcgggggggcgggaaaaaccgggggaggaaaagaagagaggaggagaagaaaaaacagggccgcacgagggaagcagaaaacaaaagaccaagaaagagggaggcagccaaacgggtgcaatacaaacacacacgagagacgataataggtatattgagaggagaatggagaggagacgagagagagtattgcgagaggcagaagaaagataaagaagagaaaaaattgatatatgtcggagagggaggacacgcgaaaaaataga

SEQ ID NO: 366213 - DNA, 3518 bp, Homo sapiens
tggcggcgacagggagggaggaagcctaggagtccgccgcgggacggaggcctgggggaactgggagttcagctttctgcagagggccactaggaacctcggattgcccacggaagccagccactttctttgacagtccagcccacctcctcttctgcccggagaagctccaggggctgcctttgtgatcacagcatcttcacaaggaccaaaggaaaataagatttcttgtaagaacaccgtgaccacatctttaaaatgacccatttcgtggctcccacaagatttacacctccacactgaggccggaagtggttttgcccctataaaacatggcgaaaagctttcttgtctccaaggaaacgccacgtaatgagtcaaagctgtggcgcacgcgcagaagtacaagctaccggaagtgatggcgcccctactaaagccttggggttagtacgcgtgcgcagcagtttcttccgacagttgtgttgtgccaatggtggagaagaaaacttcggggtctctctctgttgcccaggctggaatgcaatggcgcgatctcagctcgctgcaacctccacctcccgggttcaagcgattcttgtgcctcagcctcccgcgtagctgggattacaggcatgtgccaccacaccctgctaatttttgtatttttagtagagacatggtttcaccacgttggtcaggctggtctcgaactcctgacctgaagtgatgagcccacctcagcctcccaaagtgctgggattgcaggggtgagccactatgtccagccgaggaaagaggtttaaaataacttctaggtttctggtttggatgtctgcatagacggttccatttgcgtagagagaatctgcaggagaagcagacttggatgggaatttttttttttttggagttgcagtgtccacagggccagtgggtgatttcttttttccttctttctttttttttttttttggagacagtcttgctttgtcactcaggctggagtggtggcgcgatcacggcttgctgcacactgcagcctcaacctcccgggcccatgtagtcctcccaccgcagcctcccaagtaactgggactacaggcatgtgcaaccacgcctggcttattttttaattttttgtagagatggggtttggctatgctgcccaggctggtttctaactcctggcatcaagcgatcctttggcctcccaaagtgctgagattacaggcgtgcgccaccacacccggcctcaccaggcgctggctgcatggccagtttctggagcccgggagcaggttctgtgttgagggagtcactctgggagtcatttgcttgtgggtgatcatcagagccctttgtttggagtcaaaatcccaggaagagtgcatagactgagcagagaagagggccagccacctccatagaggcagggagagcagccgagctggagccggaggattcctggacatggagaaggcctgcagttttgtcaaggaagcaagcaaagggtctctttctactcgatgaaggtagtcggcaccgccacagggtggacagggctcaggtccaaggaggaggaggaaggcacactggagccgctctggggcccagagcgtgggtgggtggtcccccaggatgaccaggcaggtgtcagattttggggttcaaggagaggatgggaggtgaaaaagtgacacatcacgtgagttgctgtgaaggagaaggagctgtgaagccgagtagacacatgagcgtcgccagctctttgatggaaagtgccggttgaggaggaggggttgaagatgggagagggagggaatgggctggaggtgaaggctcggggtcagtggtgggacttggggcgctccagggcaggggtgtgcccacttggcatcacgtttgtgggtaggtggcctggaagatgagcgtatccaagcatgggtggcccctggttcctttgaggtaggaggtgagatgctgagtgtgagggccatgtgtattgagggcccaggacagcctggaagccccagggcgctgtgacctccccagtcagcagtgagctgtctccaggccggggctcactggctgggactgggattgagaggaaggcggagaaaacaggcaggagaaactgaaagggtctcagctggcgggacaggaagtgtgggcccaggggcttggcccgggaggagacaaggggaccaagggcttggcaatggggatgagatcagagagctgcagcttccaccccgggtgccttcctcgccctgcccagagcggcggccacactgctctttcttggaagccctgtaactttgcgtgccctgctccatccagttcgctcccaggaccccgggcagcggcgggtgctggaccgggctgcccggcagcgtcgcatcaaccggcagctggaggccctggagaatgacaacttccaggatgacccccacgcgggactccctcagctcggcaagagactgcctcagtttgatgacgatgcggacactggaaagaaaaagaagaaaacccgaggtgatcattttaaacttcgcttccgaaactacctgacggcctgtgcgggacccccatcgcggccccagcgccccttctgtgctgtctgtggcttcccatccccctacacctgtgtcagctgcggtgcccggtactgcactgtgcgctgtctggggacccaccaggagaccaggtgtctgaagtggactgtgtgagcctgggcattcccagagaggaagggccgctgtgcactgcccggccttcagaaagacagaatttcatcacccaatgcagggggagctcttcctggaccaagggaggagccgctcattcacccaacaaaactgtgtcttatctgccaggaaagaccagcctcactcctgggaactgtctggcaggtaggctgggccccccagtgctgttagaataaaaagcctcgtgccggaaaaaaaaaaaaaaaaaaaaaaaaaaaaaaaaaaaaaaaaaaaaaaaaaaaaaaaaaaaaaaaaaaaaaagagaggggagggagaggaaaaagagaagaaacaaaagagagggggcacaagagaagaaggggaaaaagatagaaacaaaacggggggaaaacacaagagggagacgacaaaaaagaagcggagaaaggaggcaggacaaaaaaaacaggagagaggaagaggggaacagaagggaggcgacggggagaaaagggaggacaagagagcaccacaaaagagcgcgggggggcgggaaaaaccgggggaggaaaagaagagaggaggagaagaaaaaacagggccgcacgagggaagcagaaaacaaaagaccaagaaagagggaggcagccaaacgggtgcaatacaaacacacacgagagacgataataggtatattgagaggagaatggagaggagacgagagagagtattgcgagaggcagaagaaagataaagaagagaaaaaattgatatatgtcggagagggaggacacgcgaaaaaataga

SEQ ID NO: 366214 - DNA, 1186 bp, Homo sapiens
tggcggcgacagggagggaggaagcctaggagtccgccgcgggacggaggcctgggggaactgggagttcagctttctgcagagggccactaggaacctcggattgcccacggaagccagccactttctttgacagtccagcccacctcctcttctgcccggagaagctccaggggctgcctttgtgatcacagcatcttcacaaggaccaaaggaaaataagatttcttgtaagaacaccgtgaccacatctttaaaatgacccatttcgtggctcccacaagatttacacctccacactgaggccggaagtggttttgcccctataaaacatggcgaaaagctttcttgtctccaaggaaacgccacgtaatgagtcaaagctgtggcgcacgcgcagaagtacaagctaccggaagtgatggcgcccctactaaagccttggggttagtacgcgtgcgcagcagtttcttccgacagttgtgttgtgccaatggtggagaagaaaacttcggttcgctcccaggaccccgggcagcggcgggtgctggaccgggctgcccggcagcgtcgcatcaaccggcagctggaggccctggagaatgacaacttccaggatgacccccacgcgggactccctcagctcggcaagagactgcctcagtttgatgacgatgcggacactggaaagaaaaagaagaaaacccgaggtgatcattttaaacttcgcttccgaaaaaactttcaggccctgttggaggagcagaacttgagtgtggccgagggccctaactacctgacggcctgtgcgggacccccatcgcggccccagcgccccttctgtgctgtctgtggcttcccatccccctacacctgtgtcagctgcggtgcccggtactgcactgtgcgctgtctggggacccaccaggagaccaggtgtctgaagtggactgtgtgagcctgggcattcccagagaggaagggccgctgtgcactgcccggccttcagaaagacagaatttcatcacccaatgcagggggagctcttcctggaccaagggaggagccgctcattcacccaacaaaactgtgtcttatctgccaggaaagaccagcctcactcctgggaactgtctggcaggtaggctgggccccccagtgctgttagaataaaaagcctcgtgcc

SEQ ID NO: 366215 - DNA, 1143 bp, Homo sapiens
tggcggcgacagggagggaggaagcctaggagtccgccgcgggacggaggcctgggggaactgggagttcagctttctgcagagggccactaggaacctcggattgcccacggaagccagccactttctttgacagtccagcccacctcctcttctgcccggagaagctccaggggctgcctttgtgatcacagcatcttcacaaggaccaaaggaaaataagatttcttgtaagaacaccgtgaccacatctttaaaatgacccatttcgtggctcccacaagatttacacctccacactgaggccggaagtggttttgcccctataaaacatggcgaaaagctttcttgtctccaaggaaacgccacgtaatgagtcaaagctgtggcgcacgcgcagaagtacaagctaccggaagtgatggcgcccctactaaagccttggggttagtacgcgtgcgcagcagtttcttccgacagttgtgttgtgccaatggtggagaagaaaacttcggttcgctcccaggaccccgggcagcggcgggtgctggaccgggctgcccggcagcgtcgcatcaaccggcagctggaggccctggagaatgacaacttccaggatgacccccacgcgggactccctcagctcggcaagagactgcctcagtttgatgacgatgcggacactggaaagaaaaagaagaaaacccgaggtgatcattttaaacttcgcttccgaaaaaactttcaggccctgttggaggagcagaacttgagtgtggccgagggccctaactacctgacggcctgtgcgggacccccatcgcggccccagcgccccttctgtgctgtctgtggcttcccatccccctacacctgtgtcagctgcggtgcccggtactgcactgtgcgctgtctggggacccaccaggagaccaggtgtctgaagtggactgtgtgagcctgggcattcccagagaggaagggccgctgtgcactgcccggccttcagaaagacagaatttcatcacccaatgcagggggagctcttcctggaccaagggagaaagaccagcctcactcctgggaactgtctggcaggtaggctgggccccccagtgctgttagaataaaaagcctcgtgcc

SEQ ID NO: 366216 - DNA, 1468 bp, Homo sapiens
  misc_feature (458)..(459): n is a, c, g, or t
  misc_feature (464)..(464): n is a, c, g, or t
  misc_feature (466)..(466): n is a, c, g, or t
gctgcatctgaccagcctgactcagctgccaccactgagaaagccaagaagataaagaacctaaagaagaaactccggcaggtggaagagctgcagcagcggatccaggctggggaagtcagccagcccagcaaagagcagctagaaaagctagcaaggaggagggcgctagaagaggagttagaggacttggagttaggcctctgaggccttggggaatagggaatggactgcagaacaaaccgtggggctctctggggtctgggggaatacgggcaacagcagtcaggaggggtaccccccatactggcttccacctcctgcggcccagctctgtcctccagagcctagcgtctccctcaatccttcccttttcttcccaacttctacttttggactttcccccacccacctgattttcttttaaacaagacacccaaatcagcagcaaaggaccnngggtngnccacgcgtcggccaatggtggagaagaaaacttcggttcgctcccaggaccccgggcagcggcgggtgctggaccgggctgcccggcagcgtcgcatcaaccggcagctggaggccctggagaatgacaacttccaggatgacccccacgcgggactccctcagctcggcaagagactgcctcagtttgatgacgatgcggacactggaaagaaaaagaagaaaacccgaggtgatcattttaaacttcgcttccgaaaaaactttcaggccctgttggaggagcagaacttgagtgtggccgagggccctaactacctgacggcctgtgcgggacccccatcgcggccccagcgccccttctgtgctgtctgtggcttcccatccccctacacctgtgtcagctgcggtgcccggtactgcactgtgcgctgtctggggacccaccaggagaccaggtgtctgaagtggactgtgtgagcctgggcattcccagagaggaagggccgctgtgcactgcccggccttcagaaagacagaatttcatcacccaatgcagggggagctcttcctggaccaagggaggagccgctcattcacccaacaaaactgtgtcttatctgccaggaaagaccagcctcactcctgggaactgtctggcaggtaggctgggccccccagtgctgttagaataaaaagcctcgtgccggaaaaaaaaaaaaaaaaaaaaaaaaaaccggggaatccgtgcggggaaagaagggtagcgccctgagggaggagcacaccgggcggttgtaaaaccattagaaacggcccattagggggggcaagagcccaatatctcgacattttgtaacaggaggagggggccccggaagagggagcgatactcaggaccctaaggtttgaaggcatattggcctcggtggagttcaaattgacagatccaacgaaggagagaagccgtgggcggggagtgccaagagagcgccaatgtggc

SEQ ID NO: 366217 - DNA, 1412 bp, Homo sapiens
tggcggcgacagggagggaggaagcctaggagtccgccgcgggacggaggcctgggggaactgggagttcagctttctgcagagggccactaggaacctcggattgcccacggaagccagccactttctttgacagtccagcccacctcctcttctgcccggagaagctccaggggctgcctttgtgatcacagcatcttcacaaggaccaaaggaaaataagatttcttgtaagaacaccgtgaccacatctttaaaatgacccatttcgtggctcccacaagatttacacctccacactgaggccggaagtggttttgcccctataaaacatggcgaaaagctttcttgtctccaaggaaacgccacgtaatgagtcaaagctgtggcgcacgcgcagaagtacaagctaccggaagtgatggcgcccctactaaagccttgggttcgctcccaggaccccgggcagcggcgggtgctggaccgggctgcccggcagcgtcgcatcaaccggcagctggaggccctggagaatgacaacttccaggatgacccccacgcgggactccctcagctcggcaagagactgcctcagtttgatgacgatgcggacactggaaagaaaaagaagaaaacccgaggtgatcattttaaacttcgcttccgaaaaaactttcaggccctgttggaggagcagaacttgagtgtggccgagggccctaactacctgacggcctgtgcgggacccccatcgcggccccagcgccccttctgtgctgtctgtggcttcccatccccctacacctgtgtcagctgcggtgcccggtactgcactgtgcgctgtctggggacccaccaggagaccaggtgtctgaagtggactgtgtgagcctgggcattcccagagaggaagggccgctgtgcactgcccggccttcagaaagacagaatttcatcacccaatgcagggggagctcttcctggaccaagggaggagccgctcattcacccaacaaaactgtgtcttatctgccaggaaagaccagcctcactcctgggaactgtctggcaggtaggctgggccccccagtgctgttagaataaaaagcctcgtgccggaaaaaaaaaaaaaaaaaaaaaaaaaaccggggaatccgtgcggggaaagaagggtagcgccctgagggaggagcacaccgggcggttgtaaaaccattagaaacggcccattagggggggcaagagcccaatatctcgacattttgtaacaggaggagggggccccggaagagggagcgatactcaggaccctaaggtttgaaggcatattggcctcggtggagttcaaattgacagatccaacgaaggagagaagccgtgggcggggagtgccaagagagcgccaatgtggc

SEQ ID NO: 366218 - DNA, 1308 bp, Homo sapiens
tggcggcgacagggagggaggaagcctaggagtccgccgcgggacggaggcctgggggaactgggagttcagctttctgcagagggccactaggaacctcggattgcccacggaagccagccactttctttgacagtccagcccacctcctcttctgcccggagaagctccaggggctgcctttgtgatcacagcatcttcacaaggaccaaaggaaaataagatttcttgtaagaacaccgtgaccacatctttaaaatgacccatttcgtggctcccacaagatttacacctccacactgaggccggaagtggttttgcccctataaaacatggcgaaaagctttcttgtctccaaggaaacgccacgtaatgagtcaaagctgtggcgcacgcgcagaagtacaagctaccggaagtgatggcgcccctactaaagccttggggttagtacgcgtgcgcagcagtttcttccgacagttgtgttgtgccaatggtggagaagaaaacttcggttcgctcccaggaccccgggcagcggcgggtgctggaccgggctgcccggcagcgtcgcatcaaccggcagctggaggccctggagaatgacaacttccaggatgacccccacgcgggactccctcagctcggcaagagactgcctcagtttgatgacgatgcggacactggaaagaaaaagaagaaaacccgaggtgatcattttaaacttcgcttccgaaaaaactttcaggccctgttggaggagcagaacttgagtgtggccgagggccctaactacctgacggcctgtgcgggacccccatcgcggccccagcgccccttctgtgctgtctgtggcttcccatccccctacacctgtgtcagctgcggtgcccggtactgcactgtgcgctgtctggggacccaccaggagaccaggtgtctgaagtggactgtgtgagcctgggcattcccagagaggaagggccgctgtgcactgcccggccttcagaaagacagaatttcatcacccaatgcagggggagctcttcctggaccaagggaggagccgctcattcacccaacaaaactgtgtcttatctgccaggaaagaccagcctcactcctgggaactgtctggcaggtaggctgggccccccagtgctgttagaataaaaagcctcgtgccgggtaataaaaattataaataaacttggggggggggccgggtcccaattcgccttaagggggcgtattaaaattaatgggccgtgtattaaaacgtctgaatgggaaaaacctggggtatcc

SEQ ID NO: 366219 - DNA, 1061 bp, Homo sapiens
  misc_feature (1026)..(1026): n is a, c, g, or t
tggcggcgacagggagggaggaagcctaggagtccgccgcgggacggaggcctgggggaactgggagttcagctttctgcagagggccactaggaacctcggattgcccacggaagccagccactttctttgacagtccagcccacctcctcttctgcccggagaagctccaggggctgcctttgtgatcacagcatcttcacaaggaccaaaggaaaataagatttcttgtaagaacaccgtgaccacatctttaaaatgacccatttcgtggctcccacaagatttacacctccacactgaggccggaagtggttttgcccctataaaacatggcgaaaagctttcttgtctccaaggaaacgccacgtaatgagtcaaagctgtggcgcacgcgcagaagtacaagctaccggaagtgatggcgcccctactaaagccttggggttagtacgcgtgcgcagcagtttcttccgacagttgtgttgtgccaatggtggagaagaaaacttcggttcgctcccaggaccccgggcagcggcgggtgctggaccgggctgcccggcagcgtcgcatcaaccggcagctggaggccctggagaatgacaacttccaggatgacccccacgcgggactccctcagctcggcaagagactgcctcagtttgatgacgatgcggacactggaaagaaaaagaagaaaacccgaggtgatcattttaaacttcgcttccgaaaaaactttcaggccctgttggaggagcagaacttgagtgtggccgagggccctaactacctgacggcctgtgcgggacccccatcgcggccccagcgccccttctgtgctgtctgtggcttcccatccccctacacctgtgtcagctgcggtgcccggtactgcactgtgcgctgtctggggacccaccaggagaccaggtgtctgaagtggactgtgtgagcctgggcattcccagagaggaagggccgctgtgcactgcccggccttcagaaagacagaatttcctnacccggggagggggggggatcctcgagatcgtcct

SEQ ID NO: 366220 - DNA, 4510 bp, Homo sapiens
agccggcgcagcggggggtcggtgtggggtagaatggccgctgccgccgtcacccgcgggaccccgggagcacagactccccctccccccggcccctcaggccgggggtgaccttgccccctggagccctcaccatgaataccaaggacaccaccgaggttgctgaaaacagccaccacctgaagatctttctccccaagaagctgctggagtgtcttcctcgctgcccgctgctgcctccagagaggctacggtggaatacaaatgaggagattgcatcctacctgatcacctttgagaagcatgatgagtggctgtcttgtgccccaaagacaaggcctcagaatggctccatcatcctctacaatcgcaagaaggtgaaatatcggaaggatggttacctctggaagaagcggaaggatgggaagaccacccgagaggaccacatgaagctgaaggtccagggcatggagcctggcagtgtctctatggctgctacgttcactcttccatcgtccccacattccatcggcgctgctactggctgctccagaaccctgacatcgtccttgtgcactacctgaacgtcccagccctggaggactgtggaaagggctgcagccccatcttttgttccatcagcagcgaccgtcgagagtggctgaagtggtcccgggaggagttgttgggacagctgaagcccatgtttcatggcatcaagtggagctgcgggaatggaacagaagagttctctgtagaacacctggtgcagcagattttggacacccacccaaccaagcctgctccccgaacccacgcctgtctctgcagtggggggcttggttctgggagccttacccacaaatgcagcagcacgaaacaccgcatcatctctcccaaagtggagccccgagctttaaccctgacctctatcccccaccctcaccccccagagcctcctccactgatagccccacttcccccagagctccccaaggcacacacctccccatcttcttcctcttcttcctcctcatcaggttttgcagagcccctagaaatcagacctagccctcccacttctcgagggggttcttcaagaggaggcactgctatcctcctcctgacaggactggagcagcgggctggaggcttgacgcccaccaggcacttggctccacaggctgatcctaggccttccatgagtttggcagtggttgtaggcactgagccttctgccccaccagctcctcccagtcctgcctttgaccctgatcgttttctcaacagcccccagaggggccagacatatggaggggggcagggagtaagcccagacttccccgaggcagaggccgctcataccccctgttctgccctagagcctgctgctgccctggagccccaggcagctgctcggggtcccccaccacagtcagtagcaggtgggagaagaggaaactgcttcttcatccaagatgatgacagtggggaggagctcaagggtcacggggctgccccacccataccttcaccccctccctcacccccaccctcacctgcccccttggagccgtcaagcagggtaggaagaggagaggccttgtttggaggacctgttggggccagtgaactggagcccttcagtctttcatcattcccagaccttatgggagaactcatcagtgacgaagctccaagcatccctgctccgaccccccagctgtctcctgctcttagcaccatcacagacttctccccagagtggtcctacccagagggtggggtcaaggtgctcatcacaggtccttggaccgaagccgccgagcattactcctgtgtctttgatcacatcgcagtgccagcctcacttgtccagcctggtgtcttacgctgctactgtcccgcccatgaggtagggctggtgtctttgcaggtggcagggcgggaggggcccctttctgcttctgtgctctttgagtatcgagcccgccgattcctgtctctgcctagtactcaacttgactggctgtcactggacgacaaccagttccggatgtccatactagagcgactggagcagatggagaagcggatggcagagatcgcagcagctgggcaggtgccttgccagggtcctgatgctcctccagttcaggatgaaggccaggggcctgggttcgaagcacgggtagtggtcttggtagaaagcatgatcccacgctccacctggaagggtcctgaacgtctggcccatggaagccccttccggggcatgagccttctgcacctggctgctgcccagggctatgcccgcctcatcgagaccctgagccagtggcggagtgtggagactggaagcttggacttagagcaggaggttgacccgctcaacgtggatcatttctcttgcacccctctgatgtgggcttgtgccctgggacacctggaagctgctgtgctccttttccgttggaaccgacaggcactgagcattcccgactctctgggccgtctgccattgtctgtggctcattcccggggtcatgtgcgccttgcccgctgccttgaggaactacagagacaggagccttcggtggagcccccatttgccctatcgccaccctcctccagcccagacactggtctgagcagcgtctcctcgccctcggagctgtcggatggcaccttttccgtcacgtcagcctattctagtgccccagatggcagtcccccccctgcacctctgccagcctctgagatgactatggaggacatggccccaggccagctttcctctggtgtcccagaagcccccctactcctcatggactatgaggctaccaactccaaggggcccctctcctcccttcctgccctcccaccagcttcagatgatggggctgctccggaggacgctgacagcccacaggctgtggatgtgatcccggtggacatgatctcactagccaagcagatcatcgaagccacaccggagcggattaaacgagaggacttcgtggggctgcccgaggctggagcctcaatgcgggagcggacaggggctgtggggctcagtgagaccatgtcctggctggccagctacctggagaatgtggaccatttccccagctcaacccctcccagcgaactgccctttgagcgaggtcgcctggctgtcccttcagcaccctcctgggcagagtttctctctgcatccaccagtggcaagatggaaagtgattttgccctgctgacactatcagatcacgagcagcgggaactgtatgaggctgcccgagtcatccagacggccttccgaaagtacaagggccggcggctgaaggagcagcaggaggtagcagcagctgtaatccagcgctgttaccggaagtacaagcagctgacctggattgcacttaagtttgcactctataagaagatgacccaggcggccatcctgatccagagcaagttccgaagctactatgaacagaagcgatttcagcagagccgccgagcggctgtgctcatccagcagcactaccgctcctaccgccgcaggcccggccctccccaccggacttcggccaccctgcctgcccgcaacaaaggctcctttctcaccaagaagcaggaccaggcagcccggaagatcatgagattcctgcggcgctgccgacacaggatgagggaactgaagcagaaccaggagctggaagggcttccccagccgggactggccacatgacctggccaccgcctttctcaccaccctgggggcgcctcgtgcagtcttaacagggagagggctttctggggcagggggagcccctgtcggcagctttcctgttcacctttgttggagccctctgtaggcctcctccctcctccccacgccttgctcccacacccctctcctcgtccctcctggtcgtgccccgtctcttttggtcctggctccagaaaacccgcgccccacatacctgcatcttccgctgtgacctccggagccctgcctgcccctgctccccagctcctcctgcctgcacccgactcggccccctcctgacttgccttatttatttgttcgacgcgtctctgaatgtatccgcctcggttcccaccactgccttcgctgcgcacgcccctcgtgtttcagggctgaccgtgtccccacccgactccgcatgtttgcgtctgtttcctccctctctggccctgtcttaccccatcacccgactctggccactgacctcagggccgaaggggaggtggtgtacataggaacgcgttgcggagtccgccccgtcccccgaggggaggggtcttgtacatactgtaacatacagagtatagtgaagaatctatttaaggcgccgcggggagggctgcacggccgggcttgtggttctctagcgcggcgggggcctcctgccggctccacgggcactttctacttgtgcatgggcttggtttatacgaattgccattaaacatcgctgcacca

SEQ ID NO: 366221 - DNA, 862 bp, Homo sapiens
ccgacaacctttttcccatccgtagccttaaattcccgagctgcccgggcggatcgtagtgttgattggagggatgagaatacccgccgggtccgattggccactgtctccgcctgcgttctcggagtagcttccctgcgggtgggctggagttcggcggccggcgtagggcgcggccctgcagggcggtgggagcctccccggggctgctcgtgttgcagcttgggatgatactggcggaacgcaggaccccaactcccaaacctgcggaccttgaccacggacgagccctgtcccagctccccacgtgccccagggggaccagagcaggcaggacgccttccaagtattcaagggccgctggttgcctacgcttcgtccccttgtttcttgaacaaccgttagggaccaggggtacccctcagggaggccacagtccggggctggggcgctcattgatgcagtgatcacacgtaagtttaataaccaacttgataagtgctctgagagaaaaataactgtgagagcggccacctgaggttctcccccaatctgcagtgagccgagatcagaacaggtaattccgtaaatgagagagagaagcaaagcgttacaggcagaagagtctatttgaaatctctgagaaaggaggaagcatgatgggaatggggaactggaattctctaatgctccgatgactgtctaagtgggggatcacccggcattgacagactgggaagcttaaatgagtcactcgcctgaggtcacatggttagtttgatgcagagaagactcgaaaaccagttaaagaacagtcagtggggcccggccttgtagctcacacctttaataccaccacttt

SEQ ID NO: 366222 - DNA, 6144 bp, Homo sapiens
cctcttcccggttcgccctcacctcccgcttccgtcctcctcccccgcgccagggggcgccgctcaccgcagggccccacggcggaccagcgcgtgccggggactgtcccggagacccccgcacccggcacctgcactgtccctcgcccaccgcgtgcccgcggactctgctcccggcttctccagaacatccctctatgcgggcgggaccctcccacctcggaggttctcctgggaccaccactccgccggggggccgcccagagtgccaagcgtccgatccggcgccgcccaagtgcagcccaaggacccgctcccgctccgcaccctggcaggctgcctagccaggactgcgcacctgcgccctggggcggagtccttaccccaaccccagcttcactgcacatagccgagcccgacgggcctcctcccatctccatcctggacacctggcggagcccgtgctgagagcctccgccagctcccatctgttccccgaggagggcggggggctcaggctggagccagagcggtagatgggcacagactccccctccccccggcccctcaggccgggggtgaccttgccccctggagccctcaccatgaataccaaggacaccaccgaggttgctgaaaacagccaccacctgaagatctttctccccaagaagctgctggagtgtcttcctcgctgcccgctgctgcctccagagaggctacggtggaatacaaatgaggagattgcatcctacctgatcacctttgagaagcatgatgagtggctgtcttgtgccccaaagacaaggcctcagaatggctccatcatcctctacaatcgcaagaaggtgaaatatcggaaggatggttacctctggaagaagcggaaggatgggaagaccacccgagaggaccacatgaagctgaaggtccagggcatggagcctggcagtgtctctatggctgctacgttcactcttccatcgtccccacattccatcggcgctgctactggctgctccagaaccctgacatcgtccttgtgcactacctgaacgtcccagccctggaggactgtggaaagggctgcagccccatcttttgttccatcagcagcgaccgtcgagagtggctgaagtggtcccgggaggagttgttgggacagctgaagcccatgtttcatggcatcaagtggagctgcgggaatggaacagaagagttctctgtagaacacctggtgcagcagattttggacacccacccaaccaagcctgctccccgaacccacgcctgtctctgcagtggggggcttggttctgggagccttacccacaaatgcagcagcacgaaacaccgcatcatctctcccaaagtggagccccgagctttaaccctgacctctatcccccaccctcaccccccagagcctcctccactgatagccccacttcccccagagctccccaaggcacacacctccccatcttcttcctcttcttcctcctcatcaggttttgcagagcccctagaaatcagacctagccctcccacttctcgagggggttcttcaagaggaggcactgctatcctcctcctgacaggactggagcagcgggctggaggcttgacgcccaccaggcacttggctccacaggctgatcctaggccttccatgagtttggcagtggttgtaggcactgagccttctgccccaccagctcctcccagtcctgcctttgaccctgatcgttttctcaacagcccccagaggggccagacatatggaggggggcagggagtaagcccagacttccccgaggcagaggccgctcataccccctgttctgccctagagcctgctgctgccctggagccccaggcagctgctcggggtcccccaccacagtcagtagcaggtgggagaagaggaaactgcttcttcatccaagatgatgacagtggggaggagctcaagggtcacggggctgccccacccataccttcaccccctccctcacccccaccctcacctgcccccttggagccgtcaagcagggtaggaagaggagaggccttgtttggaggacctgttggggccagtgaactggagcccttcagtctttcatcattcccagaccttatgggagaactcatcagtgacgaagctccaagcatccctgctccgaccccccagctgtctcctgctcttagcaccatcacagacttctccccagagtggtcctacccagagggtggggtcaaggtgctcatcacaggtccttggaccgaagccgccgagcattactcctgtgtctttgatcacatcgcagtgccagcctcacttgtccagcctggtgtcttacgctgctactgtcccgcccatgaggtagggctggtgtctttgcaggtggcagggcgggaggggcccctttctgcttctgtgctctttgagtatcgagcccgccgattcctgtctctgcctagtactcaacttgactggctgtcactggacgacaaccagttccggatgtccatactagagcgactggagcagatggagaagcggatggcagagatcgcagcagctgggcaggtgccttgccagggtcctgatgctcctccagttcaggatgaaggccaggggcctgggttcgaagcacgggtagtggtcttggtagaaagcatgatcccacgctccacctggaagggtcctgaacgtctggcccatggaagccccttccggggcatgagccttctgcacctggctgctgcccagggctatgcccgcctcatcgagaccctgagccagtggcggagtgtggagactggaagcttggacttagagcaggaggttgacccgctcaacgtggatcatttctcttgcacccctctgatgtgggcttgtgccctgggacacctggaagctgctgtgctccttttccgttggaaccgacaggcactgagcattcccgactctctgggccgtctgccattgtctgtggctcattcccggggtcatgtgcgccttgcccgctgccttgaggaactacagagacaggagccttcggtggagcccccatttgccctatcgccaccctcctccagcccagacactggtctgagcagcgtctcctcgccctcggagctgtcggatggcaccttttccgtcacgtcagcctattctagtgccccagatggcagtcccccccctgcacctctgccagcctctgagatgactatggaggacatggccccaggccagctttcctctggtgtcccagaagcccccctactcctcatggactatgaggctaccaactccaaggggcccctctcctcccttcctgccctcccaccagcttcagatgatggggctgctccggaggacgctgacagcccacaggctgtggatgtgatcccggtggacatgatctcactagccaagcagatcatcgaagccacaccggagcggattaaacgagaggacttcgtggggctgcccgaggctggagcctcaatgcgggagcggacaggggctgtggggctcagtgagaccatgtcctggctggccagctacctggagaatgtggaccatttccccagctcaacccctcccagcgaactgccctttgagcgaggtcgcctggctgtcccttcagcaccctcctgggcagagtttctctctgcatccaccagtggcaagatggaaagtgattttgccctgctgacactatcagatcacgagcagcgggaactgtatgaggctgcccgagtcatccagacggccttccgaaagtacaagggccggcggctgaaggagcagcaggaggtagcagcagctgtaatccagcgctgttaccggaagtacaagcagtttgcactctataagaagatgacccaggcggccatcctgatccagagcaagttccgaagctactatgaacagaagcgatttcagcagagccgccgagcggctgtgctcatccagcagcactaccgctcctaccgccgcaggcccggccctccccaccggacttcggccaccctgcctgcccgcaacaaaggctcctttctcaccaagaagcaggaccaggcagcccggaagatcatgagattcctgcggcgctgccgacacaggatgagggaactgaagcagaaccaggagctggaagggcttccccagccgggactggccacatgacctggccaccgcctttctcaccaccctgggggcgcctcgtgcagtcttaacagggagagggctttctggggcagggggagcccctgtcggcagctttcctgttcacctttgttggagccctctgtaggcctcctccctcctccccacgccttgctcccacacccctctcctcgtccctcctggtcgtgccccgtctcttttggtcctggctccagaaaacccgcgccccacatacctgcatcttccgctgtgacctccggagccctgcctgcccctgctccccagctcctcctgcctgcacccgactcggccccctcctgacttgccttatttatttgttcgacgcgtctctgaatgtatccgcctcggttcccaccactgccttcgctgcgcacgcccctcgtgtttcagggctgaccgtgtccccacccgactccgcatgtttgcgtctgtttcctccctctctggccctgtcttaccccatcacccgactctggccactgacctcagggccgaaggggaggtggtgtacataggaacgcgttgcggagtccgccccgtcccccgaggggaggggtcttgtacatactgtaacatacagagtatagtgaagaatctatttaaggcgccgcggggagggctgcacggccgggcttgtggttctctagcgcggcgggggcctcctgccggctccacgggcactttctacttgtgcatgggcttggtttatacgaattgccattaaacatcgctgcaccagccagcctccggcctctgtctgcgggggcggggcggggcctaggccagctggaggccgccatgcaccgcgggcctgggatctgcgcccaggccaggcgggcccagggttttccgcctccgacgtgtttccggccttaaaggcattccgcccttccctttaagacgcaccgccccctctcagtcactcccaagatggcggacctactgggctccatcctgagctccatggagaagccacccagcctcggtgaccaggagactcggcgcaaggcccgagaacaggccgcccgcctgaagaaactacaagagcaagagaaacaacagaaagtggagtttcgtaaaaggatggagaaggaggtgtcagatttcattcaagacagtgggcagatcaagaaaaagtttcagccaatgaacaagatcgagaggagcatactacatgatgtggtggaagtggctggcctgacatccttctcctttggggaagatgatgactgtcgctatgtcatgatcttcaaaaaggagtttgcaccctcagatgaagagctagactcttaccgtcgtggagaggaatgggacccccagaaggctgaggagaagcggaagctgaaggagctggcccagaggcaagaggaggaggcagcccagcaggggcctgtggtggtgagccctgccagcgactacaaggacaagtacagccacctcatcggcaagggagcagccaaagacgcagcccacatgctacaggccaataagacctacggctgtgtgcccgtggccaataagagggacacacgctccattgaagaggctatgaatgagatcagagccaagaagcgtctgcggcagagtggggaagagttgccgccaacctcctaggcgccccgcccagctccctttgacccctggggcagggcagggggcagggagagacaaggctgctgctattagagcccatcctggagccccacctctgaaccacctcctaccagctgtccctcaggctgggggaaaacaggtgtttgatttgtcaccgttggagcttggatatgtgcgtggcatgtgtgtgtgtgtgtgagagtgtgaatgcacaggtgggtatttaatctgtattattccccgttcttggaattttcttccccatggggctggggtactttacattcaataaatactgtttaacccaa

SEQ ID NO: 366223 - DNA, 5690 bp, Homo sapiens
aatgagatttttggagagtaaaataattcacaaaaaaatgttagacttttgtcttaggacaaaagaagggttcttaggagggcagtgggtcttgctgggtccagatacctagaagcatcctccactagctgccagaactcagcagagagtgagacactgacaggatgaccaagaggccaggctgagactctctgtgaaggagatgcccagctgagtgcctcctctcctacaggagattgcatcctacctgatcacctttgagaagcatgatgagtggctgtcttgtgccccaaagacaaggcctcagaatggctccatcatcctctacaatcgcaagaaggtgaaatatcggaaggatggttacctctggaagaagcggaaggatgggaagaccacccgagaggaccacatgaagctgaaggtccagggcatggaggaacagaggaagagttggggagcagactagccctccccccaccccagcctgtctcctggcagtgtctctatggctgctacgttcactcttccatcgtccccacattccatcggcgctgctactggctgctccagaaccctgacatcgtccttgtgcactacctgaacgtcccagccctggaggactgtggaaagggctgcagccccatcttttgttccatcagcagcgaccgtcgagagtggctgaagtggtcccgggaggagttgttgggacagctgaagcccatgtttcatggcatcaagtggagctgcgggaatggaacagaagagttctctgtagaacacctggtgcagcagattttggacacccacccaaccaagcctgctccccgaacccacgcctgtctctgcagtggggggcttggttctgggagccttacccacaaatgcagcagcacgaaacaccgcatcatctctcccaaagtggagccccgagctttaaccctgacctctatcccccaccctcaccccccagagcctcctccactgatagccccacttcccccagagctccccaaggcacacacctccccatcttcttcctcttcttcctcctcatcaggttttgcagagcccctagaaatcagacctagccctcccacttctcgagggggttcttcaagaggaggcactgctatcctcctcctgacaggactggagcagcgggctggaggcttgacgcccaccaggcacttggctccacaggctgatcctaggccttccatgagtttggcagtggttgtaggcactgagccttctgccccaccagctcctcccagtcctgcctttgaccctgatcgttttctcaacagcccccagaggggccagacatatggaggggggcagggagtaagcccagacttccccgaggcagaggccgctcataccccctgttctgccctagagcctgctgctgccctggagccccaggcagctgctcggggtcccccaccacagtcagtagcaggtgggagaagaggaaactgcttcttcatccaagatgatgacagtggggaggagctcaagggtcacggggctgccccacccataccttcaccccctccctcacccccaccctcacctgcccccttggagccgtcaagcagggtaggaagaggagaggccttgtttggaggacctgttggggccagtgaactggagcccttcagtctttcatcattcccagaccttatgggagaactcatcagtgacgaagctccaagcatccctgctccgaccccccagctgtctcctgctcttagcaccatcacagacttctccccagagtggtcctacccagagggtggggtcaaggtgctcatcacaggtccttggaccgaagccgccgagcattactcctgtgtctttgatcacatcgcagtgccagcctcacttgtccagcctggtgtcttacgctgctactgtcccgcccatgaggtagggctggtgtctttgcaggtggcagggcgggaggggcccctttctgcttctgtgctctttgagtatcgagcccgccgattcctgtctctgcctagtactcaacttgactggctgtcactggacgacaaccagttccggatgtccatactagagcgactggagcagatggagaagcggatggcagagatcgcagcagctgggcaggtgccttgccagggtcctgatgctcctccagttcaggatgaaggccaggggcctgggttcgaagcacgggtagtggtcttggtagaaagcatgatcccacgctccacctggaagggtcctgaacgtctggcccatggaagccccttccggggcatgagccttctgcacctggctgctgcccagggctatgcccgcctcatcgagaccctgagccagtggcggagtgtggagactggaagcttggacttagagcaggaggttgacccgctcaacgtggatcatttctcttgcacccctctgatgtgggcttgtgccctgggacacctggaagctgctgtgctccttttccgttggaaccgacaggcactgagcattcccgactctctgggccgtctgccattgtctgtggctcattcccggggtcatgtgcgccttgcccgctgccttgaggaactacagagacaggagccttcggtggagcccccatttgccctatcgccaccctcctccagcccagacactggtctgagcagcgtctcctcgccctcggagctgtcggatggcaccttttccgtcacgtcagcctattctagtgccccagatggcagtcccccccctgcacctctgccagcctctgagatgactatggaggacatggccccaggccagctttcctctggtgtcccagaagcccccctactcctcatggactatgaggctaccaactccaaggggcccctctcctcccttcctgccctcccaccagcttcagatgatggggctgctccggaggacgctgacagcccacaggctgtggatgtgatcccggtggacatgatctcactagccaagcagatcatcgaagccacaccggagcggattaaacgagaggacttcgtggggctgcccgaggctggagcctcaatgcgggagcggacaggggctgtggggctcagtgagaccatgtcctggctggccagctacctggagaatgtggaccatttccccagctcaacccctcccagcgaactgccctttgagcgaggtcgcctggctgtcccttcagcaccctcctgggcagagtttctctctgcatccaccagtggcaagatggaaagtgattttgccctgctgacactatcagatcacgagcagcgggaactgtatgaggctgcccgagtcatccagacggccttccgaaagtacaagggccggcggctgaaggagcagcaggaggtagcagcagctgtaatccagcgctgttaccggaagtacaagcagtttgcactctataagaagatgacccaggcggccatcctgatccagagcaagttccgaagctactatgaacagaagcgatttcagcagagccgccgagcggctgtgctcatccagcagcactaccgctcctaccgccgcaggcccggccctccccaccggacttcggccaccctgcctgcccgcaacaaaggctcctttctcaccaagaagcaggaccaggcagcccggaagatcatgagattcctgcggcgctgccgacacaggatgagggaactgaagcagaaccaggagctggaagggcttccccagccgggactggccacatgacctggccaccgcctttctcaccaccctgggggcgcctcgtgcagtcttaacagggagagggctttctggggcagggggagcccctgtcggcagctttcctgttcacctttgttggagccctctgtaggcctcctccctcctccccacgccttgctcccacacccctctcctcgtccctcctggtcgtgccccgtctcttttggtcctggctccagaaaacccgcgccccacatacctgcatcttccgctgtgacctccggagccctgcctgcccctgctccccagctcctcctgcctgcacccgactcggccccctcctgacttgccttatttatttgttcgacgcgtctctgaatgtatccgcctcggttcccaccactgccttcgctgcgcacgcccctcgtgtttcagggctgaccgtgtccccacccgactccgcatgtttgcgtctgtttcctccctctctggccctgtcttaccccatcacccgactctggccactgacctcagggccgaaggggaggtggtgtacataggaacgcgttgcggagtccgccccgtcccccgaggggaggggtcttgtacatactgtaacatacagagtatagtgaagaatctatttaaggcgccgcggggagggctgcacggccgggcttgtggttctctagcgcggcgggggcctcctgccggctccacgggcactttctacttgtgcatgggcttggtttatacgaattgccattaaacatcgctgcaccagccagcctccggcctctgtctgcgggggcggggcggggcctaggccagctggaggccgccatgcaccgcgggcctgggatctgcgcccaggccaggcgggcccagggttttccgcctccgacgtgtttccggccttaaaggcattccgcccttccctttaagacgcaccgccccctctcagtcactcccaagatggcggacctactgggctccatcctgagctccatggagaagccacccagcctcggtgaccaggagactcggcgcaaggcccgagaacaggccgcccgcctgaagaaactacaagagcaagagaaacaacagaaagtggagtttcgtaaaaggatggagaaggaggtgtcagatttcattcaagacagtgggcagatcaagaaaaagtttcagccaatgaacaagatcgagaggagcatactacatgatgtggtggaagtggctggcctgacatccttctcctttggggaagatgatgactgtcgctatgtcatgatcttcaaaaaggagtttgcaccctcagatgaagagctagactcttaccgtcgtggagaggaatgggacccccagaaggctgaggagaagcggaagctgaaggagctggcccagaggcaagaggaggaggcagcccagcaggggcctgtggtggtgagccctgccagcgactacaaggacaagtacagccacctcatcggcaagggagcagccaaagacgcagcccacatgctacaggccaataagacctacggctgtgtgcccgtggccaataagagggacacacgctccattgaagaggctatgaatgagatcagagccaagaagcgtctgcggcagagtggggaagagttgccgccaacctcctaggcgccccgcccagctccctttgacccctggggcagggcagggggcagggagagacaaggctgctgctattagagcccatcctggagccccacctctgaaccacctcctaccagctgtccctcaggctgggggaaaacaggtgtttgatttgtcaccgttggagcttggatatgtgcgtggcatgtgtgtgtgtgtgtgagagtgtgaatgcacaggtgggtatttaatctgtattattccccgttcttggaattttcttccccatggggctggggtactttacattcaataaatactgtttaacccaa

SEQ ID NO: 366224 - DNA, 3951 bp, Homo sapiens
cgcctcccgggttcaaacgattctcctgcctcagcctcctgagtagctgggattacagggtggggtcaaggtgctcatcacaggtccttggaccgaagccgccgagcattactcctgtgtctttgatcacatcgcagtgccagcctcacttgtccagcctggtgtcttacgctgctactgtcccgcccatgaggtagggctggtgtctttgcaggtggcagggcgggaggggcccctttctgcttctgtgctctttgagtatcgagcccgccgattcctgtctctgcctagtactcaacttgactggctgtcactggacgacaaccagttccggatgtccatactagagcgactggagcagatggagaagcggatggcagagatcgcagcagctgggcaggtgccttgccagggtcctgatgctcctccagttcaggatgaaggccaggggcctgggttcgaagcacgggtagtggtcttggtagaaagcatgatcccacgctccacctggaagggtcctgaacgtctggcccatggaagccccttccggggcatgagccttctgcacctggctgctgcccagggctatgcccgcctcatcgagaccctgagccagtggcggagtgtggagactggaagcttggacttagagcaggaggttgacccgctcaacgtggatcatttctcttgcacccctctgatgtgggcttgtgccctgggacacctggaagctgctgtgctccttttccgttggaaccgacaggcactgagcattcccgactctctgggccgtctgccattgtctgtggctcattcccggggtcatgtgcgccttgcccgctgccttgaggaactacagagacaggagccttcggtggagcccccatttgccctatcgccaccctcctccagcccagacactggtctgagcagcgtctcctcgccctcggagctgtcggatggcaccttttccgtcacgtcagcctattctagtgccccagatggcagtcccccccctgcacctctgccagcctctgagatgactatggaggacatggccccaggccagctttcctctggtgtcccagaagcccccctactcctcatggactatgaggctaccaactccaaggggcccctctcctcccttcctgccctcccaccagcttcagatgatggggctgctccggaggacgctgacagcccacaggctgtggatgtgatcccggtggacatgatctcactagccaagcagatcatcgaagccacaccggagcggattaaacgagaggacttcgtggggctgcccgaggctggagcctcaatgcgggagcggacaggggctgtggggctcagtgagaccatgtcctggctggccagctacctggagaatgtggaccatttccccagctcaacccctcccagcgaactgccctttgagcgaggtcgcctggctgtcccttcagcaccctcctgggcagagtttctctctgcatccaccagtggcaagatggaaagtgattttgccctgctgacactatcagatcacgagcagcgggaactgtatgaggctgcccgagtcatccagacggccttccgaaagtacaagggccggcggctgaaggagcagcaggaggtagcagcagctgtaatccagcgctgttaccggaagtacaagcagtttgcactctataagaagatgacccaggcggccatcctgatccagagcaagttccgaagctactatgaacagaagcgatttcagcagagccgccgagcggctgtgctcatccagcagcactaccgctcctaccgccgcaggcccggccctccccaccggacttcggccaccctgcctgcccgcaacaaaggctcctttctcaccaagaagcaggaccaggcagcccggaagatcatgagattcctgcggcgctgccgacacaggatgagggaactgaagcagaaccaggagctggaagggcttccccagccgggactggccacatgacctggccaccgcctttctcaccaccctgggggcgcctcgtgcagtcttaacagggagagggctttctggggcagggggagcccctgtcggcagctttcctgttcacctttgttggagccctctgtaggcctcctccctcctccccacgccttgctcccacacccctctcctcgtccctcctggtcgtgccccgtctcttttggtcctggctccagaaaacccgcgccccacatacctgcatcttccgctgtgacctccggagccctgcctgcccctgctccccagctcctcctgcctgcacccgactcggccccctcctgacttgccttatttatttgttcgacgcgtctctgaatgtatccgcctcggttcccaccactgccttcgctgcgcacgcccctcgtgtttcagggctgaccgtgtccccacccgactccgcatgtttgcgtctgtttcctccctctctggccctgtcttaccccatcacccgactctggccactgacctcagggccgaaggggaggtggtgtacataggaacgcgttgcggagtccgccccgtcccccgaggggaggggtcttgtacatactgtaacatacagagtatagtgaagaatctatttaaggcgccgcggggagggctgcacggccgggcttgtggttctctagcgcggcgggggcctcctgccggctccacgggcactttctacttgtgcatgggcttggtttatacgaattgccattaaacatcgctgcaccagccagcctccggcctctgtctgcgggggcggggcggggcctaggccagctggaggccgccatgcaccgcgggcctgggatctgcgcccaggccaggcgggcccagggttttccgcctccgacgtgtttccggccttaaaggcattccgcccttccctttaagacgcaccgccccctctcagtcactcccaagatggcggacctactgggctccatcctgagctccatggagaagccacccagcctcggtgaccaggagactcggcgcaaggcccgagaacaggccgcccgcctgaagaaactacaagagcaagagaaacaacagaaagtggagtttcgtaaaaggatggagaaggaggtgtcagatttcattcaagacagtgggcagatcaagaaaaagtttcagccaatgaacaagatcgagaggagcatactacatgatgtggtggaagtggctggcctgacatccttctcctttggggaagatgatgactgtcgctatgtcatgatcttcaaaaaggagtttgcaccctcagatgaagagctagactcttaccgtcgtggagaggaatgggacccccagaaggctgaggagaagcggaagctgaaggagctggcccagaggcaagaggaggaggcagcccagcaggggcctgtggtggtgagccctgccagcgactacaaggacaagtacagccacctcatcggcaagggagcagccaaagacgcagcccacatgctacaggccaataagacctacggctgtgtgcccgtggccaataagagggacacacgctccattgaagaggctatgaatgagatcagagccaagaagcgtctgcggcagagtggggaagagttgccgccaacctcctaggcgccccgcccagctccctttgacccctggggcagggcagggggcagggagagacaaggctgctgctattagagcccatcctggagccccacctctgaaccacctcctaccagctgtccctcaggctgggggaaaacaggtgtttgatttgtcaccgttggagcttggatatgtgcgtggcatgtgtgtgtgtgtgtgagagtgtgaatgcacaggtgggtatttaatctgtattattccccgttcttggaattttcttccccatggggctggggtactttacattcaataaatactgtttaacccaa

SEQ ID NO: 366225 - DNA, 2348 bp, Homo sapiens
cctaacttgggtgagcctcagggctttgggtctccgtccctctatttcagcccctgtccctcctccccacccctgcagtttgcactctataagaagatgacccaggcggccatcctgatccagagcaagttccgaagctactatgaacagaagcgatttcagcagagccgccgagcggctgtgctcatccagcagcactaccgctcctaccgccgcaggcccggccctccccaccggacttcggccaccctgcctgcccgcaacaaaggctcctttctcaccaagaagcaggaccaggcagcccggaagatcatgagattcctgcggcgctgccgacacaggatgagggaactgaagcagaaccaggagctggaagggcttccccagccgggactggccacatgacctggccaccgcctttctcaccaccctgggggcgcctcgtgcagtcttaacagggagagggctttctggggcagggggagcccctgtcggcagctttcctgttcacctttgttggagccctctgtaggcctcctccctcctccccacgccttgctcccacacccctctcctcgtccctcctggtcgtgccccgtctcttttggtcctggctccagaaaacccgcgccccacatacctgcatcttccgctgtgacctccggagccctgcctgcccctgctccccagctcctcctgcctgcacccgactcggccccctcctgacttgccttatttatttgttcgacgcgtctctgaatgtatccgcctcggttcccaccactgccttcgctgcgcacgcccctcgtgtttcagggctgaccgtgtccccacccgactccgcatgtttgcgtctgtttcctccctctctggccctgtcttaccccatcacccgactctggccactgacctcagggccgaaggggaggtggtgtacataggaacgcgttgcggagtccgccccgtcccccgaggggaggggtcttgtacatactgtaacatacagagtatagtgaagaatctatttaaggcgccgcggggagggctgcacggccgggcttgtggttctctagcgcggcgggggcctcctgccggctccacgggcactttctacttgtgcatgggcttggtttatacgaattgccattaaacatcgctgcaccagccagcctccggcctctgtctgcgggggcggggcggggcctaggccagctggaggccgccatgcaccgcgggcctgggatctgcgcccaggccaggcgggcccagggttttccgcctccgacgtgtttccggccttaaaggcattccgcccttccctttaagacgcaccgccccctctcagtcactcccaagatggcggacctactgggctccatcctgagctccatggagaagccacccagcctcggtgaccaggagactcggcgcaaggcccgagaacaggccgcccgcctgaagaaactacaagagcaagagaaacaacagaaagtggagtttcgtaaaaggatggagaaggaggtgtcagatttcattcaagacagtgggcagatcaagaaaaagtttcagccaatgaacaagatcgagaggagcatactacatgatgtggtggaagtggctggcctgacatccttctcctttggggaagatgatgactgtcgctatgtcatgatcttcaaaaaggagtttgcaccctcagatgaagagctagactcttaccgtcgtggagaggaatgggacccccagaaggctgaggagaagcggaagctgaaggagctggcccagaggcaagaggaggaggcagcccagcaggggcctgtggtggtgagccctgccagcgactacaaggacaagtacagccacctcatcggcaagggagcagccaaagacgcagcccacatgctacaggccaataagacctacggctgtgtgcccgtggccaataagagggacacacgctccattgaagaggctatgaatgagatcagagccaagaagcgtctgcggcagagtggggaagagttgccgccaacctcctaggcgccccgcccagctccctttgacccctggggcagggcagggggcagggagagacaaggctgctgctattagagcccatcctggagccccacctctgaaccacctcctaccagctgtccctcaggctgggggaaaacaggtgtttgatttgtcaccgttggagcttggatatgtgcgtggcatgtgtgtgtgtgtgtgagagtgtgaatgcacaggtgggtatttaatctgtattattccccgttcttggaattttcttccccatggggctggggtactttacattcaataaatactgtttaacccaa

SEQ ID NO: 366226 - DNA, 2182 bp, Homo sapiens
tgatcatcatgcctcactgccattccctgcctagggttcctgggggggccgaaggcatgcgatgccttctgtgaggtccatcttttgtttctttcaccagaggctcctttctcaccaagaagcaggaccaggcagcccggaagatcatgagattcctgcggcgctgccgacacaggatgagggaactgaagcagaaccaggagctggaagggcttccccagccgggactggccacatgacctggccaccgcctttctcaccaccctgggggcgcctcgtgcagtcttaacagggagagggctttctggggcagggggagcccctgtcggcagctttcctgttcacctttgttggagccctctgtaggcctcctccctcctccccacgccttgctcccacacccctctcctcgtccctcctggtcgtgccccgtctcttttggtcctggctccagaaaacccgcgccccacatacctgcatcttccgctgtgacctccggagccctgcctgcccctgctccccagctcctcctgcctgcacccgactcggccccctcctgacttgccttatttatttgttcgacgcgtctctgaatgtatccgcctcggttcccaccactgccttcgctgcgcacgcccctcgtgtttcagggctgaccgtgtccccacccgactccgcatgtttgcgtctgtttcctccctctctggccctgtcttaccccatcacccgactctggccactgacctcagggccgaaggggaggtggtgtacataggaacgcgttgcggagtccgccccgtcccccgaggggaggggtcttgtacatactgtaacatacagagtatagtgaagaatctatttaaggcgccgcggggagggctgcacggccgggcttgtggttctctagcgcggcgggggcctcctgccggctccacgggcactttctacttgtgcatgggcttggtttatacgaattgccattaaacatcgctgcaccagccagcctccggcctctgtctgcgggggcggggcggggcctaggccagctggaggccgccatgcaccgcgggcctgggatctgcgcccaggccaggcgggcccagggttttccgcctccgacgtgtttccggccttaaaggcattccgcccttccctttaagacgcaccgccccctctcagtcactcccaagatggcggacctactgggctccatcctgagctccatggagaagccacccagcctcggtgaccaggagactcggcgcaaggcccgagaacaggccgcccgcctgaagaaactacaagagcaagagaaacaacagaaagtggagtttcgtaaaaggatggagaaggaggtgtcagatttcattcaagacagtgggcagatcaagaaaaagtttcagccaatgaacaagatcgagaggagcatactacatgatgtggtggaagtggctggcctgacatccttctcctttggggaagatgatgactgtcgctatgtcatgatcttcaaaaaggagtttgcaccctcagatgaagagctagactcttaccgtcgtggagaggaatgggacccccagaaggctgaggagaagcggaagctgaaggagctggcccagaggcaagaggaggaggcagcccagcaggggcctgtggtggtgagccctgccagcgactacaaggacaagtacagccacctcatcggcaagggagcagccaaagacgcagcccacatgctacaggccaataagacctacggctgtgtgcccgtggccaataagagggacacacgctccattgaagaggctatgaatgagatcagagccaagaagcgtctgcggcagagtggggaagagttgccgccaacctcctaggcgccccgcccagctccctttgacccctggggcagggcagggggcagggagagacaaggctgctgctattagagcccatcctggagccccacctctgaaccacctcctaccagctgtccctcaggctgggggaaaacaggtgtttgatttgtcaccgttggagcttggatatgtgcgtggcatgtgtgtgtgtgtgtgagagtgtgaatgcacaggtgggtatttaatctgtattattccccgttcttggaattttcttccccatggggctggggtactttacattcaataaatactgtttaacccaa

SEQ ID NO: 366227 - DNA, 5969 bp, Homo sapiens
cctcttcccggttcgccctcacctcccgcttccgtcctcctcccccgcgccagggggcgccgctcaccgcagggccccacggcggaccagcgcgtgccggggactgtcccggagacccccgcacccggcacctgcactgtccctcgcccaccgcgtgcccgcggactctgctcccggcttctccagaacatccctctatgcgggcgggaccctcccacctcggaggttctcctgggaccaccactccgccggggggccgcccagagtgccaagcgtccgatccggcgccgcccaagtgcagcccaaggacccgctcccgctccgcaccctggcaggctgcctagccaggactgcgcacctgcgccctggggcggagtccttaccccaaccccagcttcactgcacatagccgagcccgacgggcctcctcccatctccatcctggacacctggcggagcccgtgctgagagcctccgccagctcccatctgttccccgaggagggcggggggctcaggctggagccagagcggtagatgggcacagactccccctccccccggcccctcaggccgggggtgaccttgccccctggagccctcaccatgaataccaaggacaccaccgaggttgctgaaaacagccaccacctgaagatctttctccccaagaagctgctggagtgtcttcctcgctgcccgctgctgcctccagagaggctacggtggaatacaaatgaggagattgcatcctacctgatcacctttgagaagcatgatgagtggctgtcttgtgccccaaagacaaggcctcagaatggctccatcatcctctacaatcgcaagaaggtgaaatatcggaaggatggttacctctggaagaagcggaaggatgggaagaccacccgagaggaccacatgaagctgaaggtccagggcatggagcctggcagtgtctctatggctgctacgttcactcttccatcgtccccacattccatcggcgctgctactggctgctccagaaccctgacatcgtccttgtgcactacctgaacgtcccagccctggaggactgtggaaagggctgcagccccatcttttgttccatcagcagcgaccgtcgagagtggctgaagtggtcccgggaggagttgttgggacagctgaagcccatgtttcatggcatcaagtggagctgcgggaatggaacagaagagttctctgtagaacacctggtgcagcagattttggacacccacccaaccaagcctgctccccgaacccacgcctgtctctgcagtggggggcttggttctgggagccttacccacaaatgcagcagcacgaaacaccgcatcatctctcccaaagtggagccccgagctttaaccctgacctctatcccccaccctcaccccccagagcctcctccactgatagccccacttcccccagagctccccaaggcacacacctccccatcttcttcctcttcttcctcctcatcaggttttgcagagcccctagaaatcagacctagccctcccacttctcgagggggttcttcaagaggaggcactgctatcctcctcctgacaggactggagcagcgggctggaggcttgacgcccaccaggcacttggctccacaggctgatcctaggccttccatgagtttggcagtggttgtaggcactgagccttctgccccaccagctcctcccagtcctgcctttgaccctgatcgttttctcaacagcccccagaggggccagacatatggaggggggcagggagtaagcccagacttccccgaggcagaggccgctcataccccctgttctgccctagagcctgctgctgccctggagccccaggcagctgctcggggtcccccaccacagtcagtagcaggtgggagaagaggaaactgcttcttcatccaagatgatgacagtggggaggagctcaagggtcacggggctgccccacccataccttcaccccctccctcacccccaccctcacctgcccccttggagccgtcaagcagggtaggaagaggagaggccttgtttggaggacctgttggggccagtgaactggagcccttcagtctttcatcattcccagaccttatgggagaactcatcagtgacgaagctccaagcatccctgctccgaccccccagctgtctcctgctcttagcaccatcacagacttctccccagagtggtcctacccagagggtggggtcaaggtgctcatcacaggtccttggaccgaagccgccgagcattactcctgtgtctttgatcacatcgcagtgccagcctcacttgtccagcctggtgtcttacgctgctactgtcccgcccatgaggtagggctggtgtctttgcaggtggcagggcgggaggggcccctttctgcttctgtgctctttgagtatcgagcccgccgattcctgtctctgcctagtactcaacttgactggctgtcactggacgacaaccagttccggatgtccatactagagcgactggagcagatggagaagcggatggcagagatcgcagcagctgggcaggtgccttgccagggtcctgatgctcctccagttcaggatgaaggccaggggcctgggttcgaagcacgggtagtggtcttggtagaaagcatgatcccacgctccacctggaagggtcctgaacgtctggcccatggaagccccttccggggcatgagccttctgcacctggctgctgcccagggctatgcccgcctcatcgagaccctgagccagtggcggagtgtggagactggaagcttggacttagagcaggaggttgacccgctcaacgtggatcatttctcttgcacccctctgatgtgggcttgtgccctgggacacctggaagctgctgtgctccttttccgttggaaccgacaggcactgagcattcccgactctctgggccgtctgccattgtctgtggctcattcccggggtcatgtgcgccttgcccgctgccttgaggaactacagagacaggagccttcggtggagcccccatttgccctatcgccaccctcctccagcccagacactggtctgagcagcgtctcctcgccctcggagctgtcggatggcaccttttccgtcacgtcagcctattctagtgccccagatggcagtcccccccctgcacctctgccagcctctgagatgactatggaggacatggccccaggccagctttcctctggtgtcccagaagcccccctactcctcatggactatgaggctaccaactccaaggggcccctctcctcccttcctgccctcccaccagcttcagatgatggggctgctccggaggacgctgacagcccacaggctgtggatgtgatcccggtggacatgatctcactagccaagcagatcatcgaagccacaccggagcggattaaacgagaggacttcgtggggctgcccgaggctggagcctcaatgcgggagcggacaggggctgtggggctcagtgagaccatgtcctggctggccagctacctggagaatgtggaccatttccccagctcaacccctcccagcgaactgccctttgagcgaggtcgcctggctgtcccttcagcaccctcctgggcagagtttctctctgcatccaccagtggcaagatggaaagtgattttgccctgctgacactatcagatcacgagcagcgggaactgtatgaggctgcccgagtcatccagacggccttccgaaagtacaagggccggcggctgaaggagcagcaggaggtagcagcagctgtaatccagcgctgttaccggaagtacaagcagtttgcactctataagaagatgacccaggcggccatcctgatccagagcaagttccgaagctactatgaacagaagcgatttcagcagagccgccgagcggctgtgctcatccagcagcactaccgctcctaccgccgcaggcccggccctccccaccggacttcggccaccctgcctgcccgcaacaaaggctcctttctcaccaagaagcaggaccaggcagcccggaagatcatgagattcctgcggcgctgccgacacaggatgagggaactgaagcagaaccaggagctggaagggcttccccagccgggactggccacatgacctggccaccgcctttctcaccaccctgggggcgcctcgtgcagtcttaacagggagagggctttctggggcagggggagcccctgtcggcagctttcctgttcacctttgttggagccctctgtaggcctcctccctcctccccacgccttgctcccacacccctctcctcgtccctcctggtcgtgccccgtctcttttggtcctggctccagaaaacccgcgccccacatacctgcatcttccgctgtgacctccggagccctgcctgcccctgctccccagctcctcctgcctgcacccgactcggccccctcctgacttgccttatttatttgttcgacgcgtctctgaatgtatccgcctcggttcccaccactgccttcgctgcgcacgcccctcgtgtttcagggctgaccgtgtccccacccgactccgcatgtttgcgtctgtttcctccctctctggccctgtcttaccccatcacccgactctggccactgacctcagggccgaaggggaggtggtgtacataggaacgcgttgcggagtccgccccgtcccccgaggggaggggtcttgtacatactgtaacatacagagtatagtgaagaatctatttaaggcgccgcggggagggctgcacggccgggcttgtggttctctagcgcggcgggggcctcctgccggctccacgggcactttctacttgtgcatgggcttggtttatacgaattgccattaaacatcgctgcaccagccagcctccggcctctgtctgcgggggcggggcggggcctaggccagctggaggccgccatgcaccgcgggcctgggatctgcgcccaggccaggcgggcccagggttttccgcctccgacgtgtttccggccttaaaggcattccgcccttccctttaagacgcaccgccccctctcagtcactcccaagatggcggacctactgggctccatcctgagctccatggagaagccacccagcctcggtgaccaggagactcggcgcaaggcccgagaacaggccgcccgcctgaagaaactacaagagcaagagaaacaacagaaagtggagtttcgtaaaaggatggagaaggaggtgtcagatttcattcaagacagtgggcagatcaagaaaaagtttcagccaatgaacaagatcgagaggagcatactgagctggcccagaggcaagaggaggaggcagcccagcaggggcctgtggtggtgagccctgccagcgactacaaggacaagtacagccacctcatcggcaagggagcagccaaagacgcagcccacatgctacaggccaataagacctacggctgtgtgcccgtggccaataagagggacacacgctccattgaagaggctatgaatgagatcagagccaagaagcgtctgcggcagagtggggaagagttgccgccaacctcctaggcgccccgcccagctccctttgacccctggggcagggcagggggcagggagagacaaggctgctgctattagagcccatcctggagccccacctctgaaccacctcctaccagctgtccctcaggctgggggaaaacaggtgtttgatttgtcaccgttggagcttggatatgtgcgtggcatgtgtgtgtgtgtgtgagagtgtgaatgcacaggtgggtatttaatctgtattattccccgttcttggaattttcttccccatggggctggggtactttacattcaataaatactgtttaacccaa

SEQ ID NO: 366228 - DNA, 6251 bp, Homo sapiens
cctcttcccggttcgccctcacctcccgcttccgtcctcctcccccgcgccagggggcgccgctcaccgcagggccccacggcggaccagcgcgtgccggggactgtcccggagacccccgcacccggcacctgcactgtccctcgcccaccgcgtgcccgcggactctgctcccggcttctccagaacatccctctatgcgggcgggaccctcccacctcggaggttctcctgggaccaccactccgccggggggccgcccagagtgccaagcgtccgatccggcgccgcccaagtgcagcccaaggacccgctcccgctccgcaccctggcaggctgcctagccaggactgcgcacctgcgccctggggcggagtccttaccccaaccccagcttcactgcacatagccgagcccgacgggcctcctcccatctccatcctggacacctggcggagcccgtgctgagagcctccgccagctcccatctgttccccgaggagggcggggggctcaggctggagccagagcggtagatgggcacagactccccctccccccggcccctcaggccgggggtgaccttgccccctggagccctcaccatgaataccaaggacaccaccgaggttgctgaaaacagccaccacctgaagatctttctccccaagaagctgctggagtgtcttcctcgctgcccgctgctgcctccagagaggctacggtggaatacaaatgaggagattgcatcctacctgatcacctttgagaagcatgatgagtggctgtcttgtgccccaaagacaaggcctcagaatggctccatcatcctctacaatcgcaagaaggtgaaatatcggaaggatggttacctctggaagaagcggaaggatgggaagaccacccgagaggaccacatgaagctgaaggtccagggcatggagcctggcagtgtctctatggctgctacgttcactcttccatcgtccccacattccatcggcgctgctactggctgctccagaaccctgacatcgtccttgtgcactacctgaacgtcccagccctggaggactgtggaaagggctgcagccccatcttttgttccatcagcagcgaccgtcgagagtggctgaagtggtcccgggaggagttgttgggacagctgaagcccatgtttcatggcatcaagtggagctgcgggaatggaacagaagagttctctgtagaacacctggtgcagcagattttggacacccacccaaccaagcctgctccccgaacccacgcctgtctctgcagtggggggcttggttctgggagccttacccacaaatgcagcagcacgaaacaccgcatcatctctcccaaagtggagccccgagctttaaccctgacctctatcccccaccctcaccccccagagcctcctccactgatagccccacttcccccagagctccccaaggcacacacctccccatcttcttcctcttcttcctcctcatcaggttttgcagagcccctagaaatcagacctagccctcccacttctcgagggggttcttcaagaggaggcactgctatcctcctcctgacaggactggagcagcgggctggaggcttgacgcccaccaggcacttggctccacaggctgatcctaggccttccatgagtttggcagtggttgtaggcactgagccttctgccccaccagctcctcccagtcctgcctttgaccctgatcgttttctcaacagcccccagaggggccagacatatggaggggggcagggagtaagcccagacttccccgaggcagaggccgctcataccccctgttctgccctagagcctgctgctgccctggagccccaggcagctgctcggggtcccccaccacagtcagtagcaggtgggagaagaggaaactgcttcttcatccaagatgatgacagtggggaggagctcaagggtcacggggctgccccacccataccttcaccccctccctcacccccaccctcacctgcccccttggagccgtcaagcagggtaggaagaggagaggccttgtttggaggacctgttggggccagtgaactggagcccttcagtctttcatcattcccagaccttatgggagaactcatcagtgacgaagctccaagcatccctgctccgaccccccagctgtctcctgctcttagcaccatcacagacttctccccagagtggtcctacccagagggtggggtcaaggtgctcatcacaggtccttggaccgaagccgccgagcattactcctgtgtctttgatcacatcgcagtgccagcctcacttgtccagcctggtgtcttacgctgctactgtcccgcccatgaggtagggctggtgtctttgcaggtggcagggcgggaggggcccctttctgcttctgtgctctttgagtatcgagcccgccgattcctgtctctgcctagtactcaacttgactggctgtcactggacgacaaccagttccggatgtccatactagagcgactggagcagatggagaagcggatggcagagatcgcagcagctgggcaggtgccttgccagggtcctgatgctcctccagttcaggatgaaggccaggggcctgggttcgaagcacgggtagtggtcttggtagaaagcatgatcccacgctccacctggaagggtcctgaacgtctggcccatggaagccccttccggggcatgagccttctgcacctggctgctgcccagggctatgcccgcctcatcgagaccctgagccagtggcggagtgtggagactggaagcttggacttagagcaggaggttgacccgctcaacgtggatcatttctcttgcacccctctgatgtgggcttgtgccctgggacacctggaagctgctgtgctccttttccgttggaaccgacaggcactgagcattcccgactctctgggccgtctgccattgtctgtggctcattcccggggtcatgtgcgccttgcccgctgccttgaggaactacagagacaggagccttcggtggagcccccatttgccctatcgccaccctcctccagcccagacactggtctgagcagcgtctcctcgccctcggagctgtcggatggcaccttttccgtcacgtcagcctattctagtgccccagatggcagtcccccccctgcacctctgccagcctctgagatgactatggaggacatggccccaggccagctttcctctggtgtcccagaagcccccctactcctcatggactatgaggctaccaactccaaggggcccctctcctcccttcctgccctcccaccagcttcagatgatggggctgctccggaggacgctgacagcccacaggctgtggatgtgatcccggtggacatgatctcactagccaagcagatcatcgaagccacaccggagcggattaaacgagaggacttcgtggggctgcccgaggctggagcctcaatgcgggagcggacaggggctgtggggctcagtgagaccatgtcctggctggccagctacctggagaatgtggaccatttccccagctcaacccctcccagcgaactgccctttgagcgaggtcgcctggctgtcccttcagcaccctcctgggcagagtttctctctgcatccaccagtggcaagatggaaagtgattttgccctgctgacactatcagatcacgagcagcgggaactgtatgaggctgcccgagtcatccagacggccttccgaaagtacaagggccggcggctgaaggagcagcaggaggtagcagcagctgtaatccagcgctgttaccggaagtacaagcagtttgcactctataagaagatgacccaggcggccatcctgatccagagcaagttccgaagctactatgaacagaagcgatttcagcagagccgccgagcggctgtgctcatccagcagcactaccgctcctaccgccgcaggcccggccctccccaccggacttcggccaccctgcctgcccgcaacaaaggctcctttctcaccaagaagcaggaccaggcagcccggaagatcatgagattcctgcggcgctgccgacacaggatgagggaactgaagcagaaccaggagctggaagggcttccccagccgggactggccacatgacctggccaccgcctttctcaccaccctgggggcgcctcgtgcagtcttaacagggagagggctttctggggcagggggagcccctgtcggcagctttcctgttcacctttgttggagccctctgtaggcctcctccctcctccccacgccttgctcccacacccctctcctcgtccctcctggtcgtgccccgtctcttttggtcctggctccagaaaacccgcgccccacatacctgcatcttccgctgtgacctccggagccctgcctgcccctgctccccagctcctcctgcctgcacccgactcggccccctcctgacttgccttatttatttgttcgacgcgtctctgaatgtatccgcctcggttcccaccactgccttcgctgcgcacgcccctcgtgtttcagggctgaccgtgtccccacccgactccgcatgtttgcgtctgtttcctccctctctggccctgtcttaccccatcacccgactctggccactgacctcagggccgaaggggaggtggtgtacataggaacgcgttgcggagtccgccccgtcccccgaggggaggggtcttgtacatactgtaacatacagagtatagtgaagaatctatttaaggcgccgcggggagggctgcacggccgggcttgtggttctctagcgcggcgggggcctcctgccggctccacgggcactttctacttgtgcatgggcttggtttatacgaattgccattaaacatcgctgcaccagccagcctccggcctctgtctgcgggggcggggcggggcctaggccagctggaggccgccatgcaccgcgggcctgggatctgcgcccaggccaggcgggcccagggttttccgcctccgacgtgtttccggccttaaaggcattccgcccttccctttaagacgcaccgccccctctcagtcactcccaagatggcggacctactgggctccatcctgagctccatggagaagccacccagcctcggtgaccaggagactcggcgcaaggcccgagaacaggccgcccgcctgaagaaactacaagagcaagagaaacaacagaaagtggagtttcgtaaaaggatggagaaggaggtgtcagatttcattcaagacagtgggcagatcaagaaaaagtttcagccaatgaacaagatcgagaggagcatactacatgatgtggtggaagtggctggcctgacatccttctcctttggggaagatgatgactgtcgctatgtcatgatcttcaaaaaggagtttgcaccctcagatgaagagctagactcttaccgtcgtggagaggaatgggacccccagaaggctgaggagaagcggaagctgaaggagctggcccagaggcaagaggaggaggcagcccagcaggggcctgtggtggtgagccctgccagcgactacaaggacaagtacagccacctcatcggcaagggagcagccaaagacgcagcccacatgctacaggccaataagacctacggctgtgtgcccgtggccaataagagggacacacgctccattgaagaggctatgaatgagatcagagccaagaagcgtctgcggcagagtggggaagagttgccgccaacctcctaggcgccccgcccagctccctttgacccctggggcagggcagggggcagggagagacaaggctgctgctattagagcccatcctggagccccacctctgaaccacctcctaccagctgtccctcaggctggccaacgctgctcacattcataaataggaatatgggcaacgctgctcacattcataaataggaatatgggctcctagaataagtaatatttaattattagtgaaaagcaccattttgagaggtttttttgtgtttgtttgagactgagtctcgctcttctactgcccatgctggagtgcagtggcgtgatctccactcactgcggcctccacctcctaggtttaggtgattctcagcctcctgagtggctgaaattacaggcgtgtgccaccatgcccagctaatac

SEQ ID NO: 366229 - DNA, 6174 bp, Homo sapiens
  misc_feature (5910)..(5910): n is a, c, g, or t
  misc_feature (5913)..(5913): n is a, c, g, or t
cctcttcccggttcgccctcacctcccgcttccgtcctcctcccccgcgccagggggcgccgctcaccgcagggccccacggcggaccagcgcgtgccggggactgtcccggagacccccgcacccggcacctgcactgtccctcgcccaccgcgtgcccgcggactctgctcccggcttctccagaacatccctctatgcgggcgggaccctcccacctcggaggttctcctgggaccaccactccgccggggggccgcccagagtgccaagcgtccgatccggcgccgcccaagtgcagcccaaggacccgctcccgctccgcaccctggcaggctgcctagccaggactgcgcacctgcgccctggggcggagtccttaccccaaccccagcttcactgcacatagccgagcccgacgggcctcctcccatctccatcctggacacctggcggagcccgtgctgagagcctccgccagctcccatctgttccccgaggagggcggggggctcaggctggagccagagcggtagatgggcacagactccccctccccccggcccctcaggccgggggtgaccttgccccctggagccctcaccatgaataccaaggacaccaccgaggttgctgaaaacagccaccacctgaagatctttctccccaagaagctgctggagtgtcttcctcgctgcccgctgctgcctccagagaggctacggtggaatacaaatgaggagattgcatcctacctgatcacctttgagaagcatgatgagtggctgtcttgtgccccaaagacaaggcctcagaatggctccatcatcctctacaatcgcaagaaggtgaaatatcggaaggatggttacctctggaagaagcggaaggatgggaagaccacccgagaggaccacatgaagctgaaggtccagggcatggagcctggcagtgtctctatggctgctacgttcactcttccatcgtccccacattccatcggcgctgctactggctgctccagaaccctgacatcgtccttgtgcactacctgaacgtcccagccctggaggactgtggaaagggctgcagccccatcttttgttccatcagcagcgaccgtcgagagtggctgaagtggtcccgggaggagttgttgggacagctgaagcccatgtttcatggcatcaagtggagctgcgggaatggaacagaagagttctctgtagaacacctggtgcagcagattttggacacccacccaaccaagcctgctccccgaacccacgcctgtctctgcagtggggggcttggttctgggagccttacccacaaatgcagcagcacgaaacaccgcatcatctctcccaaagtggagccccgagctttaaccctgacctctatcccccaccctcaccccccagagcctcctccactgatagccccacttcccccagagctccccaaggcacacacctccccatcttcttcctcttcttcctcctcatcaggttttgcagagcccctagaaatcagacctagccctcccacttctcgagggggttcttcaagaggaggcactgctatcctcctcctgacaggactggagcagcgggctggaggcttgacgcccaccaggcacttggctccacaggctgatcctaggccttccatgagtttggcagtggttgtaggcactgagccttctgccccaccagctcctcccagtcctgcctttgaccctgatcgttttctcaacagcccccagaggggccagacatatggaggggggcagggagtaagcccagacttccccgaggcagaggccgctcataccccctgttctgccctagagcctgctgctgccctggagccccaggcagctgctcggggtcccccaccacagtcagtagcaggtgggagaagaggaaactgcttcttcatccaagatgatgacagtggggaggagctcaagggtcacggggctgccccacccataccttcaccccctccctcacccccaccctcacctgcccccttggagccgtcaagcagggtaggaagaggagaggccttgtttggaggacctgttggggccagtgaactggagcccttcagtctttcatcattcccagaccttatgggagaactcatcagtgacgaagctccaagcatccctgctccgaccccccagctgtctcctgctcttagcaccatcacagacttctccccagagtggtcctacccagagggtggggtcaaggtgctcatcacaggtccttggaccgaagccgccgagcattactcctgtgtctttgatcacatcgcagtgccagcctcacttgtccagcctggtgtcttacgctgctactgtcccgcccatgaggtagggctggtgtctttgcaggtggcagggcgggaggggcccctttctgcttctgtgctctttgagtatcgagcccgccgattcctgtctctgcctagtactcaacttgactggctgtcactggacgacaaccagttccggatgtccatactagagcgactggagcagatggagaagcggatggcagagatcgcagcagctgggcaggtgccttgccagggtcctgatgctcctccagttcaggatgaaggccaggggcctgggttcgaagcacgggtagtggtcttggtagaaagcatgatcccacgctccacctggaagggtcctgaacgtctggcccatggaagccccttccggggcatgagccttctgcacctggctgctgcccagggctatgcccgcctcatcgagaccctgagccagtggcggagtgtggagactggaagcttggacttagagcaggaggttgacccgctcaacgtggatcatttctcttgcacccctctgatgtgggcttgtgccctgggacacctggaagctgctgtgctccttttccgttggaaccgacaggcactgagcattcccgactctctgggccgtctgccattgtctgtggctcattcccggggtcatgtgcgccttgcccgctgccttgaggaactacagagacaggagccttcggtggagcccccatttgccctatcgccaccctcctccagcccagacactggtctgagcagcgtctcctcgccctcggagctgtcggatggcaccttttccgtcacgtcagcctattctagtgccccagatggcagtcccccccctgcacctctgccagcctctgagatgactatggaggacatggccccaggccagctttcctctggtgtcccagaagcccccctactcctcatggactatgaggctaccaactccaaggggcccctctcctcccttcctgccctcccaccagcttcagatgatggggctgctccggaggacgctgacagcccacaggctgtggatgtgatcccggtggacatgatctcactagccaagcagatcatcgaagccacaccggagcggattaaacgagaggacttcgtggggctgcccgaggctggagcctcaatgcgggagcggacaggggctgtggggctcagtgagaccatgtcctggctggccagctacctggagaatgtggaccatttccccagctcaacccctcccagcgaactgccctttgagcgaggtcgcctggctgtcccttcagcaccctcctgggcagagtttctctctgcatccaccagtggcaagatggaaagtgattttgccctgctgacactatcagatcacgagcagcgggaactgtatgaggctgcccgagtcatccagacggccttccgaaagtacaagggccggcggctgaaggagcagcaggaggtagcagcagctgtaatccagcgctgttaccggaagtacaagcagtttgcactctataagaagatgacccaggcggccatcctgatccagagcaagttccgaagctactatgaacagaagcgatttcagcagagccgccgagcggctgtgctcatccagcagcactaccgctcctaccgccgcaggcccggccctccccaccggacttcggccaccctgcctgcccgcaacaaaggctcctttctcaccaagaagcaggaccaggcagcccggaagatcatgagattcctgcggcgctgccgacacaggatgagggaactgaagcagaaccaggagctggaagggcttccccagccgggactggccacatgacctggccaccgcctttctcaccaccctgggggcgcctcgtgcagtcttaacagggagagggctttctggggcagggggagcccctgtcggcagctttcctgttcacctttgttggagccctctgtaggcctcctccctcctccccacgccttgctcccacacccctctcctcgtccctcctggtcgtgccccgtctcttttggtcctggctccagaaaacccgcgccccacatacctgcatcttccgctgtgacctccggagccctgcctgcccctgctccccagctcctcctgcctgcacccgactcggccccctcctgacttgccttatttatttgttcgacgcgtctctgaatgtatccgcctcggttcccaccactgccttcgctgcgcacgcccctcgtgtttcagggctgaccgtgtccccacccgactccgcatgtttgcgtctgtttcctccctctctggccctgtcttaccccatcacccgactctggccactgacctcagggccgaaggggaggtggtgtacataggaacgcgttgcggagtccgccccgtcccccgaggggaggggtcttgtacatactgtaacatacagagtatagtgaagaatctatttaaggcgccgcggggagggctgcacggccgggcttgtggttctctagcgcggcgggggcctcctgccggctccacgggcactttctacttgtgcatgggcttggtttatacgaattgccattaaacatcgctgcaccagccagcctccggcctctgtctgcgggggcggggcggggcctaggccagctggaggccgccatgcaccgcgggcctgggatctgcgcccaggccaggcgggcccagggttttccgcctccgacgtgtttccggccttaaaggcattccgcccttccctttaagacgcaccgccccctctcagtcactcccaagatggcggacctactgggctccatcctgagctccatggagaagccacccagcctcggtgaccaggagactcggcgcaaggcccgagaacaggccgcccgcctgaagaaactacaagagcaagagaaacaacagaaagtggagtttcgtaaaaggatggagaaggaggtgtcagatttcattcaagacagtgggcagatcaagaaaaagtttcagccaatgaacaagatcgagaggagcatactacatgatgtggtggaagtggctggcctgacatccttctcctttggggaagatgatgactgtcgctatgtcatgatcttcaaaaaggagtttgcaccctcagatgaagagctagactcttaccgtcgtggagaggaatgggacccccagaaggctgaggagaagcggaagctgaaggagctggcccagaggcaagaggaggaggcagcccagcaggggcctgtggtggtgagccctgccagcgactacaaggacaagtacagccacctcatcggcaagggagcagccaaagacgcagcccacatgctacaggccaataagacctacggctgtgtgcccgtggccaataagagggacacacgctccattgaagaggctatgaatgagatcagagccaagaagcgtctgcggcagagtggggaagagttgccgccaacctcctaggcgccccgcccagctccctttgacccctggggcagggcagggggcagggagagacagtgtgtatagagcatctnganccacttgacactctacagtgtctcagtggggacacaggctttggatgtcacgggagctggaatgtgcgtgcagtagttgtcttacaccgtcactcgcaggggaaatacaggaaatccagaggaaaataccccaggcgggggagtactaacaaggtcctaaaaaaaaaaaccggctttctcgcaaaaagtgacgtgtcccctatgagtcctatgtatctaatatacataacacacgtaatcgaccatttattatttcatgtg

SEQ ID NO: 366230 - DNA, 4960 bp, Homo sapiens
cctcttcccggttcgccctcacctcccgcttccgtcctcctcccccgcgccagggggcgccgctcaccgcagggccccacggcggaccagcgcgtgccggggactgtcccggagacccccgcacccggcacctgcactgtccctcgcccaccgcgtgcccgcggactctgctcccggcttctccagaacatccctctatgcgggcgggaccctcccacctcggaggttctcctgggaccaccactccgccggggggccgcccagagtgccaagcgtccgatccggcgccgcccaagtgcagcccaaggacccgctcccgctccgcaccctggcaggctgcctagccaggactgcgcacctgcgccctggggcggagtccttaccccaaccccagcttcactgcacatagccgagcccgacgggcctcctcccatctccatcctggacacctggcggagcccgtgctgagagcctccgccagctcccatctgttccccgaggagggcggggggctcaggctggagccagagcggtagatgggcacagactccccctccccccggcccctcaggccgggggtgaccttgccccctggagccctcaccatgaataccaaggacaccaccgaggttgctgaaaacagccaccacctgaagatctttctccccaagaagctgctggagtgtcttcctcgctgcccgctgctgcctccagagaggctacggtggaatacaaatgaggagattgcatcctacctgatcacctttgagaagcatgatgagtggctgtcttgtgccccaaagacaaggcctcagaatggctccatcatcctctacaatcgcaagaaggtgaaatatcggaaggatggttacctctggaagaagcggaaggatgggaagaccacccgagaggaccacatgaagctgaaggtccagggcatggagcctggcagtgtctctatggctgctacgttcactcttccatcgtccccacattccatcggcgctgctactggctgctccagaaccctgacatcgtccttgtgcactacctgaacgtcccagccctggaggactgtggaaagggctgcagccccatcttttgttccatcagcagcgaccgtcgagagtggctgaagtggtcccgggaggagttgttgggacagctgaagcccatgtttcatggcatcaagtggagctgcgggaatggaacagaagagttctctgtagaacacctggtgcagcagattttggacacccacccaaccaagcctgctccccgaacccacgcctgtctctgcagtggggggcttggttctgggagccttacccacaaatgcagcagcacgaaacaccgcatcatctctcccaaagtggagccccgagctttaaccctgacctctatcccccaccctcaccccccagagcctcctccactgatagccccacttcccccagagctccccaaggcacacacctccccatcttcttcctcttcttcctcctcatcaggttttgcagagcccctagaaatcagacctagccctcccacttctcgagggggttcttcaagaggaggcactgctatcctcctcctgacaggactggagcagcgggctggaggcttgacgcccaccaggcacttggctccacaggctgatcctaggccttccatgagtttggcagtggttgtaggcactgagccttctgccccaccagctcctcccagtcctgcctttgaccctgatcgttttctcaacagcccccagaggggccagacatatggaggggggcagggagtaagcccagacttccccgaggcagaggccgctcataccccctgttctgccctagagcctgctgctgccctggagccccaggcagctgctcggggtcccccaccacagtcagtagcaggtgggagaagaggaaactgcttcttcatccaagatgatgacagtggggaggagctcaagggtcacggggctgccccacccataccttcaccccctccctcacccccaccctcacctgcccccttggagccgtcaagcagggtaggaagaggagaggccttgtttggaggacctgttggggccagtgaactggagcccttcagtctttcatcattcccagaccttatgggagaactcatcagtgacgaagctccaagcatccctgctccgaccccccagctgtctcctgctcttagcaccatcacagacttctccccagagtggtcctacccagagggtggggtcaaggtgctcatcacaggtccttggaccgaagccgccgagcattactcctgtgtctttgatcacatcgcagtgccagcctcacttgtccagcctggtgtcttacgctgctactgtcccgcccatgaggtagggctggtgtctttgcaggtggcagggcgggaggggcccctttctgcttctgtgctctttgagtatcgagcccgccgattcctgtctctgcctagtactcaacttgactggctgtcactggacgacaaccagttccggatgtccatactagagcgactggagcagatggagaagcggatggcagagatcgcagcagctgggcaggtgccttgccagggtcctgatgctcctccagttcaggatgaaggccaggggcctgggttcgaagcacgggtagtggtcttggtagaaagcatgatcccacgctccacctggaagggtcctgaacgtctggcccatggaagccccttccggggcatgagccttctgcacctggctgctgcccagggctatgcccgcctcatcgagaccctgagccagtggcggagtgtggagactggaagcttggacttagagcaggaggttgacccgctcaacgtggatcatttctcttgcacccctctgatgtgggcttgtgccctgggacacctggaagctgctgtgctccttttccgttggaaccgacaggcactgagcattcccgactctctgggccgtctgccattgtctgtggctcattcccggggtcatgtgcgccttgcccgctgccttgaggaactacagagacaggagccttcggtggagcccccatttgccctatcgccaccctcctccagcccagacactggtctgagcagcgtctcctcgccctcggagctgtcggatggcaccttttccgtcacgtcagcctattctagtgccccagatggcagtcccccccctgcacctctgccagcctctgagatgactatggaggacatggccccaggccagctttcctctggtgtcccagaagcccccctactcctcatggactatgaggctaccaactccaaggggcccctctcctcccttcctgccctcccaccagcttcagatgatggggctgctccggaggacgctgacagcccacaggctgtggatgtgatcccggtggacatgatctcactagccaagcagatcatcgaagccacaccggagcggattaaacgagaggacttcgtggggctgcccgaggctggagcctcaatgcgggagcggacaggggctgtggggctcagtgagaccatgtcctggctggccagctacctggagaatgtggaccatttccccagctcaacccctcccagcgaactgccctttgagcgaggtcgcctggctgtcccttcagcaccctcctgggcagagtttctctctgcatccaccagtggcaagatggaaagtgattttgccctgctgacactatcagatcacgagcagcgggaactgtatgaggctgcccgagtcatccagacggccttccgaaagtacaagggccggcggctgaaggagcagcaggaggtagcagcagctgtaatccagcgctgttaccggaagtacaagcagtttgcactctataagaagatgacccaggcggccatcctgatccagagcaagttccgaagctactatgaacagaagcgatttcagcagagccgccgagcggctgtgctcatccagcagcactaccgctcctaccgccgcaggcccggccctccccaccggacttcggccaccctgcctgcccgcaacaaaggctcctttctcaccaagaagcaggaccaggcagcccggaagatcatgagattcctgcggcgctgccgacacaggatgagggaactgaagcagaaccaggagctggaagggcttccccagccgggactggccacatgacctggccaccgcctttctcaccaccctgggggcgcctcgtgcagtcttaacagggagagggctttctggggcagggggagcccctgtcggcagctttcctgttcacctttgttggagccctctgtaggcctcctccctcctccccacgccttgctcccacacccctctcctcgtccctcctggtcgtgccccgtctcttttggtcctggctccagaaaacccgcgccccacatacctgcatcttccgctgtgacctccggagccctgcctgcccctgctccccagctcctcctgcctgcacccgactcggccccctcctgacttgccttatttatttgttcgacgcgtctctgaatgtatccgcctcggttcccaccactgccttcgctgcgcacgcccctcgtgtttcagggctgaccgtgtccccacccgactccgcatgtttgcgtctgtttcctccctctctggccctgtcttaccccatcacccgactctggccactgacctcagggccgaaggggaggtggtgtacataggaacgcgttgcggagtccgccccgtcccccgaggggaggggtcttgtacatactgtaacatacagagtatagtgaagaatctatttaaggcgccgcggggagggctgcacggccgggcttgtggttctctagcgcggcgggggcctcctgccggctccacgggcactttctacttgtgcatgggcttggtttatacgaattgccattaaacatcgctgcacca

SEQ ID NO: 366231 - DNA, 5705 bp, Homo sapiens
cctcttcccggttcgccctcacctcccgcttccgtcctcctcccccgcgccagggggcgccgctcaccgcagggccccacggcggaccagcgcgtgccggggactgtcccggagacccccgcacccggcacctgcactgtccctcgcccaccgcgtgcccgcggactctgctcccggcttctccagaacatccctctatgcgggcgggaccctcccacctcggaggttctcctgggaccaccactccgccggggggccgcccagagtgccaagcgtccgatccggcgccgcccaagtgcagcccaaggacccgctcccgctccgcaccctggcaggctgcctagccaggactgcgcacctgcgccctggggcggagtccttaccccaaccccagcttcactgcacatagccgagcccgacgggcctcctcccatctccatcctggacacctggcggagcccgtgctgagagcctccgccagctcccatctgttccccgaggagggcggggggctcaggctggagccagagcggtagatgggcacagactccccctccccccggcccctcaggccgggggtgaccttgccccctggagccctcaccatgaataccaaggacaccaccgaggttgctgaaaacagccaccacctgaagatctttctccccaagaagctgctggagtgtcttcctcgctgcccgctgctgcctccagagaggctacggtggaatacaaatgaggagattgcatcctacctgatcacctttgagaagcatgatgagtggctgtcttgtgccccaaagacaaggcctcagaatggctccatcatcctctacaatcgcaagaaggtgaaatatcggaaggatggttacctctggaagaagcggaaggatgggaagaccacccgagaggaccacatgaagctgaaggtccagggcatggagcctggcagtgtctctatggctgctacgttcactcttccatcgtccccacattccatcggcgctgctactggctgctccagaaccctgacatcgtccttgtgcactacctgaacgtcccagccctggaggactgtggaaagggctgcagccccatcttttgttccatcagcagcgaccgtcgagagtggctgaagtggtcccgggaggagttgttgggacagctgaagcccatgtttcatggcatcaagtggagctgcgggaatggaacagaagagttctctgtagaacacctggtgcagcagattttggacacccacccaaccaagcctgctccccgaacccacgcctgtctctgcagtggggggcttggttctgggagccttacccacaaatgcagcagcacgaaacaccgcatcatctctcccaaagtggagccccgagctttaaccctgacctctatcccccaccctcaccccccagagcctcctccactgatagccccacttcccccagagctccccaaggcacacacctccccatcttcttcctcttcttcctcctcatcaggttttgcagagcccctagaaatcagacctagccctcccacttctcgagggggttcttcaagaggaggcactgctatcctcctcctgacaggactggagcagcgggctggaggcttgacgcccaccaggcacttggctccacaggctgatcctaggccttccatgagtttggcagtggttgtaggcactgagccttctgccccaccagctcctcccagtcctgcctttgaccctgatcgttttctcaacagcccccagaggggccagacatatggaggggggcagggagtaagcccagacttccccgaggcagaggccgctcataccccctgttctgccctagagcctgctgctgccctggagccccaggcagctgctcggggtcccccaccacagtcagtagcaggtgggagaagaggaaactgcttcttcatccaagatgatgacagtggggaggagctcaagggtcacggggctgccccacccataccttcaccccctccctcacccccaccctcacctgcccccttggagccgtcaagcagggtaggaagaggagaggccttgtttggaggacctgttggggccagtgaactggagcccttcagtctttcatcattcccagaccttatgggagaactcatcagtgacgaagctccaagcatccctgctccgaccccccagctgtctcctgctcttagcaccatcacagacttctccccagagtggtcctacccagagggtggggtcaaggtgctcatcacaggtccttggaccgaagccgccgagcattactcctgtgtctttgatcacatcgcagtgccagcctcacttgtccagcctggtgtcttacgctgctactgtcccgcccatgaggtagggctggtgtctttgcaggtggcagggcgggaggggcccctttctgcttctgtgctctttgagtatcgagcccgccgattcctgtctctgcctagtactcaacttgactggctgtcactggacgacaaccagttccggatgtccatactagagcgactggagcagatggagaagcggatggcagagatcgcagcagctgggcaggtgccttgccagggtcctgatgctcctccagttcaggatgaaggccaggggcctgggttcgaagcacgggtagtggtcttggtagaaagcatgatcccacgctccacctggaagggtcctgaacgtctggcccatggaagccccttccggggcatgagccttctgcacctggctgctgcccagggctatgcccgcctcatcgagaccctgagccagtggcggagtgtggagactggaagcttggacttagagcaggaggttgacccgctcaacgtggatcatttctcttgcacccctctgatgtgggcttgtgccctgggacacctggaagctgctgtgctccttttccgttggaaccgacaggcactgagcattcccgactctctgggccgtctgccattgtctgtggctcattcccggggtcatgtgcgccttgcccgctgccttgaggaactacagagacaggagccttcggtggagcccccatttgccctatcgccaccctcctccagcccagacactggtctgagcagcgtctcctcgccctcggagctgtcggatggcaccttttccgtcacgtcagcctattctagtgccccagatggcagtcccccccctgcacctctgccagcctctgagatgactatggaggacatggccccaggccagctttcctctggtgtcccagaagcccccctactcctcatggactatgaggctaccaactccaaggggcccctctcctcccttcctgccctcccaccagcttcagatgatggggctgctccggaggacgctgacagcccacaggctgtggatgtgatcccggtggacatgatctcactagccaagcagatcatcgaagccacaccggagcggattaaacgagaggacttcgtggggctgcccgaggctggagcctcaatgcgggagcggacaggggctgtggggctcagtgagaccatgtcctggctggccagctacctggagaatgtggaccatttccccagctcaacccctcccagcgaactgccctttgagcgaggtcgcctggctgtcccttcagcaccctcctgggcagagtttctctctgcatccaccagtggcaagatggaaagtgattttgccctgctgacactatcagatcacgagcagcgggaactgtatgaggctgcccgagtcatccagacggccttccgaaagtacaagggccggcggctgaaggagcagcaggaggtagcagcagctgtaatccagcgctgttaccggaagtacaagcagtttgcactctataagaagatgacccaggcggccatcctgatccagagcaagttccgaagctactatgaacagaagcgatttcagcagagccgccgagcggctgtgctcatccagcagcactaccgctcctaccgccgcaggcccggccctccccaccggacttcggccaccctgcctgcccgcaacaaaggctcctttctcaccaagaagcaggaccaggcagcccggaagatcatgagattcctgcggcgctgccgacacaggatgagggaactgaagcagaaccaggagctggaagggcttccccagccgggactggccacatgacctggccaccgcctttctcaccaccctgggggcgcctcgtgcagtcttaacagggagagggctttctggggcagggggagcccctgtcggcagctttcctgttcacctttgttggagccctctgtaggcctcctccctcctccccacgccttgctcccacacccctctcctcgtccctcctggtcgtgccccgtctcttttggtcctggctccagaaaacccgcgccccacatacctgcatcttccgctgtgacctccggagccctgcctgcccctgctccccagctcctcctgcctgcacccgactcggccccctcctgacttgccttatttatttgttcgacgcgtctctgaatgtatccgcctcggttcccaccactgccttcgctgcgcacgcccctcgtgtttcagggctgaccgtgtccccacccgactccgcatgtttgcgtctgtttcctccctctctggccctgtcttaccccatcacccgactctggccactgacctcagggccgaaggggaggtggtgtacataggaacgcgttgcggagtccgccccgtcccccgaggggaggggtcttgtacatactgtaacatacagagtatagtgaagaatctatttaaggcgccgcggggagggctgcacggccgggcttgtggttctctagcgcggcgggggcctcctgccggctccacgggcactttctacttgtgcatgggcttggtttatacgaattgccattaaacatcgctgcaccagccagcctccggcctctgtctgcgggggcggggcggggcctaggccagctggaggccgccatgcaccgcgggcctgggatctgcgcccaggccaggcgggcccagggttttccgcctccgacgtgtttccggccttaaaggcattccgcccttccctttaagacgcaccgccccctctcagtcactcccaagatggcggacctactgggctccatcctgagctccatggagaagccacccagcctcggtgaccaggagactcggcgcaaggcccgagaacaggccgcccgcctgaagaaactacaagagcaagagaaacaacagaaagtggagtttcgtaaaaggatggagaaggaggtgtcagatttcattcaagacagtgggcagatcaagaaaaagtttcagccaatgaacaagatcgagaggagcatactacatgatgtggtggaagtggctggcctgacatccttctcctttggggaagatgatgactgtcgctatgtcatgatcttcaaaaaggagtttgcaccctcagatgaagagctagactcttaccgtcgtggagagggaaaacaggtgtttgatttgtcaccgttggagcttggatatgtgcgtggcatgtgtgtgtgtgtgtgagagtgtgaatgcacaggtgggtatttaatctgtattattccccgttcttggaattttcttccccatggggctggggtactttacattcaataaatactgtttaacccaa

SEQ ID NO: 366232 - DNA, 4303 bp, Homo sapiens
cctcttcccggttcgccctcacctcccgcttccgtcctcctcccccgcgccagggggcgccgctcaccgcagggccccacggcggaccagcgcgtgccggggactgtcccggagacccccgcacccggcacctgcactgtccctcgcccaccgcgtgcccgcggactctgctcccggcttctccagaacatccctctatgcgggcgggaccctcccacctcggaggttctcctgggaccaccactccgccggggggccgcccagagtgccaagcgtccgatccggcgccgcccaagtgcagcccaaggacccgctcccgctccgcaccctggcaggctgcctagccaggactgcgcacctgcgccctggggcggagtccttaccccaaccccagcttcactgcacatagccgagcccgacgggcctcctcccatctccatcctggacacctggcggagcccgtgctgagagcctccgccagctcccatctgttccccgaggagggcggggggctcaggctggagccagagcggtagatgggcacagactccccctccccccggcccctcaggccgggggtgaccttgccccctggagccctcaccatgaataccaaggacaccaccgaggttgctgaaaacagccaccacctgaagatctttctccccaagaagctgctggagtgtcttcctcgctgcccgctgctgcctccagagaggctacggtggaatacaaatgaggagattgcatcctacctgatcacctttgagaagcatgatgagtggctgtcttgtgccccaaagacaaggcctcagaatggctccatcatcctctacaatcgcaagaaggtgaaatatcggaaggatggttacctctggaagaagcggaaggatgggaagaccacccgagaggaccacatgaagctgaaggtccagggcatggagcctggcagtgtctctatggctgctacgttcactcttccatcgtccccacattccatcggcgctgctactggctgctccagaaccctgacatcgtccttgtgcactacctgaacgtcccagccctggaggactgtggaaagggctgcagccccatcttttgttccatcagcagcgaccgtcgagagtggctgaagtggtcccgggaggagttgttgggacagctgaagcccatgtttcatggcatcaagtggagctgcgggaatggaacagaagagttctctgtagaacacctggtgcagcagattttggacacccacccaaccaagcctgctccccgaacccacgcctgtctctgcagtggggggcttggttctgggagccttacccacaaatgcagcagcacgaaacaccgcatcatctctcccaaagtggagccccgagctttaaccctgacctctatcccccaccctcaccccccagagcctcctccactgatagccccacttcccccagagctccccaaggcacacacctccccatcttcttcctcttcttcctcctcatcaggttttgcagagcccctagaaatcagacctagccctcccacttctcgagggggttcttcaagaggaggcactgctatcctcctcctgacaggactggagcagcgggctggaggcttgacgcccaccaggcacttggctccacaggctgatcctaggccttccatgagtttggcagtggttgtaggcactgagccttctgccccaccagctcctcccagtcctgcctttgaccctgatcgttttctcaacagcccccagaggggccagacatatggaggggggcagggagtaagcccagacttccccgaggcagaggccgctcataccccctgttctgccctagagcctgctgctgccctggagccccaggcagctgctcggggtcccccaccacagtcagtagcaggtgggagaagaggaaactgcttcttcatccaagatgatgacagtggggaggagctcaagggtcacggggctgccccacccataccttcaccccctccctcacccccaccctcacctgcccccttggagccgtcaagcagggtaggaagaggagaggccttgtttggaggacctgttggggccagtgaactggagcccttcagtctttcatcattcccagaccttatgggagaactcatcagtgacgaagctccaagcatccctgctccgaccccccagctgtctcctgctcttagcaccatcacagacttctccccagagtggtcctacccagagggtggggtcaaggtgctcatcacaggtccttggaccgaagccgccgagcattactcctgtgtctttgatcacatcgcagtgccagcctcacttgtccagcctggtgtcttacgctgctactgtcccgcccatgaggtagggctggtgtctttgcaggtggcagggcgggaggggcccctttctgcttctgtgctctttgagtatcgagcccgccgattcctgtctctgcctagtactcaacttgactggctgtcactggacgacaaccagttccggatgtccatactagagcgactggagcagatggagaagcggatggcagagatcgcagcagctgggcaggtgccttgccagggtcctgatgctcctccagttcaggatgaaggccaggggcctgggttcgaagcacgggtagtggtcttggtagaaagcatgatcccacgctccacctggaagggtcctgaacgtctggcccatggaagccccttccggggcatgagccttctgcacctggctgctgcccagggctatgcccgcctcatcgagaccctgagccagtggcggagtgtggagactggaagcttggacttagagcaggaggttgacccgctcaacgtggatcatttctcttgcacccctctgatgtgggcttgtgccctgggacacctggaagctgctgtgctccttttccgttggaaccgacaggcactgagcattcccgactctctgggccgtctgccattgtctgtggctcattcccggggtcatgtgcgccttgcccgctgccttgaggaactacagagacaggagccttcggtggagcccccatttgccctatcgccaccctcctccagcccagacactggtctgagcagcgtctcctcgccctcggagctgtcggatggcaccttttccgtcacgtcagcctattctagtgccccagatggcagtcccccccctgcacctctgccagcctctgagatgactatggaggacatggccccaggccagctttcctctggtgtcccagaagcccccctactcctcatggactatgaggctaccaactccaaggggcccctctcctcccttcctgccctcccaccagcttcagatgatggggctgctccggaggacgctgacagcccacaggctgtggatgtgatcccggtggacatgatctcactagccaagcagatcatcgaagccacaccggagcggattaaacgagaggacttcgtggggctgcccgaggctggagcctcaatgcgggagcggacaggggctgtggggctcagtgagaccatgtcctggctggccagctacctggagaatgtggaccatttccccagctcaacccctcccagcgaactgccctttgagcgaggtcgcctggctgtcccttcagcaccctcctgggcagagtttctctctgcatccaccagtggcaagatggaaagtgattttgccctgctgacactatcagatcacgagcagcgggaactgtatgaggctgcccgagtcatccagacggccttccgaaagtacaagggccggcggctgaaggagcagcaggaggtagcagcagctgtaatccagcgctgttaccggaagtacaagcaggtgagacccttctccctcaaaagtgtaaccagcaacccaccaacccacacccacgcctaaccattccagaatgttgccagagccctaactccccttctctctccacaagctgacctggattgcacttaagtttgcactctataagaagatgacccaggcggccatcctgatccagagcaagttccgaagggaggtggtgtacataggaacgcgttgcggagtccgccccgtcccccgaggggaggggtcttgtacatactgtaacatacagagtatagtgaagaatctatttaaggcgccgcggggagggctgcacggccgggcttgtggttctctagcgcggcgggggcctcctgccggctccacgggcactttctacttgtgcatgggcttggtttatacgaattgccattaaacatcgctgcacca

SEQ ID NO: 366233 - DNA, 3259 bp, Homo sapiens
cctcttcccggttcgccctcacctcccgcttccgtcctcctcccccgcgccagggggcgccgctcaccgcagggccccacggcggaccagcgcgtgccggggactgtcccggagacccccgcacccggcacctgcactgtccctcgcccaccgcgtgcccgcggactctgctcccggcttctccagaacatccctctatgcgggcgggaccctcccacctcggaggttctcctgggaccaccactccgccggggggccgcccagagtgccaagcgtccgatccggcgccgcccaagtgcagcccaaggacccgctcccgctccgcaccctggcaggctgcctagccaggactgcgcacctgcgccctggggcggagtccttaccccaaccccagcttcactgcacatagccgagcccgacgggcctcctcccatctccatcctggacacctggcggagcccgtgctgagagcctccgccagctcccatctgttccccgaggagggcggggggctcaggctggagccagagcggtagatgggcacagactccccctccccccggcccctcaggccgggggtgaccttgccccctggagccctcaccatgaataccaaggacaccaccgaggttgctgaaaacagccaccacctgaagatctttctccccaagaagctgctggagtgtcttcctcgctgcccgctgctgcctccagagaggctacggtggaatacaaatgaggagattgcatcctacctgatcacctttgagaagcatgatgagtggctgtcttgtgccccaaagacaaggcctcagaatggctccatcatcctctacaatcgcaagaaggtgaaatatcggaaggatggttacctctggaagaagcggaaggatgggaagaccacccgagaggaccacatgaagctgaaggtccagggcatggagcctggcagtgtctctatggctgctacgttcactcttccatcgtccccacattccatcggcgctgctactggctgctccagaaccctgacatcgtccttgtgcactacctgaacgtcccagccctggaggactgtggaaagggctgcagccccatcttttgttccatcagcagcgaccgtcgagagtggctgaagtggtcccgggaggagttgttgggacagctgaagcccatgtttcatggcatcaagtggagctgcgggaatggaacagaagagttctctgtagaacacctggtgcagcagattttggacacccacccaaccaagcctgctccccgaacccacgcctgtctctgcagtggggggcttggttctgggagccttacccacaaatgcagcagcacgaaacaccgcatcatctctcccaaagtggagccccgagctttaaccctgacctctatcccccaccctcaccccccagagcctcctccactgatagccccacttcccccagagctccccaaggcacacacctccccatcttcttcctcttcttcctcctcatcaggttttgcagagcccctagaaatcagacctagccctcccacttctcgagggggttcttcaagaggaggcactgctatcctcctcctgacaggactggagcagcgggctggaggcttgacgcccaccaggcacttggctccacaggctgatcctaggccttccatgagtttggcagtggttgtaggcactgagccttctgccccaccagctcctcccagtcctgcctttgaccctgatcgttttctcaacagcccccagaggggccagacatatggaggggggcagggagtaagcccagacttccccgaggcagaggccgctcataccccctgttctgccctagagcctgctgctgccctggagccccaggcagctgctcggggtcccccaccacagtcagtagcaggtgggagaagaggaaactgcttcttcatccaagatgatgacagtggggaggagctcaagggtcacggggctgccccacccataccttcaccccctccctcacccccaccctcacctgcccccttggagccgtcaagcagggtaggaagaggagaggccttgtttggaggacctgttggggccagtgaactggagcccttcagtctttcatcattcccagaccttatgggagaactcatcagtgacgaagctccaagcatccctgctccgaccccccagctgtctcctgctcttagcaccatcacagacttctccccagagtggtcctacccagagggtggggtcaaggtgctcatcacaggtccttggaccgaagccgccgagcattactcctgtgtctttgatcacatcgcagtgccagcctcacttgtccagcctggtgtcttacgctgctactgtcccgcccatgaggtagggctggtgtctttgcaggtggcagggcgggaggggcccctttctgcttctgtgctctttgagtatcgagcccgccgattcctgtctctgcctagtactcaacttgactggctgtcactggacgacaaccagttccggatgtccatactagagcgactggagcagatggagaagcggatggcagagatcgcagcagctgggcaggtgccttgccagggtcctgatgctcctccagttcaggatgaaggccaggggcctgggttcgaagcacgggtagtggtcttggtagaaagcatgatcccacgctccacctggaagggtcctgaacgtctggcccatggaagccccttccggggcatgagccttctgcacctggctgctgcccagggctatgcccgcctcatcgagaccctgagccagtggcggagtgtggagactggaagcttggacttagagcaggaggttgacccgctcaacgtggatcatttctcttgcacccctctgatgtgggcttgtgccctgggacacctggaagctgctgtgctccttttccgttggaaccgacaggcactgagcattcccgactctctgggccgtctgccattgtctgtggctcattcccggggtcatgtgcgccttgcccgctgccttgaggaactacagagacaggagccttcggtggagcccccatttgccctatcgccaccctcctccagcccagacactggtctgagcagcgtctcctcgccctcggagctgtcggatggcaccttttccgtcacgtcagcctattctagtgccccagatggcagtcccccccctgcactccagcctgggcgacagagcaaaactctgtctcaaaaaaaaaaa

SEQ ID NO: 366234 - DNA, 3944 bp, Homo sapiens
cctcttcccggttcgccctcacctcccgcttccgtcctcctcccccgcgccagggggcgccgctcaccgcagggccccacggcggaccagcgcgtgccggggactgtcccggagacccccgcacccggcacctgcactgtccctcgcccaccgcgtgcccgcggactctgctcccggcttctccagaacatccctctatgcgggcgggaccctcccacctcggaggttctcctgggaccaccactccgccggggggccgcccagagtgccaagcgtccgatccggcgccgcccaagtgcagcccaaggacccgctcccgctccgcaccctggcaggctgcctagccaggactgcgcacctgcgccctggggcggagtccttaccccaaccccagcttcactgcacatagccgagcccgacgggcctcctcccatctccatcctggacacctggcggagcccgtgctgagagcctccgccagctcccatctgttccccgaggagggcggggggctcaggctggagccagagcggtagatgggcacagactccccctccccccggcccctcaggccgggggtgaccttgccccctggagccctcaccatgaataccaaggacaccaccgaggttgctgaaaacagccaccacctgaagatctttctccccaagaagctgctggagtgtcttcctcgctgcccgctgctgcctccagagaggctacggtggaatacaaatgaggagattgcatcctacctgatcacctttgagaagcatgatgagtggctgtcttgtgccccaaagacaaggcctcagaatggctccatcatcctctacaatcgcaagaaggtgaaatatcggaaggatggttacctctggaagaagcggaaggatgggaagaccacccgagaggaccacatgaagctgaaggtccagggcatggagcctggcagtgtctctatggctgctacgttcactcttccatcgtccccacattccatcggcgctgctactggctgctccagaaccctgacatcgtccttgtgcactacctgaacgtcccagccctggaggactgtggaaagggctgcagccccatcttttgttccatcagcagcgaccgtcgagagtggctgaagtggtcccgggaggagttgttgggacagctgaagcccatgtttcatggcatcaagtggagctgcgggaatggaacagaagagttctctgtagaacacctggtgcagcagattttggacacccacccaaccaagcctgctccccgaacccacgcctgtctctgcagtggggggcttggttctgggagccttacccacaaatgcagcagcacgaaacaccgcatcatctctcccaaagtggagccccgagctttaaccctgacctctatcccccaccctcaccccccagagcctcctccactgatagccccacttcccccagagctccccaaggcacacacctccccatcttcttcctcttcttcctcctcatcaggttttgcagagcccctagaaatcagacctagccctcccacttctcgagggggttcttcaagaggaggcactgctatcctcctcctgacaggactggagcagcgggctggaggcttgacgcccaccaggcacttggctccacaggctgatcctaggccttccatgagtttggcagtggttgtaggcactgagccttctgccccaccagctcctcccagtcctgcctttgaccctgatcgttttctcaacagcccccagaggggccagacatatggaggggggcagggagtaagcccagacttccccgaggcagaggccgctcataccccctgttctgccctagagcctgctgctgccctggagccccaggcagctgctcggggtcccccaccacagtcagtagcaggtgggagaagaggaaactgcttcttcatccaagatgatgacagtggggaggagctcaagggtcacggggctgccccacccataccttcaccccctccctcacccccaccctcacctgcccccttggagccgtcaagcagggtaggaagaggagaggccttgtttggaggacctgttggggccagtgaactggagcccttcagtctttcatcattcccagaccttatgggagaactcatcagtgacgaagctccaagcatccctgctccgaccccccagctgtctcctgctcttagcaccatcacagacttctccccagagtggtcctacccagagggtggggtcaaggtgctcatcacaggtccttggaccgaagccgccgagcattactcctgtgtctttgatcacatcgcagtgccagcctcacttgtccagcctggtgtcttacgctgctactgtcccgcccatgaggtagggctggtgtctttgcaggtggcagggcgggaggggcccctttctgcttctgtgctctttgagtatcgagcccgccgattcctgtctctgcctagtactcaacttgactggctgtcactggacgacaaccagttccggatgtccatactagagcgactggagcagatggagaagcggatggcagagatcgcagcagctgggcaggtgccttgccagggtcctgatgctcctccagttcaggatgaaggccaggggcctgggttcgaagcacgggtagtggtcttggtagaaagcatgatcccacgctccacctggaagggtcctgaacgtctggcccatggaagccccttccggggcatgagccttctgcacctggctgctgcccagggctatgcccgcctcatcgagaccctgagccagtggcggagtgtggagactggaagcttggacttagagcaggaggttgacccgctcaacgtggatcatttctcttgcacccctctgatgtgggcttgtgccctgggacacctggaagctgctgtgctccttttccgttggaaccgacaggcactgagcattcccgactctctgggccgtctgccattgtctgtggctcattcccggggtcatgtgcgccttgcccgctgccttgaggaactacagagacaggagccttcggtggagcccccatttgccctatcgccaccctcctccagcccagacactggtctgagcagcgtctcctcgccctcggagctgtcggatggcaccttttccgtcacgtcagcctattctagtgccccagatggcagtcccccccctgcacctctgccagcctctgagatgactatggaggacatggccccaggccagctttcctctggtgtcccagaagcccccctactcctcatggactatgaggctaccaactccaaggggcccctctcctcccttcctgccctcccaccagcttcagatgatggggctgctccggaggacgctgacagcccacaggctgtggatgtgatcccggtactgcttatattgatggagttatgggggctagaagtggagtaggaagggtgaggccgacttccatgaagcagaatcaaagtctggcttcagtttaggaagggcctatttacttcattttgggacaggcaaggtagccttttgcttagctccttttagaccatgtgacttggaagtcatgaggcagcggaggttgaaaattctggctggtcccacaatacagatgttggaaaaaaaaaatttggccgggcttggtggcttacgcctgtaatcccagcactttgggtggccagggcgggtggatcacttcaggccaggagtttgagaccagcctgggcaacatggcgaaaccccctctctacaagaaatacaaaaattaactgggcactgtggtatgtgcctgtaatcccagctgtttgagaggctgagacacaagaatcacttgaacccaggaggcacaggctgcagtgagccgagactgcaccactgcactccagcctgggtgacagactgagactgtctc

SEQ ID NO: 366235 - DNA, 394 bp, Homo sapiens
caatttcaggcatccactgagggtcttggaatgaacccctgtggataagggggactattagatagaataaacatcaataaatgcttgatgaataaacgctaatcctaccttcccagcctgacacctcccagtggacaccacacttcacttgaagccttagaaacctttcccacccatgcttccagccctggcttcatgttgccatttctcacccccagaacaggccgcccgcctgaagaaactacaagagcaagagaaacaacagaaagtggagtttcgtaaaagggtgagaacaactggagtgatcaaaggcagactcaggaaggacttccaataagttaaaattggaaggttgaggactcagttttgctgaaaatgtcttgagagaggtgac

SEQ ID NO: 366236 - DNA, 642 bp, Homo sapiens
agacccccgcacccggcacctgcactgtccctcgcccaccgcgtgcccgcggactctgctcccggcttctccagaacatccctctatgcgggcgggaccctcccacctcggaggttctcctgggaccaccactccgccggggggccgcccagagtgccaagcgtccgatccggcgccgcccaagtgcagcccaaggacccgctcccgctccgcaccctggcaggctgcctagccaggactgcgcacctgcgccctggggcggagtccttaccccaaccccagcttcactgcacatagccgagcccgacgggcctcctcccatctccatcctggacacctggcggagcccgtgctgagagcctccgccagctcccatctgttccccgaggagggcggggggctcaggctggagccagagcggtagatggggtaggctaggcctggaggccaggggaggcagaggcgtttggggagagggagctacgtagagagggctgtcagccggagggtgggttgtcctgagggtgggaatctgggtgtctggcccagattctatcaggtcctaaccaacctggaggagagaataggttaggttcagttatcagatctgcccttccccttggaaaaatcaaacagagaagg

SEQ ID NO: 366237 - DNA, 351 bp, Homo sapiens
cttatattttggggaactttcatatcctgacttacaacactttgacttcttgacctccttaagctagtgtccttgactgcctcttcccaccggccctgtacagcttgcctcctagtgcctttacttctgatgttcctgctttgcccactttttccctcattgggctctgctgtctctctcccaaaccctccaggagtgtggagactggaagcttggacttagagcaggaggttgacccgctcaacgtggatcatttctcttgcacccctctggtgaggatgacggattcctgagcgcatatggggcagggagcaatgggaacagcccttgaaaaggaagatcctgaggaat

SEQ ID NO: 366238 - DNA, 889 bp, Homo sapiens
tgatcatcatgcctcactgccattccctgcctagggttcctgggggggccgaaggcatgcgatgccttctgtgaggtccatcttttgtttctttcaccagaggctcctttctcaccaagaagcaggaccaggcagcccggaagatcatgagattcctgcggcgctgccgacacaggatgagggaactgaagcagagaaagagaaacatatcagtattacaaaacaactatgaaaaaagtcaggaaactttcaaacagcttcaatctgatttctatgggagggaatctgaacttctagccaccaggcaagatcttaagtctgtagaagagaagctttctctagccacaggaggacttgatttcaaacagaaatcaattttgtggaaactcaaattaatctgattcacagaacctgaagactgccaaggctaacatgtggagcaggattcagcaagaaagaacagcaattgcaggagcgattgtaaagcactacaagactttccggaaagaaccaggtcctgaaagaaaaagaacctggtacactgagaaggaaataggtatccagtacaaggattggttctacagaaaaaaaatctggaaggccctggaaaggtattccaggccaaagaggctttaccaaggcaagaaggaaggaacgaaacaattccctggaaacaagattttgagaccctttaagttcagaaaccaaagattcccgctggggattgcattaccgcgaatccaaccgaccgttccgaacctccccacgtctcatgtgggacgagctttagtgacaggacttctaccggaagggcaactcatccacagtttgcttcttgaaacccccaagggtttagggagtcgaaggaggcgctattatggaaactgca

SEQ ID NO: 366239 - DNA, 5673 bp, Homo sapiens
agccggcgcagcggggggtcggtgtggggtagaatggccgctgccgccgtcacccgcgggaccccgggagcacagactccccctccccccggcccctcaggccgggggtgaccttgccccctggagccctcaccatgaataccaaggacaccaccgaggttgctgaaaacagccaccacctgaagatctttctccccaagaagctgctggagtgtcttcctcgctgcccgctgctgcctccagagaggctacggtggaatacaaatgaggagattgcatcctacctgatcacctttgagaagcatgatgagtggctgtcttgtgccccaaagacaaggcctcagaatggctccatcatcctctacaatcgcaagaaggtgaaatatcggaaggatggttacctctggaagaagcggaaggatgggaagaccacccgagaggaccacatgaagctgaaggtccagggcatggagcctggcagtgtctctatggctgctacgttcactcttccatcgtccccacattccatcggcgctgctactggctgctccagaaccctgacatcgtccttgtgcactacctgaacgtcccagccctggaggactgtggaaagggctgcagccccatcttttgttccatcagcagcgaccgtcgagagtggctgaagtggtcccgggaggagttgttgggacagctgaagcccatgtttcatggcatcaagtggagctgcgggaatggaacagaagagttctctgtagaacacctggtgcagcagattttggacacccacccaaccaagcctgctccccgaacccacgcctgtctctgcagtggggggcttggttctgggagccttacccacaaatgcagcagcacgaaacaccgcatcatctctcccaaagtggagccccgagctttaaccctgacctctatcccccaccctcaccccccagagcctcctccactgatagccccacttcccccagagctccccaaggcacacacctccccatcttcttcctcttcttcctcctcatcaggttttgcagagcccctagaaatcagacctagccctcccacttctcgagggggttcttcaagaggaggcactgctatcctcctcctgacaggactggagcagcgggctggaggcttgacgcccaccaggcacttggctccacaggctgatcctaggccttccatgagtttggcagtggttgtaggcactgagccttctgccccaccagctcctcccagtcctgcctttgaccctgatcgttttctcaacagcccccagaggggccagacatatggaggggggcagggagtaagcccagacttccccgaggcagaggccgctcataccccctgttctgccctagagcctgctgctgccctggagccccaggcagctgctcggggtcccccaccacagtcagtagcaggtgggagaagaggaaactgcttcttcatccaagatgatgacagtggggaggagctcaagggtcacggggctgccccacccataccttcaccccctccctcacccccaccctcacctgcccccttggagccgtcaagcagggtaggaagaggagaggccttgtttggaggacctgttggggccagtgaactggagcccttcagtctttcatcattcccagaccttatgggagaactcatcagtgacgaagctccaagcatccctgctccgaccccccagctgtctcctgctcttagcaccatcacagacttctccccagagtggtcctacccagagggtggggtcaaggtgctcatcacaggtccttggaccgaagccgccgagcattactcctgtgtctttgatcacatcgcagtgccagcctcacttgtccagcctggtgtcttacgctgctactgtcccgcccatgaggtagggctggtgtctttgcaggtggcagggcgggaggggcccctttctgcttctgtgctctttgagtatcgagcccgccgattcctgtctctgcctagtactcaacttgactggctgtcactggacgacaaccagttccggatgtccatactagagcgactggagcagatggagaagcggatggcagagatcgcagcagctgggcaggtgccttgccagggtcctgatgctcctccagttcaggatgaaggccaggggcctgggttcgaagcacgggtagtggtcttggtagaaagcatgatcccacgctccacctggaagggtcctgaacgtctggcccatggaagccccttccggggcatgagccttctgcacctggctgctgcccagggctatgcccgcctcatcgagaccctgagccagtggcggagtgtggagactggaagcttggacttagagcaggaggttgacccgctcaacgtggatcatttctcttgcacccctctgatgtgggcttgtgccctgggacacctggaagctgctgtgctccttttccgttggaaccgacaggcactgagcattcccgactctctgggccgtctgccattgtctgtggctcattcccggggtcatgtgcgccttgcccgctgccttgaggaactacagagacaggagccttcggtggagcccccatttgccctatcgccaccctcctccagcccagacactggtctgagcagcgtctcctcgccctcggagctgtcggatggcaccttttccgtcacgtcagcctattctagtgccccagatggcagtcccccccctgcacctctgccagcctctgagatgactatggaggacatggccccaggccagctttcctctggtgtcccagaagcccccctactcctcatggactatgaggctaccaactccaaggggcccctctcctcccttcctgccctcccaccagcttcagatgatggggctgctccggaggacgctgacagcccacaggctgtggatgtgatcccggtggacatgatctcactagccaagcagatcatcgaagccacaccggagcggattaaacgagaggacttcgtggggctgcccgaggctggagcctcaatgcgggagcggacaggggctgtggggctcagtgagaccatgtcctggctggccagctacctggagaatgtggaccatttccccagctcaacccctcccagcgaactgccctttgagcgaggtcgcctggctgtcccttcagcaccctcctgggcagagtttctctctgcatccaccagtggcaagatggaaagtgattttgccctgctgacactatcagatcacgagcagcgggaactgtatgaggctgcccgagtcatccagacggccttccgaaagtacaagggccggcggctgaaggagcagcaggaggtagcagcagctgtaatccagcgctgttaccggaagtacaagcagtttgcactctataagaagatgacccaggcggccatcctgatccagagcaagttccgaagctactatgaacagaagcgatttcagcagagccgccgagcggctgtgctcatccagcagcactaccgctcctaccgccgcaggcccggccctccccaccggacttcggccaccctgcctgcccgcaacaaaggctcctttctcaccaagaagcaggaccaggcagcccggaagatcatgagattcctgcggcgctgccgacacaggatgagggaactgaagcagaaccaggagctggaagggcttccccagccgggactggccacatgacctggccaccgcctttctcaccaccctgggggcgcctcgtgcagtcttaacagggagagggctttctggggcagggggagcccctgtcggcagctttcctgttcacctttgttggagccctctgtaggcctcctccctcctccccacgccttgctcccacacccctctcctcgtccctcctggtcgtgccccgtctcttttggtcctggctccagaaaacccgcgccccacatacctgcatcttccgctgtgacctccggagccctgcctgcccctgctccccagctcctcctgcctgcacccgactcggccccctcctgacttgccttatttatttgttcgacgcgtctctgaatgtatccgcctcggttcccaccactgccttcgctgcgcacgcccctcgtgtttcagggctgaccgtgtccccacccgactccgcatgtttgcgtctgtttcctccctctctggccctgtcttaccccatcacccgactctggccactgacctcagggccgaaggggaggtggtgtacataggaacgcgttgcggagtccgccccgtcccccgaggggaggggtcttgtacatactgtaacatacagagtatagtgaagaatctatttaaggcgccgcggggagggctgcacggccgggcttgtggttctctagcgcggcgggggcctcctgccggctccacgggcactttctacttgtgcatgggcttggtttatacgaattgccattaaacatcgctgcaccagccagcctccggcctctgtctgcgggggcggggcggggcctaggccagctggaggccgccatgcaccgcgggcctgggatctgcgcccaggccaggcgggcccagggttttccgcctccgacgtgtttccggccttaaaggcattccgcccttccctttaagacgcaccgccccctctcagtcactcccaagatggcggacctactgggctccatcctgagctccatggagaagccacccagcctcggtgaccaggagactcggcgcaaggcccgagaacaggccgcccgcctgaagaaactacaagagcaagagaaacaacagaaagtggagtttcgtaaaaggatggagaaggaggtgtcagatttcattcaagacagtgggcagatcaagaaaaagtttcagccaatgaacaagatcgagaggagcatactacatgatgtggtggaagtggctggcctgacatccttctcctttggggaagatgatgactgtcgctatgtcatgatcttcaaaaaggagtttgcaccctcagatgaagagctagactcttaccgtcgtggagaggaatgggacccccagaaggctgaggagaagcggaagctgaaggagctggcccagaggcaagaggaggaggcagcccagcaggggcctgtggtggtgagccctgccagcgactacaaggacaagtacagccacctcatcggcaagggagcagccaaagacgcagcccacatgctacaggccaataagacctacggctgtgtgcccgtggccaataagagggacacacgctccattgaagaggctatgaatgagatcagagccaagaagcgtctgcggcagagtggggaagagttgccgccaacctcctaggcgccccgcccagctccctttgacccctggggcagggcagggggcagggagagacaaggctgctgctattagagcccatcctggagccccacctctgaaccacctcctaccagctgtccctcaggctgggggaaaacaggtgtttgatttgtcaccgttggagcttggatatgtgcgtggcatgtgtgtgtgtgtgtgagagtgtgaatgcacaggtgggtatttaatctgtattattccccgttcttggaattttcttccccatggggctggggtactttacattcaataaatactgtttaacccaa

SEQ ID NO: 366240 - DNA, 5727 bp, Homo sapiens
agccggcgcagcggggggtcggtgtggggtagaatggccgctgccgccgtcacccgcgggaccccgggagcacagactccccctccccccggcccctcaggccgggggtgaccttgccccctggagccctcaccatgaataccaaggacaccaccgaggttgctgaaaacagccaccacctgaagatctttctccccaagaagctgctggagtgtcttcctcgctgcccgctgctgcctccagagaggctacggtggaatacaaatgaggagattgcatcctacctgatcacctttgagaagcatgatgagtggctgtcttgtgccccaaagacaaggcctcagaatggctccatcatcctctacaatcgcaagaaggtgaaatatcggaaggatggttacctctggaagaagcggaaggatgggaagaccacccgagaggaccacatgaagctgaaggtccagggcatggaggaacagaggaagagttggggagcagactagccctccccccaccccagcctgtctcctggcagtgtctctatggctgctacgttcactcttccatcgtccccacattccatcggcgctgctactggctgctccagaaccctgacatcgtccttgtgcactacctgaacgtcccagccctggaggactgtggaaagggctgcagccccatcttttgttccatcagcagcgaccgtcgagagtggctgaagtggtcccgggaggagttgttgggacagctgaagcccatgtttcatggcatcaagtggagctgcgggaatggaacagaagagttctctgtagaacacctggtgcagcagattttggacacccacccaaccaagcctgctccccgaacccacgcctgtctctgcagtggggggcttggttctgggagccttacccacaaatgcagcagcacgaaacaccgcatcatctctcccaaagtggagccccgagctttaaccctgacctctatcccccaccctcaccccccagagcctcctccactgatagccccacttcccccagagctccccaaggcacacacctccccatcttcttcctcttcttcctcctcatcaggttttgcagagcccctagaaatcagacctagccctcccacttctcgagggggttcttcaagaggaggcactgctatcctcctcctgacaggactggagcagcgggctggaggcttgacgcccaccaggcacttggctccacaggctgatcctaggccttccatgagtttggcagtggttgtaggcactgagccttctgccccaccagctcctcccagtcctgcctttgaccctgatcgttttctcaacagcccccagaggggccagacatatggaggggggcagggagtaagcccagacttccccgaggcagaggccgctcataccccctgttctgccctagagcctgctgctgccctggagccccaggcagctgctcggggtcccccaccacagtcagtagcaggtgggagaagaggaaactgcttcttcatccaagatgatgacagtggggaggagctcaagggtcacggggctgccccacccataccttcaccccctccctcacccccaccctcacctgcccccttggagccgtcaagcagggtaggaagaggagaggccttgtttggaggacctgttggggccagtgaactggagcccttcagtctttcatcattcccagaccttatgggagaactcatcagtgacgaagctccaagcatccctgctccgaccccccagctgtctcctgctcttagcaccatcacagacttctccccagagtggtcctacccagagggtggggtcaaggtgctcatcacaggtccttggaccgaagccgccgagcattactcctgtgtctttgatcacatcgcagtgccagcctcacttgtccagcctggtgtcttacgctgctactgtcccgcccatgaggtagggctggtgtctttgcaggtggcagggcgggaggggcccctttctgcttctgtgctctttgagtatcgagcccgccgattcctgtctctgcctagtactcaacttgactggctgtcactggacgacaaccagttccggatgtccatactagagcgactggagcagatggagaagcggatggcagagatcgcagcagctgggcaggtgccttgccagggtcctgatgctcctccagttcaggatgaaggccaggggcctgggttcgaagcacgggtagtggtcttggtagaaagcatgatcccacgctccacctggaagggtcctgaacgtctggcccatggaagccccttccggggcatgagccttctgcacctggctgctgcccagggctatgcccgcctcatcgagaccctgagccagtggcggagtgtggagactggaagcttggacttagagcaggaggttgacccgctcaacgtggatcatttctcttgcacccctctgatgtgggcttgtgccctgggacacctggaagctgctgtgctccttttccgttggaaccgacaggcactgagcattcccgactctctgggccgtctgccattgtctgtggctcattcccggggtcatgtgcgccttgcccgctgccttgaggaactacagagacaggagccttcggtggagcccccatttgccctatcgccaccctcctccagcccagacactggtctgagcagcgtctcctcgccctcggagctgtcggatggcaccttttccgtcacgtcagcctattctagtgccccagatggcagtcccccccctgcacctctgccagcctctgagatgactatggaggacatggccccaggccagctttcctctggtgtcccagaagcccccctactcctcatggactatgaggctaccaactccaaggggcccctctcctcccttcctgccctcccaccagcttcagatgatggggctgctccggaggacgctgacagcccacaggctgtggatgtgatcccggtggacatgatctcactagccaagcagatcatcgaagccacaccggagcggattaaacgagaggacttcgtggggctgcccgaggctggagcctcaatgcgggagcggacaggggctgtggggctcagtgagaccatgtcctggctggccagctacctggagaatgtggaccatttccccagctcaacccctcccagcgaactgccctttgagcgaggtcgcctggctgtcccttcagcaccctcctgggcagagtttctctctgcatccaccagtggcaagatggaaagtgattttgccctgctgacactatcagatcacgagcagcgggaactgtatgaggctgcccgagtcatccagacggccttccgaaagtacaagggccggcggctgaaggagcagcaggaggtagcagcagctgtaatccagcgctgttaccggaagtacaagcagtttgcactctataagaagatgacccaggcggccatcctgatccagagcaagttccgaagctactatgaacagaagcgatttcagcagagccgccgagcggctgtgctcatccagcagcactaccgctcctaccgccgcaggcccggccctccccaccggacttcggccaccctgcctgcccgcaacaaaggctcctttctcaccaagaagcaggaccaggcagcccggaagatcatgagattcctgcggcgctgccgacacaggatgagggaactgaagcagaaccaggagctggaagggcttccccagccgggactggccacatgacctggccaccgcctttctcaccaccctgggggcgcctcgtgcagtcttaacagggagagggctttctggggcagggggagcccctgtcggcagctttcctgttcacctttgttggagccctctgtaggcctcctccctcctccccacgccttgctcccacacccctctcctcgtccctcctggtcgtgccccgtctcttttggtcctggctccagaaaacccgcgccccacatacctgcatcttccgctgtgacctccggagccctgcctgcccctgctccccagctcctcctgcctgcacccgactcggccccctcctgacttgccttatttatttgttcgacgcgtctctgaatgtatccgcctcggttcccaccactgccttcgctgcgcacgcccctcgtgtttcagggctgaccgtgtccccacccgactccgcatgtttgcgtctgtttcctccctctctggccctgtcttaccccatcacccgactctggccactgacctcagggccgaaggggaggtggtgtacataggaacgcgttgcggagtccgccccgtcccccgaggggaggggtcttgtacatactgtaacatacagagtatagtgaagaatctatttaaggcgccgcggggagggctgcacggccgggcttgtggttctctagcgcggcgggggcctcctgccggctccacgggcactttctacttgtgcatgggcttggtttatacgaattgccattaaacatcgctgcaccagccagcctccggcctctgtctgcgggggcggggcggggcctaggccagctggaggccgccatgcaccgcgggcctgggatctgcgcccaggccaggcgggcccagggttttccgcctccgacgtgtttccggccttaaaggcattccgcccttccctttaagacgcaccgccccctctcagtcactcccaagatggcggacctactgggctccatcctgagctccatggagaagccacccagcctcggtgaccaggagactcggcgcaaggcccgagaacaggccgcccgcctgaagaaactacaagagcaagagaaacaacagaaagtggagtttcgtaaaaggatggagaaggaggtgtcagatttcattcaagacagtgggcagatcaagaaaaagtttcagccaatgaacaagatcgagaggagcatactacatgatgtggtggaagtggctggcctgacatccttctcctttggggaagatgatgactgtcgctatgtcatgatcttcaaaaaggagtttgcaccctcagatgaagagctagactcttaccgtcgtggagaggaatgggacccccagaaggctgaggagaagcggaagctgaaggagctggcccagaggcaagaggaggaggcagcccagcaggggcctgtggtggtgagccctgccagcgactacaaggacaagtacagccacctcatcggcaagggagcagccaaagacgcagcccacatgctacaggccaataagacctacggctgtgtgcccgtggccaataagagggacacacgctccattgaagaggctatgaatgagatcagagccaagaagcgtctgcggcagagtggggaagagttgccgccaacctcctaggcgccccgcccagctccctttgacccctggggcagggcagggggcagggagagacaaggctgctgctattagagcccatcctggagccccacctctgaaccacctcctaccagctgtccctcaggctgggggaaaacaggtgtttgatttgtcaccgttggagcttggatatgtgcgtggcatgtgtgtgtgtgtgtgagagtgtgaatgcacaggtgggtatttaatctgtattattccccgttcttggaattttcttccccatggggctggggtactttacattcaataaatactgtttaacccaa

SEQ ID NO: 366241 - DNA, 6038 bp, Homo sapiens
cctcttcccggttcgccctcacctcccgcttccgtcctcctcccccgcgccagggggcgccgctcaccgcagggccccacggcggaccagcgcgtgccggggactgtcccggagacccccgcacccggcacctgcactgtccctcgcccaccgcgtgcccgcggactctgctcccggcttctccagaacatccctctatgcgggcgggaccctcccacctcggaggttctcctgggaccaccactccgccggggggccgcccagagtgccaagcgtccgatccggcgccgcccaagtgcagcccaaggacccgctcccgctccgcaccctggcaggctgcctagccaggactgcgcacctgcgccctggggcggagtccttaccccaaccccagcttcactgcacatagccgagcccgacgggcctcctcccatctccatcctggacacctggcggagcccgtgctgagagcctccgccagctcccatctgttccccgaggagggcggggggctcaggctggagccagagcggtagatgggcacagactccccctccccccggcccctcaggccgggggtgaccttgccccctggagccctcaccatgaataccaaggacaccaccgaggttgctgaaaacagccaccacctgaagatctttctccccaagaagctgctggagtgtcttcctcgctgcccgctgctgcctccagagaggctacggtggaatacaaatgaggagattgcatcctacctgatcacctttgagaagcatgatgagtggctgtcttgtgccccaaagacaaggcctcagaatggctccatcatcctctacaatcgcaagaaggtgaaatatcggaaggatggttacctctggaagaagcggaaggatgggaagaccacccgagaggaccacatgaagctgaaggtccagggcatggagcctggcagtgtctctatggctgctacgttcactcttccatcgtccccacattccatcggcgctgctactggctgctccagaaccctgacatcgtccttgtgcactacctgaacgtcccagccctggaggactgtggaaagggctgcagccccatcttttgttccatcagcagcgaccgtcgagagtggctgaagtggtcccgggaggagttgttgggacagctgaagcccatgtttcatggcatcaagtggagctgcgggaatggaacagaagagttctctgtagaacacctggtgcagcagattttggacacccacccaaccaagcctgctccccgaacccacgcctgtctctgcagtggggggcttggttctgggagccttacccacaaatgcagcagcacgaaacaccgcatcatctctcccaaagtggagccccgagctttaaccctgacctctatcccccaccctcaccccccagagcctcctccactgatagccccacttcccccagagctccccaaggcacacacctccccatcttcttcctcttcttcctcctcatcaggttttgcagagcccctagaaatcagacctagccctcccacttctcgagggggttcttcaagaggaggcactgctatcctcctcctgacaggactggagcagcgggctggaggcttgacgcccaccaggcacttggctccacaggctgatcctaggccttccatgagtttggcagtggttgtaggcactgagccttctgccccaccagctcctcccagtcctgcctttgaccctgatcgttttctcaacagcccccagaggggccagacatatggaggggggcagggagtaagcccagacttccccgaggcagaggccgctcataccccctgttctgccctagagcctgctgctgccctggagccccaggcagctgctcggggtcccccaccacagtcagtagcaggtgggagaagaggaaactgcttcttcatccaagatgatgacagtggggaggagctcaagggtcacggggctgccccacccataccttcaccccctccctcacccccaccctcacctgcccccttggagccgtcaagcagggtaggaagaggagaggccttgtttggaggacctgttggggccagtgaactggagcccttcagtctttcatcattcccagaccttatgggagaactcatcagtgacgaagctccaagcatccctgctccgaccccccagctgtctcctgctcttagcaccatcacagacttctccccagagtggtcctacccagagggtggggtcaaggtgctcatcacaggtccttggaccgaagccgccgagcattactcctgtgtctttgatcacatcgcagtgccagcctcacttgtccagcctggtgtcttacgctgctactgtcccgtactcaacttgactggctgtcactggacgacaaccagttccggatgtccatactagagcgactggagcagatggagaagcggatggcagagatcgcagcagctgggcaggtgccttgccagggtcctgatgctcctccagttcaggatgaaggccaggggcctgggttcgaagcacgggtagtggtcttggtagaaagcatgatcccacgctccacctggaagggtcctgaacgtctggcccatggaagccccttccggggcatgagccttctgcacctggctgctgcccagggctatgcccgcctcatcgagaccctgagccagtggcggagtgtggagactggaagcttggacttagagcaggaggttgacccgctcaacgtggatcatttctcttgcacccctctgatgtgggcttgtgccctgggacacctggaagctgctgtgctccttttccgttggaaccgacaggcactgagcattcccgactctctgggccgtctgccattgtctgtggctcattcccggggtcatgtgcgccttgcccgctgccttgaggaactacagagacaggagccttcggtggagcccccatttgccctatcgccaccctcctccagcccagacactggtctgagcagcgtctcctcgccctcggagctgtcggatggcaccttttccgtcacgtcagcctattctagtgccccagatggcagtcccccccctgcacctctgccagcctctgagatgactatggaggacatggccccaggccagctttcctctggtgtcccagaagcccccctactcctcatggactatgaggctaccaactccaaggggcccctctcctcccttcctgccctcccaccagcttcagatgatggggctgctccggaggacgctgacagcccacaggctgtggatgtgatcccggtggacatgatctcactagccaagcagatcatcgaagccacaccggagcggattaaacgagaggacttcgtggggctgcccgaggctggagcctcaatgcgggagcggacaggggctgtggggctcagtgagaccatgtcctggctggccagctacctggagaatgtggaccatttccccagctcaacccctcccagcgaactgccctttgagcgaggtcgcctggctgtcccttcagcaccctcctgggcagagtttctctctgcatccaccagtggcaagatggaaagtgattttgccctgctgacactatcagatcacgagcagcgggaactgtatgaggctgcccgagtcatccagacggccttccgaaagtacaagggccggcggctgaaggagcagcaggaggtagcagcagctgtaatccagcgctgttaccggaagtacaagcagtttgcactctataagaagatgacccaggcggccatcctgatccagagcaagttccgaagctactatgaacagaagcgatttcagcagagccgccgagcggctgtgctcatccagcagcactaccgctcctaccgccgcaggcccggccctccccaccggacttcggccaccctgcctgcccgcaacaaaggctcctttctcaccaagaagcaggaccaggcagcccggaagatcatgagattcctgcggcgctgccgacacaggatgagggaactgaagcagaaccaggagctggaagggcttccccagccgggactggccacatgacctggccaccgcctttctcaccaccctgggggcgcctcgtgcagtcttaacagggagagggctttctggggcagggggagcccctgtcggcagctttcctgttcacctttgttggagccctctgtaggcctcctccctcctccccacgccttgctcccacacccctctcctcgtccctcctggtcgtgccccgtctcttttggtcctggctccagaaaacccgcgccccacatacctgcatcttccgctgtgacctccggagccctgcctgcccctgctccccagctcctcctgcctgcacccgactcggccccctcctgacttgccttatttatttgttcgacgcgtctctgaatgtatccgcctcggttcccaccactgccttcgctgcgcacgcccctcgtgtttcagggctgaccgtgtccccacccgactccgcatgtttgcgtctgtttcctccctctctggccctgtcttaccccatcacccgactctggccactgacctcagggccgaaggggaggtggtgtacataggaacgcgttgcggagtccgccccgtcccccgaggggaggggtcttgtacatactgtaacatacagagtatagtgaagaatctatttaaggcgccgcggggagggctgcacggccgggcttgtggttctctagcgcggcgggggcctcctgccggctccacgggcactttctacttgtgcatgggcttggtttatacgaattgccattaaacatcgctgcaccagccagcctccggcctctgtctgcgggggcggggcggggcctaggccagctggaggccgccatgcaccgcgggcctgggatctgcgcccaggccaggcgggcccagggttttccgcctccgacgtgtttccggccttaaaggcattccgcccttccctttaagacgcaccgccccctctcagtcactcccaagatggcggacctactgggctccatcctgagctccatggagaagccacccagcctcggtgaccaggagactcggcgcaaggcccgagaacaggccgcccgcctgaagaaactacaagagcaagagaaacaacagaaagtggagtttcgtaaaaggatggagaaggaggtgtcagatttcattcaagacagtgggcagatcaagaaaaagtttcagccaatgaacaagatcgagaggagcatactacatgatgtggtggaagtggctggcctgacatccttctcctttggggaagatgatgactgtcgctatgtcatgatcttcaaaaaggagtttgcaccctcagatgaagagctagactcttaccgtcgtggagaggaatgggacccccagaaggctgaggagaagcggaagctgaaggagctggcccagaggcaagaggaggaggcagcccagcaggggcctgtggtggtgagccctgccagcgactacaaggacaagtacagccacctcatcggcaagggagcagccaaagacgcagcccacatgctacaggccaataagacctacggctgtgtgcccgtggccaataagagggacacacgctccattgaagaggctatgaatgagatcagagccaagaagcgtctgcggcagagtggggaagagttgccgccaacctcctaggcgccccgcccagctccctttgacccctggggcagggcagggggcagggagagacaaggctgctgctattagagcccatcctggagccccacctctgaaccacctcctaccagctgtccctcaggctgggggaaaacaggtgtttgatttgtcaccgttggagcttggatatgtgcgtggcatgtgtgtgtgtgtgtgagagtgtgaatgcacaggtgggtatttaatctgtattattccccgttcttggaattttcttccccatggggctggggtactttacattcaataaatactgtttaacccaa

SEQ ID NO: 366242 - DNA, 5117 bp, Homo sapiens
taaagcaacatatctgagcagtcttgaggctgctggcctctgttcacctggccagaagtcttgaagcatgtcaggtgcttggaggagccatcaaggtactctggggcctgtttcgtggggatcccacagcacttccccctaacttctctagttcatggcatcaagtggagctgcgggaatggaacagaagagttctctgtagaacacctggtgcagcagattttggacacccacccaaccaagcctgctccccgaacccacgcctgtctctgcagtggggggcttggttctgggagccttacccacaaatgcagcagcacgaaacaccgcatcatctctcccaaagtggagccccgagctttaaccctgacctctatcccccaccctcaccccccagagcctcctccactgatagccccacttcccccagagctccccaaggcacacacctccccatcttcttcctcttcttcctcctcatcaggttttgcagagcccctagaaatcagacctagccctcccacttctcgagggggttcttcaagaggaggcactgctatcctcctcctgacaggactggagcagcgggctggaggcttgacgcccaccaggcacttggctccacaggctgatcctaggccttccatgagtttggcagtggttgtaggcactgagccttctgccccaccagctcctcccagtcctgcctttgaccctgatcgttttctcaacagcccccagaggggccagacatatggaggggggcagggagtaagcccagacttccccgaggcagaggccgctcataccccctgttctgccctagagcctgctgctgccctggagccccaggcagctgctcggggtcccccaccacagtcagtagcaggtgggagaagaggaaactgcttcttcatccaagatgatgacagtggggaggagctcaagggtcacggggctgccccacccataccttcaccccctccctcacccccaccctcacctgcccccttggagccgtcaagcagggtaggaagaggagaggccttgtttggaggacctgttggggccagtgaactggagcccttcagtctttcatcattcccagaccttatgggagaactcatcagtgacgaagctccaagcatccctgctccgaccccccagctgtctcctgctcttagcaccatcacagacttctccccagagtggtcctacccagagggtggggtcaaggtgctcatcacaggtccttggaccgaagccgccgagcattactcctgtgtctttgatcacatcgcagtgccagcctcacttgtccagcctggtgtcttacgctgctactgtcccgcccatgaggtagggctggtgtctttgcaggtggcagggcgggaggggcccctttctgcttctgtgctctttgagtatcgagcccgccgattcctgtctctgcctagtactcaacttgactggctgtcactggacgacaaccagttccggatgtccatactagagcgactggagcagatggagaagcggatggcagagatcgcagcagctgggcaggtgccttgccagggtcctgatgctcctccagttcaggatgaaggccaggggcctgggttcgaagcacgggtagtggtcttggtagaaagcatgatcccacgctccacctggaagggtcctgaacgtctggcccatggaagccccttccggggcatgagccttctgcacctggctgctgcccagggctatgcccgcctcatcgagaccctgagccagtggcggagtgtggagactggaagcttggacttagagcaggaggttgacccgctcaacgtggatcatttctcttgcacccctctgatgtgggcttgtgccctgggacacctggaagctgctgtgctccttttccgttggaaccgacaggcactgagcattcccgactctctgggccgtctgccattgtctgtggctcattcccggggtcatgtgcgccttgcccgctgccttgaggaactacagagacaggagccttcggtggagcccccatttgccctatcgccaccctcctccagcccagacactggtctgagcagcgtctcctcgccctcggagctgtcggatggcaccttttccgtcacgtcagcctattctagtgccccagatggcagtcccccccctgcacctctgccagcctctgagatgactatggaggacatggccccaggccagctttcctctggtgtcccagaagcccccctactcctcatggactatgaggctaccaactccaaggggcccctctcctcccttcctgccctcccaccagcttcagatgatggggctgctccggaggacgctgacagcccacaggctgtggatgtgatcccggtggacatgatctcactagccaagcagatcatcgaagccacaccggagcggattaaacgagaggacttcgtggggctgcccgaggctggagcctcaatgcgggagcggacaggggctgtggggctcagtgagaccatgtcctggctggccagctacctggagaatgtggaccatttccccagctcaacccctcccagcgaactgccctttgagcgaggtcgcctggctgtcccttcagcaccctcctgggcagagtttctctctgcatccaccagtggcaagatggaaagtgattttgccctgctgacactatcagatcacgagcagcgggaactgtatgaggctgcccgagtcatccagacggccttccgaaagtacaagggccggcggctgaaggagcagcaggaggtagcagcagctgtaatccagcgctgttaccggaagtacaagcagtttgcactctataagaagatgacccaggcggccatcctgatccagagcaagttccgaagctactatgaacagaagcgatttcagcagagccgccgagcggctgtgctcatccagcagcactaccgctcctaccgccgcaggcccggccctccccaccggacttcggccaccctgcctgcccgcaacaaaggctcctttctcaccaagaagcaggaccaggcagcccggaagatcatgagattcctgcggcgctgccgacacaggatgagggaactgaagcagaaccaggagctggaagggcttccccagccgggactggccacatgacctggccaccgcctttctcaccaccctgggggcgcctcgtgcagtcttaacagggagagggctttctggggcagggggagcccctgtcggcagctttcctgttcacctttgttggagccctctgtaggcctcctccctcctccccacgccttgctcccacacccctctcctcgtccctcctggtcgtgccccgtctcttttggtcctggctccagaaaacccgcgccccacatacctgcatcttccgctgtgacctccggagccctgcctgcccctgctccccagctcctcctgcctgcacccgactcggccccctcctgacttgccttatttatttgttcgacgcgtctctgaatgtatccgcctcggttcccaccactgccttcgctgcgcacgcccctcgtgtttcagggctgaccgtgtccccacccgactccgcatgtttgcgtctgtttcctccctctctggccctgtcttaccccatcacccgactctggccactgacctcagggccgaaggggaggtggtgtacataggaacgcgttgcggagtccgccccgtcccccgaggggaggggtcttgtacatactgtaacatacagagtatagtgaagaatctatttaaggcgccgcggggagggctgcacggccgggcttgtggttctctagcgcggcgggggcctcctgccggctccacgggcactttctacttgtgcatgggcttggtttatacgaattgccattaaacatcgctgcaccagccagcctccggcctctgtctgcgggggcggggcggggcctaggccagctggaggccgccatgcaccgcgggcctgggatctgcgcccaggccaggcgggcccagggttttccgcctccgacgtgtttccggccttaaaggcattccgcccttccctttaagacgcaccgccccctctcagtcactcccaagatggcggacctactgggctccatcctgagctccatggagaagccacccagcctcggtgaccaggagactcggcgcaaggcccgagaacaggccgcccgcctgaagaaactacaagagcaagagaaacaacagaaagtggagtttcgtaaaaggatggagaaggaggtgtcagatttcattcaagacagtgggcagatcaagaaaaagtttcagccaatgaacaagatcgagaggagcatactacatgatgtggtggaagtggctggcctgacatccttctcctttggggaagatgatgactgtcgctatgtcatgatcttcaaaaaggagtttgcaccctcagatgaagagctagactcttaccgtcgtggagaggaatgggacccccagaaggctgaggagaagcggaagctgaaggagctggcccagaggcaagaggaggaggcagcccagcaggggcctgtggtggtgagccctgccagcgactacaaggacaagtacagccacctcatcggcaagggagcagccaaagacgcagcccacatgctacaggccaataagacctacggctgtgtgcccgtggccaataagagggacacacgctccattgaagaggctatgaatgagatcagagccaagaagcgtctgcggcagagtggggaagagttgccgccaacctcctaggcgccccgcccagctccctttgacccctggggcagggcagggggcagggagagacaaggctgctgctattagagcccatcctggagccccacctctgaaccacctcctaccagctgtccctcaggctgggggaaaacaggtgtttgatttgtcaccgttggagcttggatatgtgcgtggcatgtgtgtgtgtgtgtgagagtgtgaatgcacaggtgggtatttaatctgtattattccccgttcttggaattttcttccccatggggctggggtactttacattcaataaatactgtttaacccaa

SEQ ID NO: 366243 - DNA, 6165 bp, Homo sapiens
cctcttcccggttcgccctcacctcccgcttccgtcctcctcccccgcgccagggggcgccgctcaccgcagggccccacggcggaccagcgcgtgccggggactgtcccggagacccccgcacccggcacctgcactgtccctcgcccaccgcgtgcccgcggactctgctcccggcttctccagaacatccctctatgcgggcgggaccctcccacctcggaggttctcctgggaccaccactccgccggggggccgcccagagtgccaagcgtccgatccggcgccgcccaagtgcagcccaaggacccgctcccgctccgcaccctggcaggctgcctagccaggactgcgcacctgcgccctggggcggagtccttaccccaaccccagcttcactgcacatagccgagcccgacgggcctcctcccatctccatcctggacacctggcggagcccgtgctgagagcctccgccagctcccatctgttccccgaggagggcggggggctcaggctggagccagagcggtagatgggcacagactccccctccccccggcccctcaggccgggggtgaccttgccccctggagccctcaccatgaataccaaggacaccaccgaggttgctgaaaacagccaccacctgaagatctttctccccaagaagctgctggagtgtcttcctcgctgcccgctgctgcctccagagaggctacggtggaatacaaatgaggagattgcatcctacctgatcacctttgagaagcatgatgagtggctgtcttgtgccccaaagacaaggcctcagaatggctccatcatcctctacaatcgcaagaaggtgaaatatcggaaggatggttacctctggaagaagcggaaggatgggaagaccacccgagaggaccacatgaagctgaaggtccagggcatggagcctggcagtgtctctatggctgctacgttcactcttccatcgtccccacattccatcggcgctgctactggctgctccagaaccctgacatcgtccttgtgcactacctgaacgtcccagccctggaggactgtggaaagggctgcagccccatcttttgttccatcagcagcgaccgtcgagagtggctgaagtggtcccgggaggagttgttgggacagctgaagcccatgtttcatggcatcaagtggagctgcgggaatggaacagaagagttctctgtagaacacctggtgcagcagattttggacacccacccaaccaagcctgctccccgaacccacgcctgtctctgcagtggggggcttggttctgggagccttacccacaaatgcagcagcacgaaacaccgcatcatctctcccaaagtggagccccgagctttaaccctgacctctatcccccaccctcaccccccagagcctcctccactgatagccccacttcccccagagctccccaaggcacacacctccccatcttcttcctcttcttcctcctcatcaggttttgcagagcccctagaaatcagacctagccctcccacttctcgagggggttcttcaagaggaggcactgctatcctcctcctgacaggactggagcagcgggctggaggcttgacgcccaccaggcacttggctccacaggctgatcctaggccttccatgagtttggcagtggttgtaggcactgagccttctgccccaccagctcctcccagtcctgcctttgaccctgatcgttttctcaacagcccccagaggggccagacatatggaggggggcagggagtaagcccagacttccccgaggcagaggccgctcataccccctgttctgccctagagcctgctgctgccctggagccccaggcagctgctcggggtcccccaccacagtcagtagcaggtgggagaagaggaaactgcttcttcatccaagatgatgacagtggggaggagctcaagggtcacggggctgccccacccataccttcaccccctccctcacccccaccctcacctgcccccttggagccgtcaagcagggtaggaagaggagaggccttgtttggaggacctgttggggccagtgaactggagcccttcagtctttcatcattcccagaccttatgggagaactcatcagtgacgaagctccaagcatccctgctccgaccccccagctgtctcctgctcttagcaccatcacagacttctccccagagtggtcctacccagagggtggggtcaaggtgctcatcacaggtccttggaccgaagccgccgagcattactcctgtgtctttgatcacatcgcagtgccagcctcacttgtccagcctggtgtcttacgctgctactgtcccgcccatgaggtagggctggtgtctttgcaggtggcagggcgggaggggcccctttctgcttctgtgctctttgagtatcgagcccgccgattcctgtctctgcctagtactcaacttgactggctgtcactggacgacaaccagttccggatgtccatactagagcgactggagcagatggagaagcggatggcagagatcgcagcagctgggcaggtgccttgccagggtcctgatgctcctccagttcaggatgaaggccaggggcctgggttcgaagcacgggtagtggtcttggtagaaagcatgatcccacgctccacctggaagggtcctgaacgtctggcccatggaagccccttccggggcatgagccttctgcacctggctgctgcccagggctatgcccgcctcatcgagaccctgagccagtggcggagtgtggagactggaagcttggacttagagcaggaggttgacccgctcaacgtggatcatttctcttgcacccctctgatgtgggcttgtgccctgggacacctggaagctgctgtgctccttttccgttggaaccgacaggcactgagcattcccgactctctgggccgtctgccattgtctgtggctcattcccggggtcatgtgcgccttgcccgctgccttgaggaactacagagacaggagccttcggtggagcccccatttgccctatcgccaccctcctccagcccagacactggtctgagcagcgtctcctcgccctcggagctgtcggatggcaccttttccgtcacgtcagcctattctagtgccccagatggcagtcccccccctgcacctctgccagcctctgagatgactatggaggacatggccccaggccagctttcctctggtgtcccagaagcccccctactcctcatggactatgaggctaccaactccaaggggcccctctcctcccttcctgccctcccaccagcttcagatgatggggctgctccggaggacgctgacagcccacaggctgtggatgtgatcccggtggacatgatctcactagccaagcagatcatcgaagccacaccggagcggattaaacgagaggacttcgtggggctgcccgaggctggagcctcaatgcgggagcggacaggggctgtggggctcagtgagaccatgtcctggctggccagctacctggagaatgtggaccatttccccagctcaacccctcccagcgaactgccctttgagcgaggtcgcctggctgtcccttcagcaccctcctgggcagagtttctctctgcatccaccagtggcaagatggaaagtgattttgccctgctgacactatcagatcacgagcagcgggaactgtatgaggctgcccgagtcatccagacggccttccgaaagtacaagggccggcggctgaaggagcagcaggaggtagcagcagctgtaatccagcgctgttaccggaagtacaagcagctgacctggattgcacttaagtttgcactctataagaagatgacccaggcggccatcctgatccagagcaagttccgaagctactatgaacagaagcgatttcagcagagccgccgagcggctgtgctcatccagcagcactaccgctcctaccgccgcaggcccggccctccccaccggacttcggccaccctgcctgcccgcaacaaaggctcctttctcaccaagaagcaggaccaggcagcccggaagatcatgagattcctgcggcgctgccgacacaggatgagggaactgaagcagaaccaggagctggaagggcttccccagccgggactggccacatgacctggccaccgcctttctcaccaccctgggggcgcctcgtgcagtcttaacagggagagggctttctggggcagggggagcccctgtcggcagctttcctgttcacctttgttggagccctctgtaggcctcctccctcctccccacgccttgctcccacacccctctcctcgtccctcctggtcgtgccccgtctcttttggtcctggctccagaaaacccgcgccccacatacctgcatcttccgctgtgacctccggagccctgcctgcccctgctccccagctcctcctgcctgcacccgactcggccccctcctgacttgccttatttatttgttcgacgcgtctctgaatgtatccgcctcggttcccaccactgccttcgctgcgcacgcccctcgtgtttcagggctgaccgtgtccccacccgactccgcatgtttgcgtctgtttcctccctctctggccctgtcttaccccatcacccgactctggccactgacctcagggccgaaggggaggtggtgtacataggaacgcgttgcggagtccgccccgtcccccgaggggaggggtcttgtacatactgtaacatacagagtatagtgaagaatctatttaaggcgccgcggggagggctgcacggccgggcttgtggttctctagcgcggcgggggcctcctgccggctccacgggcactttctacttgtgcatgggcttggtttatacgaattgccattaaacatcgctgcaccagccagcctccggcctctgtctgcgggggcggggcggggcctaggccagctggaggccgccatgcaccgcgggcctgggatctgcgcccaggccaggcgggcccagggttttccgcctccgacgtgtttccggccttaaaggcattccgcccttccctttaagacgcaccgccccctctcagtcactcccaagatggcggacctactgggctccatcctgagctccatggagaagccacccagcctcggtgaccaggagactcggcgcaaggcccgagaacaggccgcccgcctgaagaaactacaagagcaagagaaacaacagaaagtggagtttcgtaaaaggatggagaaggaggtgtcagatttcattcaagacagtgggcagatcaagaaaaagtttcagccaatgaacaagatcgagaggagcatactacatgatgtggtggaagtggctggcctgacatccttctcctttggggaagatgatgactgtcgctatgtcatgatcttcaaaaaggagtttgcaccctcagatgaagagctagactcttaccgtcgtggagaggaatgggacccccagaaggctgaggagaagcggaagctgaaggagctggcccagaggcaagaggaggaggcagcccagcaggggcctgtggtggtgagccctgccagcgactacaaggacaagtacagccacctcatcggcaagggagcagccaaagacgcagcccacatgctacaggccaataagacctacggctgtgtgcccgtggccaataagagggacacacgctccattgaagaggctatgaatgagatcagagccaagaagcgtctgcggcagagtggggaagagttgccgccaacctcctaggcgccccgcccagctccctttgacccctggggcagggcagggggcagggagagacaaggctgctgctattagagcccatcctggagccccacctctgaaccacctcctaccagctgtccctcaggctgggggaaaacaggtgtttgatttgtcaccgttggagcttggatatgtgcgtggcatgtgtgtgtgtgtgtgagagtgtgaatgcacaggtgggtatttaatctgtattattccccgttcttggaattttcttccccatggggctggggtactttacattcaataaatactgtttaacccaa

SEQ ID NO: 366244 - DNA, 6097 bp, Homo sapiens
cctcttcccggttcgccctcacctcccgcttccgtcctcctcccccgcgccagggggcgccgctcaccgcagggccccacggcggaccagcgcgtgccggggactgtcccggagacccccgcacccggcacctgcactgtccctcgcccaccgcgtgcccgcggactctgctcccggcttctccagaacatccctctatgcgggcgggaccctcccacctcggaggttctcctgggaccaccactccgccggggggccgcccagagtgccaagcgtccgatccggcgccgcccaagtgcagcccaaggacccgctcccgctccgcaccctggcaggctgcctagccaggactgcgcacctgcgccctggggcggagtccttaccccaaccccagcttcactgcacatagccgagcccgacgggcctcctcccatctccatcctggacacctggcggagcccgtgctgagagcctccgccagctcccatctgttccccgaggagggcggggggctcaggctggagccagagcggtagatgggcacagactccccctccccccggcccctcaggccgggggtgaccttgccccctggagccctcaccatgaataccaaggacaccaccgaggttgctgaaaacagccaccacctgaagatctttctccccaagaagctgctggagtgtcttcctcgctgcccgctgctgcctccagagaggctacggtggaatacaaatgaggagattgcatcctacctgatcacctttgagaagcatgatgagtggctgtcttgtgccccaaagacaaggcctcagaatggctccatcatcctctacaatcgcaagaaggtgaaatatcggaaggatggttacctctggaagaagcggaaggatgggaagaccacccgagaggaccacatgaagctgaaggtccagggcatggagcctggcagtgtctctatggctgctacgttcactcttccatcgtccccacattccatcggcgctgctactggctgctccagaaccctgacatcgtccttgtgcactacctgaacgtcccagccctggaggactgtggaaagggctgcagccccatcttttgttccatcagcagcgaccgtcgagagtggctgaagtggtcccgggaggagttgttgggacagctgaagcccatgtttcatggcatcaagtggagctgcgggaatggaacagaagagttctctgtagaacacctggtgcagcagattttggacacccacccaaccaagcctgctccccgaacccacgcctgtctctgcagtggggggcttggttctgggagccttacccacaaatgcagcagcacgaaacaccgcatcatctctcccaaagtggagccccgagctttaaccctgacctctatcccccaccctcaccccccagagcctcctccactgatagccccacttcccccagagctccccaaggcacacacctccccatcttcttcctcttcttcctcctcatcaggttttgcagagcccctagaaatcagacctagccctcccacttctcgagggggttcttcaagaggaggcactgctatcctcctcctgacaggactggagcagcgggctggaggcttgacgcccaccaggcacttggctccacaggctgatcctaggccttccatgagtttggcagtggttgtaggcactgagccttctgccccaccagctcctcccagtcctgcctttgaccctgatcgttttctcaacagcccccagaggggccagacatatggaggggggcagggagtaagcccagacttccccgaggcagaggccgctcataccccctgttctgccctagagcctgctgctgccctggagccccaggcagctgctcggggtcccccaccacagtcagtagcaggtgggagaagaggaaactgcttcttcatccaagatgatgacagtggggaggagctcaagggtcacggggctgccccacccataccttcaccccctccctcacccccaccctcacctgcccccttggagccgtcaagcagggtaggaagaggagaggccttgtttggaggacctgttggggccagtgaactggagcccttcagtctttcatcattcccagaccttatgggagaactcatcagtgacgaagctccaagcatccctgctccgaccccccagctgtctcctgctcttagcaccatcacagacttctccccagagtggtcctacccagagggtggggtcaaggtgctcatcacaggtccttggaccgaagccgccgagcattactcctgtgtctttgatcacatcgcagtgccagcctcacttgtccagcctggtgtcttacgctgctactgtcccgcccatgaggtagggctggtgtctttgcaggtggcagggcgggaggggcccctttctgcttctgtgctctttgagtatcgagcccgccgattcctgtctctgcctagtactcaacttgactggctgtcactggacgacaaccagttccggatgtccatactagagcgactggagcagatggagaagcggatggcagagatcgcagcagctgggcaggtgccttgccagggtcctgatgctcctccagttcaggatgaaggccaggggcctgggttcgaagcacgggtagtggtcttggtagaaagcatgatcccacgctccacctggaagggtcctgaacgtctggcccatggaagccccttccggggcatgagccttctgcacctggctgctgcccagggctatgcccgcctcatcgagaccctgagccagtggcggagtgtggagactggaagcttggacttagagcaggaggttgacccgctcaacgtggatcatttctcttgcacccctctgatgtgggcttgtgccctgggacacctggaagctgctgtgctccttttccgttggaaccgacaggcactgagcattcccgactctctgggccgtctgccattgtctgtggctcattcccggggtcatgtgcgccttgcccgctgccttgaggaactacagagacaggagccttcggtggagcccccatttgccctatcgccaccctcctccagcccagacactggtctgagcagcgtctcctcgccctcggagctgtcggatggcaccttttccgtcacgtcagcctattctagtgccccagatggcagtcccccccctgcacctctgccagcctctgagatgactatggaggacatggccccaggccagctttcctctggtgtcccagaagcccccctactcctcatggactatgaggctaccaactccaaggggcccctctcctcccttcctgccctcccaccagcttcagatgatggggctgctccggaggacgctgacagcccacaggctgtggatgtgatcccggtggacatgatctcactagccaagcagatcatcgaagccacaccggagcggattaaacgagaggacttcgtggggctgcccgaggctggagcctcaatgcgggagcggacaggggctgtggggctcagtgagaccatgtcctggctggccagctacctggagaatgtggaccatttccccagctcaacccctcccagcgaactgccctttgagcgaggtcgcctggctgtcccttcagcaccctcctgggcagagtttctctctgcatccaccagtggcaagatggaaagtgattttgccctgctgacactatcagatcacgagcagcgggaactgtatgaggctgcccgagtcatccagacggccttccgaaagtacaagggccggcggctgaaggagcagcaggaggtagcagcagctgtaatccagcgctgttaccggaagtacaagcagtttgcactctataagaagatgacccaggcggccatcctgatccagagcaagttccgaagctactatgaacagaagcgatttcagcagagccgccgagcggctgtgctcatccagcagcactaccgctcctaccgccgcaggcccggccctccccaccggacttcggccaccctgcctgcccgcaacaaaggctcctttctcaccaagaagcaggaccaggcagcccggaagatcatgagattcctgcggcgctgccgacacaggatgagggaactgaagcagaaccaggagctggaagggcttccccagccgggactggccacatgacctggccaccgcctttctcaccaccctgggggcgcctcgtgcagtcttaacagggagagggctttctggggcagggggagcccctgtcggcagctttcctgttcacctttgttggagccctctgtaggcctcctccctcctccccacgccttgctcccacacccctctcctcgtccctcctggtcgtgccccgtctcttttggtcctggctccagaaaacccgcgccccacatacctgcatcttccgctgtgacctccggagccctgcctgcccctgctccccagctcctcctgcctgcacccgactcggccccctcctgacttgccttatttatttgttcgacgcgtctctgaatgtatccgcctcggttcccaccactgccttcgctgcgcacgcccctcgtgtttcagggctgaccgtgtccccacccgactccgcatgtttgcgtctgtttcctccctctctggccctgtcttaccccatcacccgactctggccactgacctcagggccgaaggggaggtggtgtacataggaacgcgttgcggagtccgccccgtcccccgaggggaggggtcttgtacatactgtaacatacagagtatagtgaagaatctatttaaggcgccgcggggagggctgcacggccgggcttgtggttctctagcgcggcgggggcctcctgccggctccacgggcactttctacttgtgcatgggcttggtttatacgaattgccattaaacatcgctgcaccagccagcctccggcctctgtctgcgggggcggggcggggcctaggccagctggaggccgccatgcaccgcgggcctgggatctgcgcccaggccaggcgggcccagggttttccgcctccgacgtgtttccggccttaaaggcattccgcccttccctttaagacgcaccgccccctctcagtcactcccaagatggcggacctactgggctccatcctgagctccatggagaagccacccagcctcggtgaccaggagactcggcgcaaggcccgagaacaggccgcccgcctgaagaaactacaagagcaagagaaacaacagaaagtggagtttcgtaaaaggatggagaaggaggtgtcagatttcattcaagacagtgggcagatcaagaaaaagtttcagccaatgaacaagatcgagaggagcatactacatgatgtggtggaagtggctggcctgacatccttctcctttggggaagatgatgactgtcgctatgtcatgatcttcaaaaagggaatgggacccccagaaggctgaggagaagcggaagctgaaggagctggcccagaggcaagaggaggaggcagcccagcaggggcctgtggtggtgagccctgccagcgactacaaggacaagtacagccacctcatcggcaagggagcagccaaagacgcagcccacatgctacaggccaataagacctacggctgtgtgcccgtggccaataagagggacacacgctccattgaagaggctatgaatgagatcagagccaagaagcgtctgcggcagagtggggaagagttgccgccaacctcctaggcgccccgcccagctccctttgacccctggggcagggcagggggcagggagagacaaggctgctgctattagagcccatcctggagccccacctctgaaccacctcctaccagctgtccctcaggctgggggaaaacaggtgtttgatttgtcaccgttggagcttggatatgtgcgtggcatgtgtgtgtgtgtgtgagagtgtgaatgcacaggtgggtatttaatctgtattattccccgttcttggaattttcttccccatggggctggggtactttacattcaataaatactgtttaacccaa

SEQ ID NO: 366245 - DNA, 6260 bp, Homo sapiens
cctcttcccggttcgccctcacctcccgcttccgtcctcctcccccgcgccagggggcgccgctcaccgcagggccccacggcggaccagcgcgtgccggggactgtcccggagacccccgcacccggcacctgcactgtccctcgcccaccgcgtgcccgcggactctgctcccggcttctccagaacatccctctatgcgggcgggaccctcccacctcggaggttctcctgggaccaccactccgccggggggccgcccagagtgccaagcgtccgatccggcgccgcccaagtgcagcccaaggacccgctcccgctccgcaccctggcaggctgcctagccaggactgcgcacctgcgccctggggcggagtccttaccccaaccccagcttcactgcacatagccgagcccgacgggcctcctcccatctccatcctggacacctggcggagcccgtgctgagagcctccgccagctcccatctgttccccgaggagggcggggggctcaggctggagccagagcggtagatgggcacagactccccctccccccggcccctcaggccgggggtgaccttgccccctggagccctcaccatgaataccaaggacaccaccgaggttgctgaaaacagccaccacctgaagatctttctccccaagaagctgctggagtgtcttcctcgctgcccgctgctgcctccagagaggctacggtggaatacaaatgaggagattgcatcctacctgatcacctttgagaagcatgatgagtggctgtcttgtgccccaaagacaaggcctcagaatggctccatcatcctctacaatcgcaagaaggtgaaatatcggaaggatggttacctctggaagaagcggaaggatgggaagaccacccgagaggaccacatgaagctgaaggtccagggcatggagcctggcagtgtctctatggctgctacgttcactcttccatcgtccccacattccatcggcgctgctactggctgctccagaaccctgacatcgtccttgtgcactacctgaacgtcccagccctggaggactgtggaaagggctgcagccccatcttttgttccatcagcagcgaccgtcgagagtggctgaagtggtcccgggaggagttgttgggacagctgaagcccatgtttcatggcatcaagtggagctgcgggaatggaacagaagagttctctgtagaacacctggtgcagcagattttggacacccacccaaccaagcctgctccccgaacccacgcctgtctctgcagtggggggcttggttctgggagccttacccacaaatgcagcagcacgaaacaccgcatcatctctcccaaagtggagccccgagctttaaccctgacctctatcccccaccctcaccccccagagcctcctccactgatagccccacttcccccagagctccccaaggcacacacctccccatcttcttcctcttcttcctcctcatcaggttttgcagagcccctagaaatcagacctagccctcccacttctcgagggggttcttcaagaggaggcactgctatcctcctcctgacaggactggagcagcgggctggaggcttgacgcccaccaggcacttggctccacaggctgatcctaggccttccatgagtttggcagtggttgtaggcactgagccttctgccccaccagctcctcccagtcctgcctttgaccctgatcgttttctcaacagcccccagaggggccagacatatggaggggggcagggagtaagcccagacttccccgaggcagaggccgctcataccccctgttctgccctagagcctgctgctgccctggagccccaggcagctgctcggggtcccccaccacagtcagtagcaggtgggagaagaggaaactgcttcttcatccaagatgatgacagtggggaggagctcaagggtcacggggctgccccacccataccttcaccccctccctcacccccaccctcacctgcccccttggagccgtcaagcagggtaggaagaggagaggccttgtttggaggacctgttggggccagtgaactggagcccttcagtctttcatcattcccagaccttatgggagaactcatcagtgacgaagctccaagcatccctgctccgaccccccagctgtctcctgctcttagcaccatcacagacttctccccagagtggtcctacccagagggtggggtcaaggtgctcatcacaggtccttggaccgaagccgccgagcattactcctgtgtctttgatcacatcgcagtgccagcctcacttgtccagcctggtgtcttacgctgctactgtcccgcccatgaggtagggctggtgtctttgcaggtggcagggcgggaggggcccctttctgcttctgtgctctttgagtatcgagcccgccgattcctgtctctgcctagtactcaacttgactggctgtcactggacgacaaccagttccggatgtccatactagagcgactggagcagatggagaagcggatggcagagatcgcagcagctgggcaggtgccttgccagggtcctgatgctcctccagttcaggatgaaggccaggggcctgggttcgaagcacgggtagtggtcttggtagaaagcatgatcccacgctccacctggaagggtcctgaacgtctggcccatggaagccccttccggggcatgagccttctgcacctggctgctgcccagggctatgcccgcctcatcgagaccctgagccagtggcggagtgtggagactggaagcttggacttagagcaggaggttgacccgctcaacgtggatcatttctcttgcacccctctgatgtgggcttgtgccctgggacacctggaagctgctgtgctccttttccgttggaaccgacaggcactgagcattcccgactctctgggccgtctgccattgtctgtggctcattcccggggtcatgtgcgccttgcccgctgccttgaggaactacagagacaggagccttcggtggagcccccatttgccctatcgccaccctcctccagcccagacactggtctgagcagcgtctcctcgccctcggagctgtcggatggcaccttttccgtcacgtcagcctattctagtgccccagatggcagtcccccccctgcacctctgccagcctctgagatgactatggaggacatggccccaggccagctttcctctggtgtcccagaagcccccctactcctcatggactatgaggctaccaactccaaggggcccctctcctcccttcctgccctcccaccagcttcagatgatggggctgctccggaggacgctgacagcccacaggctgtggatgtgatcccggtggacatgatctcactagccaagcagatcatcgaagccacaccggagcggattaaacgagaggacttcgtggggctgcccgaggctggagcctcaatgcgggagcggacaggggctgtggggctcagtgagaccatgtcctggctggccagctacctggagaatgtggaccatttccccagctcaacccctcccagcgaactgccctttgagcgaggtcgcctggctgtcccttcagcaccctcctgggcagagtttctctctgcatccaccagtggcaagatggaaagtgattttgccctgctgacactatcagatcacgagcagcgggaactgtatgaggctgcccgagtcatccagacggccttccgaaagtacaagggccggcggctgaaggagcagcaggaggtagcagcagctgtaatccagcgctgttaccggaagtacaagcagtttgcactctataagaagatgacccaggcggccatcctgatccagagcaagttccgaagctactatgaacagaagcgatttcagcagagccgccgagcggctgtgctcatccagcagcactaccgctcctaccgccgcaggcccggccctccccaccggacttcggccaccctgcctgcccgcaacaaaggctcctttctcaccaagaagcaggaccaggcagcccggaagatcatgagattcctgcggcgctgccgacacaggatgagggaactgaagcagaaccaggagctggaagggcttccccagccgggactggccacatgacctggccaccgcctttctcaccaccctgggggcgcctcgtgcagtcttaacagggagagggctttctggggcagggggagcccctgtcggcagctttcctgttcacctttgttggagccctctgtaggcctcctccctcctccccacgccttgctcccacacccctctcctcgtccctcctggtcgtgccccgtctcttttggtcctggctccagaaaacccgcgccccacatacctgcatcttccgctgtgacctccggagccctgcctgcccctgctccccagctcctcctgcctgcacccgactcggccccctcctgacttgccttatttatttgttcgacgcgtctctgaatgtatccgcctcggttcccaccactgccttcgctgcgcacgcccctcgtgtttcagggctgaccgtgtccccacccgactccgcatgtttgcgtctgtttcctccctctctggccctgtcttaccccatcacccgactctggccactgacctcagggccgaaggggaggtggtgtacataggaacgcgttgcggagtccgccccgtcccccgaggggaggggtcttgtacatactgtaacatacagagtatagtgaagaatctatttaaggcgccgcggggagggctgcacggccgggcttgtggttctctagcgcggcgggggcctcctgccggctccacgggcactttctacttgtgcatgggcttggtttatacgaattgccattaaacatcgctgcaccagccagcctccggcctctgtctgcgggggcggggcggggcctaggccagctggaggccgccatgcaccgcgggcctgggatctgcgcccaggccaggcgggcccagggttttccgcctccgacgtgtttccggccttaaaggcattccgcccttccctttaagacgcaccgccccctctcagtcactcccaagatggcggacctactgggctccatcctgagctccatggagaagccacccagcctcggtgaccaggagactcggcgcaaggcccgagaacaggccgcccgcctgaagaaactacaagagcaagagaaacaacagaaagtggagtttcgtaaaaggatggagaaggaggtgtcagatttcattcaagacagtgggcagatcaagaaaaagtttcagccaatgaacaagatcgagaggagcatactacatgatgtggtggaagtggctggcctgacatccttctcctttggggaagatgatgactgtcgctatgtcatgatcttcaaaaaggagtttgcaccctcagatgaagagctagactcttaccgtcgtggagaggaatgggacccccagaaggctgaggagaagcggaagctgaaggagctggcccagaggcaagaggaggaggcagcccagcaggggcctgtggtggtgagccctgccagcgactacaaggacaagtacagccacctcatcggcaagggagcagccaaagacgcagcccacatgctacaggccaataagacctacggctgtggtgaggccacagtgcggctgggggtggctgggagaggagcataggatgcggcaggagggcagtggaggctgaggtacggatttctaggcccgccctaccctcctctctgcccctagtgcccgtggccaataagagggacacacgctccattgaagaggctatgaatgagatcagagccaagaagcgtctgcggcagagtggggaagagttgccgccaacctcctaggcgccccgcccagctccctttgacccctggggcagggcagggggcagggagagacaaggctgctgctattagagcccatcctggagccccacctctgaaccacctcctaccagctgtccctcaggctgggggaaaacaggtgtttgatttgtcaccgttggagcttggatatgtgcgtggcatgtgtgtgtgtgtgtgagagtgtgaatgcacaggtgggtatttaatctgtattattccccgttcttggaattttcttccccatggggctggggtactttacattcaataaatactgtttaacccaa

SEQ ID NO: 366246 - DNA, 1687 bp, Homo sapiens
ccgacaacctttttcccatccgtagccttaaattcccgagctgcccgggcggatcgtagtgttgattggagggatgagaatacccgccgggtccgattggccactgtctccgcctgcgttctcggagtagcttccctgcgggtgggctggagttcggcggccggcgtagggcgcggccctgcagggcggtgggagcctccccggggctgctcgtgttgcagcttgggatgatactggcggaacgcaggaccccaactcccaaacctgcggaccttgaccacggacgagccctgtcccagctccccacgtgccccagggggaccagagcaggcaggacgccttccaagtattcaagggccgctggttgcctacgcttcgtccccttgtttcttgaacaaccgttagggaccaggggtacccctcagggaggccacagtccggggctggggcgctcattgatgcagtgatcacacgtaagtttaataaccaacttgataagtgctctgagagaaaaataactgtgagagcggccacctgaggttctcccccaatctgcagtgagccgagatcagaacaggtaattccgtaaatgagagagagaagcaaagcgttacaggcagaagagtctatttgaaatctctgagaaaggaggaagcatgatgggaatggggaactggaattctctaatgctccgatgactgtctaagtgggggatcacccggcattgacagactgggaagcttaaatgagtcactcgcctgaggtcacatggttagtttgaacaggccgcccgcctgaagaaactacaagagcaagagaaacaacagaaagtggagtttcgtaaaaggatggagaaggaggtgtcagatttcattcaagacagtgggcagatcaagaaaaagtttcagccaatgaacaagatcgagaggagcatactacatgatgtggtggaagtggctggcctgacatccttctcctttggggaagatgatgactgtcgctatgtcatgatcttcaaaaaggagtttgcaccctcagatgaagagctagactcttaccgtcgtggagaggaatgggacccccagaaggctgaggagaagcggaagctgaaggagctggcccagaggcaagaggaggaggcagcccagcaggggcctgtggtggtgagccctgccagcgactacaaggacaagtacagccacctcatcggcaagggagcagccaaagacgcagcccacatgctacaggccaataagacctacggctgtgtgcccgtggccaataagagggacacacgctccattgaagaggctatgaatgagatcagagccaagaagcgtctgcggcagagtggggaagagttgccgccaacctcctaggcgccccgcccagctccctttgacccctggggcagggcagggggcagggagagacaaggctgctgctattagagcccatcctggagccccacctctgaaccacctcctaccagctgtccctcaggctgggggaaaacaggtgtttgatttgtcaccgttggagcttggatatgtgcgtggcatgtgtgtgtgtgtgtgagagtgtgaatgcacaggtgggtatttaatctgtattattccccgttcttggaattttcttccccatggggctggggtactttacattcaataaatactgtttaacccaa
